United States Patent Application Publication US 2018/0305689 A1 - sequence listing, part 110

SEQ ID NO: 1563176 - DNA, 4001 bp, Homo sapiens
aatggtaattgctttcactttgtgatttttggcaacaaatcttaagtcatttcctcgtagggggcctaaaggaatattttcacctatattttaatttatatattcataattattatatataatatagtataacttttgtacatcatacatagtataaatgtatcacataaaatatgtaaataaggctgggtgtggtggctcacgcctataatcccagcacttagggaggccgaggtgggaggattgcttgagcccaggagttcaagttaagtctgagcaacaaagtgagagcctatctctagaaaaaaaaaacaaaacaataaaatatataaatataatatataaatatataataaagcataatttttctttattaaaatatgcatgcttttctttacaaaaataatatatactttaaaatatatatgtacatatatgtatagatacataaaacatgtacatatacgtacacatctacatataaatacatgttataatatgcacgtataaatataaacatataacatataaacatgtacctatagacatctacatacatgtttatgtgttcatatatgtatgcttatatgtatataatgtatacatgtacatgcatgtatatatacatacatatatgtatacataacatatatacctataaaacatgtacgtatatacatgtaacgttaatatatgtactttttaaagtaaaaatgtttatgtgtgtatgtatagtacatatatacatataaaacaagtacatatatgcatataacatatatatgtacatgatttttcaaggaaaaagcatattatgggctgcttctgacttgcctggggaacatgactggttgtgtttgttttatcgggctggttatattggtgtctaaatataggaccctcaaacatgtttgaacagtcatatgacgtacggttagatatcaagtctgtggcctacctctgaactgatgtatttatgtatttagtgacacaataaaagcagatttttcttttccaaagaactctgcactttaacccttggaatgttaaacattttggtccagatttaatttttactactgaataaaactttctacttttttattctaaagacacaaggtatctttagaaagagacaagaggctgggcgcggtggctcacacttgtaatcccagctggcacactctggcctttgggaggccgagatgggaagatcacttgaggccaggagtttgagaccagcctggacaacacggcaagatcctgtctgaatttaaaataaaacaaaataataaaatatagaatacagtaaaatataatacaatgcaatagaaataaagataaaagaagcagacgaggaaacacccatgcaagactgacaatatagcctttgattctcttccggggagaaggaatcccagccctcctttcccgccctgagcttcagccccgggctgcgagcctgtgttcaacgcttcgcctgggccctgttcccaaacccagtttcgcttttcacctccggtgtctcttcgatgttcagtgcacgtgccttcagcatctctaagataagaatctagtgtggatgcaatgtctcccatttggtgcatcttccctcgttgctttttttttacgcattacgtttggaaatctcccatgtaaaatctgtacttgagattttcactgatgattattattattttttgaaagcaaattacttttaaaacattgacagggacttgtttgaaaagacgcagtttagcataaaagaatatcccctggagcgtctctgcacgtgcaaaagccggcctgtaagaagaagccccaggaaggccagttacctgacatgcagctgtgtaagggcgacactggctggatgtagcggggaggctgctccttggaagaaacgtcttcttcctgccaaaacagacacgcactggctgtctcggcggcactgaacggctggctcacgcatgtgcgtagctgattcactctgaaaagcaaaaacaggaattccgcagaaaccaagttaggttgtcccagaaacagatcaggcaagtccccaaggaatgtactgctgggtctttcaggcgtccacaaaagaccttctgttctatttgcagaacctcactctcgcggaaggagcccagacatctggtgctgaacgcggggtttttcaatggcaggaaggtggaatcccttcgggcttttgatgtaggcagagtgcatttcccaaagtggaaaagtggttttcttaaaactcatcttgaatcatcactccgtagcccttcaatttcacgcctttttctttccttttgctatttgcctcaaacataaaaagaagacaggaaacaattcaggttacagttgcaactatgactgtgtgtacacagccgcaactattaccatatgtatatagctgctcacctatgtgactctgtcactatcacttccgtttagctctgtgcaccaatgtgttttctcatctatttgccagggagcgcatttcttttttcatattgaagcagagcatacattgcaggcaacgttaggtgtaaaacgaatcacttcaaggactttttttttttttcaaataagagctgtctgcacacttctacgtgttgaatcacaaaaatattcatcctaatgcatttatagtctctatagcctgaacattgcagagttttgatttgagactcccgcttgccaaataagccctcttataaatctgcagctgcctacattcttcatgagtttaacacatcagaaagaacaaagcataggctcgacgggctgaggaacacctaccgctctaggccaagtctactaggttatgttgctcttgagggaaggctgtcaacactcatgcagttattttttgcacaagttgaacatcaaggagataaaaccgggatccaaattggaactcccaggttggctgaacttcagcctgactttctatgttctgggatgaggcatggttacgccactaccctactattgacctctgaggaggatgattctttattgtaggggccgtcctgtacattgtacaatgttgaaaagaatccctgggctccactccctagaagcaggtagtgatcaccacctcctccccagttgtgacaaccggaaatatctccagccgtggcacaatgtctcccgggggggcagaatcactccggttgaaaacactggtgttaaggacgtactttgcaggtgactggagaacacttaattacgatcatgctgggtgagccatttcaatttgtttctcatactcccacgtccttcagagctggtagcagaatcaagctccacacctgaaactcttagcacgaacgttatacaacagtacttgtcagctgcatttccaatactagcatcccaaaagagatactctcttagcatcaagtaaagtcatttactctttttttgttttttgttttttttttgagacaggggttcgctctgttacccagactgcagtgcagtggcacaatcactgtcactgcagcctcgacctcctgactcaaatgatcctcccacctcagccccctgaatagctgggaccacaagcacacgccaccacaggtggatcgctttttttttttttgtaaaaatggggtcttgctatgttgccccctctaatcgctaactcctggcctcaagcaatcctcctgcttcagcctcccagaatgctgggattacaggtatgagccactgtgcccatcctaacaatacatattctttagcaaagttcagatccccaccgtcatcctaaccttgtcttctgcacggagctttcgtctctgaacaaggcggacgttcgctttcccttgactccaagttgaactacgaactaaagtggtctcattgtcatcttgggcaccatatgctagaagaagcaagacaaatacaagacaacaacaacaacaagaacaacaacaatgtagcctgtgaggttagaagcaacatggaatcagtcatgttcgatttctctc

SEQ ID NO: 1563177 - DNA, 4001 bp, Homo sapiens
ttttatagtctatgaattttctgtgtttgcctaagcaaaaattttaaatatatatatattttactgataacttgggatttagctctttttactacactaataacattaaacgtcttatttctcaaaaagtacagaaacaaagattattgtgtttcatgctgggttgctgggtttatagttttgtaagccttatgccaaattttgacaccttataatatctgtcagaggtaaatatgaaactgcttgatcagtaaatgcaaacaaacatgtatgctgacaatttttaagatatttctaatactatcgtaccaataattttaaagccagcttatttattaaagatttatgtaagtcacgtgaacttgaaaagcgttttggcttattatttaatttatgagtactctttgacttgaagccaatttgacacttcagggctaaagcacgtaaaaaatgtatatgtgcacacatatgtgcatgtacataaacacatctaaatacgcatgcacactcacacaaagatcctatagcttttacttcagaactctagcaagagatatcaacacaaactcaccagtttatacaaacaaaaaggttggatcccaacagtgacttctatctcaacagcagtggaaaagtaacagaagggccaggagtggtggttcacgcctgtaatcccagcactttgggaggccgaggccggcggatcacttgaggtcgggagttcgagaccagcctggtcaacatggtgagagcctgtctccactaaaaatacaaaaattacgtagacgtggtggcgcacgtctgtaatcccagctactggggaggctgaggcaggagaatcgcttgaacctggaaggcagaggctgcagtagatagcgccattgcactccagcctgggtgacagagcaagactctgtctcaaaaaaaaaaaaaaagaaaaagaaaagaaaagaaaagaacaaaaagtaaacagaagatttaaagtaggcagaaaagaaaatagcaaaatagaggacttaggaactgattggttgcaggttgacctttgggctggaattttctctggtgtaatgtgtgcagcagtttaaagtgtgaacaagcacagacataatatgtaacaggaagcttcttgtttgacctggcatgccctcaagcttttcccgcttacacaaatacttgcaagtagaggaaccagagaaccaaaaggggtgcccaaatgggggtcgctctctccgcctttcctcatccttacatgctatgtctcccacttttattttaaaatgaggaactaaactgtggcctgggttttagtagggtggattgaagtgtgctggctgtgagagggactacactgtgtgtcaccactgagtctttctaccctttcacgtgtctgagtttctctctccagaggtctagacctctgacagggctcaacatagcaagtgatcagctcttacacctgtctcctggatgagcctcttaaaattaattttgttgtgtggttccctgtagggtcactgcacatcatggcaggagtcaatcccccagagactcccactcaacccctaccacccaggggtggtttttggctaggaggagcaaaactccctttcttttccaagctgaggaggtcagcctctcgtttggcaattcaaaattatgccacaaaagtggcagttcagtctctcacgcaaatgtactcacaggccaatcgacattaatttggggggaaaagggcagtggagaagaccatttagaatgcaccaccaaacctaaagtaggatcctatacaacaacttcctaggagaaaaataaaaaggaggtagaaaaacagctcagaatgaaccaaggaccatcaaccaaatggaaggtccagagctgcagaggactcaccggttccactggaggagaaacctaaagccagggagggcttccaatggccctgcgggtaacttagctccgggttcgggcaactgcgtcaaggattctgagtcttttctgaggccccacgtgtagggcaccaattaatgtccatgaaaagagtcaaactctgtaaaatatttgaaaagagttattcatttaaccaatggctcacgacacagccccaaggaggtcctgagaacaagtgcccaaggtggttgggtgacagcttggctttatacaatttacggggacaggagacatcaatcgacacatgtgagatgtacattggcttagtccagaaaggtgggattccattcaaagtgaggaacttccaggtcgtaggtggattccaggattttctgattaaagacctgtaattagtagaaaggaaatgtctgggtgaggataaggcgttgaggagaccaaagtttttattatgcacatgtagcccgcaggtagcaggcttcagagaaatcaggtagtaaatgtttcttattagacttaaaatggtgccagactcttgcttaacctttcctggatcagaaaaaataataatttcacagtggagaattccaacagacaccacttaatccaggtgatgaaatttaacatcaccaggacaggacatacagacatcatgcactccgtaacatgacacactgaaaacttacatcaattctgatgatttttttgccaaaaatgcataacctcagtctaatcatgagaaaacactggacaaaaccaaactgaaggctgggcacagtggctcaagcctgtaattccagcactttgggaggctgaggcgggcggatcacctgacatcaggagttcgagaccagcctggccaacaaggtgaaaccccgtctctactaaaaatacaaaaactagccgggcgtggtggcaggtgcctctactcccagcaattgtggaggctgaggcatgagaattgcttgaacctgggaggcagaggttgcagtgagccaagatcgcaccactgcactccggcctgagggataaaggaagactctgtctcaaaaaaaaaaaaaaaaactgaagaacaatctataaaataattgaccattacttagattggatagtggaacagaatcatatcaaatgcatccatttattttcaacattttgtttgtttttaattaagctgcctcctacactaccgtatgtccggattttatgtttattttcccattcagaaagcctatcttttttaaaggaattttaatccatccatgtttattatgatcatggttatatttggattgagtcctgcagtttcactttatattattttcccttttttacacatatcagattttctgcttcttcggtgtaattctttcccacccacctctgattgcatgaatcaggttttcttcaatccacgcatttcccattaaggctctgaaacttgtacacatcttttctagttttctggtggtaaccacctttcacctgtcagcacacgtatttaagcttatattttctatcaaatataaagatagtcattacctatgtcttcttcccagacgaaacaaaaacatgaacatatgctcattctctctttcttctctgctctttcaattacctcccatgtgaaatgttaattccagattattttcacaactgtgcactaacacattcagactttgttttatacatttatttattcagcactgcttcctgtgtactctcttctttttattattattattagtagtagtagtagtagtattttgagacagggtcttgctctgtcacccaggctggagtgcagtagtgtagtcatagctcactgcagcttcaatgtcctgggctcaagtgatcctcccacctcagccttctgagtagctgggactacaggcatgtgccactcagcaattttaaacaaatttttagtaaacactcagcaattttaaacgaatttttagtaaagatgagattgcactatgttgtccaggctggtcttgaactcctggacccaagcgatcctcccacctcagcctcccaaaatgctgtggttacaggcatgagccactgtgcttgtctactctcgcctttct

SEQ ID NO: 1563178 - DNA, 4001 bp, Homo sapiens
gtattttaagaaaatcttgttctaaccaatgatctccttttgcattactgtatttttattattgaagtccaatacctagaatgattataatttccttttagttatagcaaacttaattacataaaaatttttttgaattccttttttacagactgtattatgacttgcacagaccatatacaacctgcttggattttctgttctgtcctaaacatctctcttaaacaacaagattctttctcatacaaaattatttttcttttaacatttcttaccaaaaatacctccttgtaactttcttcttctttttttttgagatggagtagtctcgctctgtcacccagcctggagtgcagtggcacgatcttggctcactgcaacctctgcctcccgggtgcaagcaattctcctacctcagcctcctgagtagctgggattacaggcacatgccaccatgcctgactaatttttatatttttagtagaggtggggtttcactgtgttggtcaggctggtctcaaactcctgacctcatgatccgcctgcctcagcctcccaaagtgctgggattacaggtgtgacccaatgcacgcagcctaactttctttacatctcttgtttcttggttccttttaccatatttcataaataacccttaaataaacctagaatctggccgggtgcggtggcttgcacctgttatcccagcactttgggaggcttaggtgggtggatcacctgaggttaggagttcgagaccagcctggccaacatggcaagacccctatctctactaaaattacaaaaattagccaggcatggtggtgggcacctgtaatcccagctacaagggaggctgaggcaggagaatcgcttgaacctgggaggcagaggttgcagtgagctgagactgcaccattgcactccagcctgggagacagagcgaggctccatctcaaaaaatataaataaataaacatggaattagatgaaaataacttagctttgaataagaacatattttttagaaaagtttttctataatacaatttatttaaattgaaaatggcccagacatttagtgaatatctattatttaactttagattctaaattatatttatttacaggcatttgtttcattacatttacctaattaattttataaaatcttttacctagattatctgtgaaaactctgatagtcatcatttaaagttatttccctgttaaccatttttatagtctatgaattttctgtgtttgcctaagcaaaaattttaaatatatatatattttactgataacttgggatttagctctttttactacactaataacattaaacgtcttatttctcaaaaagtacagaaacaaagattattgtgtttcatgctgggttgctgggtttatagttttgtaagccttatgccaaattttgacaccttataatatctgtcagaggtaaatatgaaactgcttgatcagtaaatgcaaacaaacatgtatgctgacaatttttaagatatttctaatactatcgtaccaataattttaaagccagcttatttattaaagatttatgtaagtcacgtgaacttgaaaagcgttttggcttattatttaatttatgagtactctttgacttgaagccaatttgacacttcagggctaaagcacgtaaaaaatgtatatgtgcacacatatgtgcatgtacataaacacatctaaatacgcatgcacactcacacaaagatcctatagcttttacttcagaactctagcaagagatatcaacacaaactcaccagtttatacaaacaaaaaggttggatcccaacagtgacttctatctcaacagcagtggaaaagtaacagaagggccaggagtggtggttcacgcctgtaatcccagcactttgggaggccgaggccggcggatcacttgaggtcgggagttcgagaccagcctggtcaacatggtgagagcctgtctccactaaaaatacaaaaattacgtagacgtggtggcgcacgtctgtaatcccagctactggggaggctgaggcaggagaatcgcttgaacctggaaggcagaggctgcagtagatagcgccattgcactccagcctgggtgacagagcaagactctgtctcaaaaaaaaaaaaaaagaaaaagaaaagaaaagaaaagaacaaaaagtaaacagaagatttaaagtaggcagaaaagaaaatagcaaaatagaggacttaggaactgattggttgcaggttgacctttgggctggaattttctctggtgtaatgtgtgcagcagtttaaagtgtgaacaagcacagacataatatgtaacaggaagcttcttgtttgacctggcatgccctcaagcttttcccgcttacacaaatacttgcaagtagaggaaccagagaaccaaaaggggtgcccaaatgggggtcgctctctccgcctttcctcatccttacatgctatgtctcccacttttattttaaaatgaggaactaaactgtggcctgggttttagtagggtggattgaagtgtgctggctgtgagagggactacactgtgtgtcaccactgagtctttctaccctttcacgtgtctgagtttctctctccagaggtctagacctctgacagggctcaacatagcaagtgatcagctcttacacctgtctcctggatgagcctcttaaaattaattttgttgtgtggttccctgtagggtcactgcacatcatggcaggagtcaatcccccagagactcccactcaacccctaccacccaggggtggtttttggctaggaggagcaaaactccctttcttttccaagctgaggaggtcagcctctcgtttggcaattcaaaattatgccacaaaagtggcagttcagtctctcacgcaaatgtactcacaggccaatcgacattaatttggggggaaaagggcagtggagaagaccatttagaatgcaccaccaaacctaaagtaggatcctatacaacaacttcctaggagaaaaataaaaaggaggtagaaaaacagctcagaatgaaccaaggaccatcaaccaaatggaaggtccagagctgcagaggactcaccggttccactggaggagaaacctaaagccagggagggcttccaatggccctgcgggtaacttagctccgggttcgggcaactgcgtcaaggattctgagtcttttctgaggccccacgtgtagggcaccaattaatgtccatgaaaagagtcaaactctgtaaaatatttgaaaagagttattcatttaaccaatggctcacgacacagccccaaggaggtcctgagaacaagtgcccaaggtggttgggtgacagcttggctttatacaatttacggggacaggagacatcaatcgacacatgtgagatgtacattggcttagtccagaaaggtgggattccattcaaagtgaggaacttccaggtcgtaggtggattccaggattttctgattaaagacctgtaattagtagaaaggaaatgtctgggtgaggataaggcgttgaggagaccaaagtttttattatgcacatgtagcccgcaggtagcaggcttcagagaaatcaggtagtaaatgtttcttattagacttaaaatggtgccagactcttgcttaacctttcctggatcagaaaaaataataatttcacagtggagaattccaacagacaccacttaatccaggtgatgaaatttaacatcaccaggacaggacatacagacatcatgcactccgtaacatgacacactgaaaacttacatcaattctgatgatttttttgccaaaaatgcataacctcagtctaatcatgagaaaacactggacaaaaccaaactgaaggctgggcacagtggctcaagcctgtaattccagcactttgggaggctgaggcgggcggatcacctgacatcaggagttcgagaccagcc

SEQ ID NO: 1563179 - DNA, 4001 bp, Homo sapiens
gcttttcatctatgcaaagttagttgaattttttcacctcctgtttttacaacactttaaaatcatgtatacggctgggcacaatggtggctcacacctgtaatcccagcactttgagaggctgaggcggggggattccttgagcccaggagttcaagaccaacctgggcaacaaaatgagaacctgtctctacaaaaaataaaaataaaaaattagctgggcgtggcgataagcacctgaggtcccagctactctggaggctgaggctggaggatctcttgagcccaggagttggaggttgcagtgagctatgactgcaccactgtcgtctaccctgggtgacagagcaaaaccctgtgaaaccctgtctctaaaataaataaaaataaacataaactcatatgtatctgttggaaatttacagtttacatctctatcaattgcctaactcctacctttttaaaaaacttacacacttactaagtcgagagaatgaacttagacatcttatggccagccatataaagacagcatgttgactcatagtaggttacaagaaaagaaaaagaaaaaagaaaaaaaggcagatgatattaaatgcctctacctataaggctggattcacaaatacacagaattatacattagattcaatgtgctcacaatgcagtatatggctttacctacctgggcctcattgtgcagcttggaataccttcttgttgtctttggcagaagacacagacgtgatttaaaagaccaaaaaaaaaaaaaaaaagtatcattcatgtgtcaattaaattagttcccagcatgaaattcacactagacttgtgagccatatccctaattccgacatttttaaattgattttccaaggccactactgcacaaatcctgaactttcaatgagttcattcttttgaccttttttttttttttgagccggagtctcgctgtcacccaggctggagtgcagtggtgcaacctcagctcactgcaacctctgcctcccgggttcaagccattctcctgcctcagcctcctgagtagtggggactacaggcgtgcaccaccacgcccggctaattcttgtatttttagtagagatggggtttcagcatgttggccaggctggtcctgaactgctgacctcaagtgctctgcccgtcttttggcccatttttaaaagaactcctgctgccccaagtcctggggctcttggatgaattgtctcagtggcaaaacctgccctgaaacatgctggcccaagagcattgtctcaatgtcctgccaagcctaaaagtttaaactcagaaagcttctgtgtcctgaataaggaaagaggcaattaatcaaaatgagctccctcttttttgactgcaaaatgcagaaaccactgaatgactaatggttatatttagttggcagtggcagaggggttaggactaagggatatgacagccaaatgcattacaatgaaagaaaagcccatctgtagtctgcaagttattacccatatttgtaccttaaaataacactaaggacaaaatacaaacgcattcctccttaaattcattttgttccaaagcatgtatactctggacacatactatacacactacacagacacacacgcacgcacactcacacacacacacacacacgttcttggttaagaaagaaaaaggaagggagggagggagggaagaaagaagaaagggtatgagagtaacagaaaggagagaaacttgctcacactaaaattggtttggaatccatttctcagtgcctaagctgatgatccattgagtttcagaatacaataggtcaatggatctttcaactatgcccgtttctaccagaggttaaaaaaaaaaaaaaaaggctgagaaaatgtgtccaaacaagccttccccaactcacctatcagccgtattatctctctaatgtctaggagcagaacagacaggctgttctgcaaaggctctgcctcttttggcagctgcctcgaatcattacgaaagcatcagctgctccgtgtcacctctctctcccatgggagggctggtccctgctaggctcacccagatggttcccgttgctaatctgcagcccgcatttgcaactcctactacacacccaggaaaagaaaaacaacagcacatcaacaacaaaacattacattcagccaaatacctacagcctttcttgctgacgctgaatgttcttatctgggacgaccaccaaagccattcatcgcaccagaattaagactggctgttttgagccagagcaatcccatttgatgtcccttgtgttgcggtgacctcatggtctatagcagtgcctcagggacatctgtgctcccaactaaaggtggtggggacgtgggagggaaatggaaggtcttccctgtctttatatcttaataatattcaacaagacaaagtgtggggtataatttggaagatggcaggtgtgctgttcgtcaacacccaccccaaaaggatggctattatattaaacactgatgcaaagccagatagcaactctcccagcattttaaataaagatttgagaatatcagagggcatacataaccctctctaaaccaaacaccaccttgtgagatggaacgctccatgaaacatgctgttgtatgattctataaactctagaaaccagattttgttttgttttgtttatgagactggttgtctctctgttacccaggctggagtaaaattatggtgatcacagctcactgcagcctcgacttccaggctcgagtgatcctcctgcttcagcctcccgaatagctgggactacaggcacccactagtccatggataatttttgtatttttacataatctcactatgttgcccaggctggtctcaaactcctgggctcaagcaatcctcccatctcggcctcccaaagtgctgggattataggcgagagtcactgcgcccagcctggaaaccagatcttgcattagaccagagatgcagatttcttcaggtaaatgtacctggagaggaattttgaactggaattgtctaaaaacaccaaaataatatatgttaagaagatgtgaacttattccctaaaatgaaaatttacatataaagggcatgtgcatttttttttttttttgagacagagtctcactctgttgccgaagctggagtgcagcagcacaatttcagctcactaaaatctctgcctcctggtcttaaacgattttcctgtctcggcctcctgagtagctggaattacaggcacctgccaccatgactggccaattttttttctcctgattttattttatttatttatttatttatttatttatttttattatactttaagttctagggtacatgtgcacaacatgcaggctcgttacataggtatacatgtgccatgctggcccgctgcatccatcaacccgtcatttacattaggtatctctcccaatgctatccctcccccaaccccccaccccacaacaggcccggtgtgtgatgtcccccaccctgtgtccaagtgttctcattgttcaattaccacctatgagtgagaacatgcagtgtttggttttctgtccttgtgatagtttgctcagaatgatggtttccagcttcatccatgtccctgcaaaggacattaacttatcattttttatggctgcatagtattccatggtgtctatgtgccaggttttcttaatccagtctatcattgatggacatttgggttggttccaagtctttgctattgtgaatagtgtgcatatgtcttgatagcagcatgatttataatgctttgggtatatacccagtaatgggattactgggtcaaatggtattgctagctctagatccttgaggaattgccacactgtcttccacaatggttgaactagtttacactcccgccaacagtgtaaaagtgttcctatttctccacatcctctccaggatctgttgtt

SEQ ID NO: 1563180 - DNA, 4001 bp, Homo sapiens
catgccactgcactccagtctggatgacagaatgagatcctgtcttaaaaataaaaggaaaaaaaagagatagaggaaagaaaggaaaagaaaaagggaagaaagaaagaaagaaagaaagaaagaaagaaagaaagaaagaaagaaagaaagaaagaaagaaaataagaagaagaagaccaatgcctttcaatcaacaaatatatgcttaagatataggactagactgtgatctgcattccaagaagaaacaatgttatttaaatccacactaaaagatgctatgtatttttacaagagccagattggtctatcgatagagagtagagaaataaagagccccgggtaccagagactttagaagtaattcaaggaagatatttttaaaactgtagactaatgtggtgtatgtatataatgaaaaagtattcagccatggaaaggaatgaagtgctgacgcatgctacaatatgaatgaaccttgaaaacatcacgctaagtgaaagaagccagtcaccaaacaccacttaccatatgttatgagctaaattgtgtccctcccaaattcctgtgctgaagtcctaacccccaggacctcagaatgtgactgtatttgaagatggagtctttatagaggtgattaaggtagcatgaggtcgttaaagtggacccttatccaataggactggggtctttataagaagaggaaatgaggacacagacacacacagagggatgaccctgtgaggacacagggagaagacggcatctccaagcccaggagagaggcctcaggaggaaccagccctgcagacaccttgatctcagacttccagcctccaggactgtgggagaatcaatgtctgttgtttctaagccacccagtctatggtattcttttatagcagcctgaaatagactaagacacctcataagaagaagagatgaggacacagacccacacagagggacgaccctgtgaagacacagggagaagacggcatctacaaggacaggagagaggcctcaggaggaaccagccctgcccacactttgatcttgaacttccagcctccaggactgtgagagaataagctgatgttatctaagccaaccagtctgtggacctttgtcacggcagcctgagaaaataaatactttatatgattacttgtatatgaaattctaagaagagacacatccatagagacagagggtacatttgtggttaacagggcatggggataggatgggaaatgggggtcttctttgtgggggtgacggttgtccaacactgtgaatgtaccaaatgccactgaattgttcactttaaaatggttaaaaggtgatttttttttttttttttaaacagagtctccctctgtcacccaggctggagtgcagtggtgggatcatagctcactgcagcctcaatctcccttgctcaggcaatcctcctgccccagcctcctgagtagctgagaccacagacacacgccaccatgtcccagtagatttttttttttattatttttgtagagacggggtctccctgtgttgcccaggctgatcgcaaactcctgggctcaagcaatgctcccaccttggccttccaaagtgctgggattataggcttgagccgccatgcctgatcaaaaaaggccaatttttaaatgtaaattttgcccaacaatgaaaacgccaccaccaacagctagaatctaaggaaactgggaggttaagtggtctcctgacattttgcaattttccccagtgacctctgctattcctgccgataacatcagacaatgacttctctccagaaacccttctctgcaacggcaaagacgtgaacactgtggtaagggagactcccacatacagggagggggtcagagtccatctttacctcactgagttattaccgtagcagcacaaatcccccactccaaggtcatctgccatcagcaggacaatgttgggtctggcgtttcttgtcataaatgtgccatcaacaccgcaaaacaaacagcacagggacactgacagccagcagctcctgaaagcatttttagaaataagcaaacaaacaagcaagcaaaaaaccaggcactatcaattaacatttgcattttagataacttaacatatgaaacagtgatattcgttatcagttctcactgtacaacgtacctgtgttgtcttactcagaaactagattaaacaacaacaacaaaaactaatgttctataccggggtccccaatcccctggccatggaccagtactggtccgtagcctgttagcaaccaggccacacagcaggaggtgagtggtgggcaaatgagtgaagcttcatctgtattgacagccgctccccattgcttgcatcactgcctgagctccacctcctgtcagatcggtagcagcattagattctcataggagcgagaactctattgtgaactgtgcatgcaaaggatctaggttgtgtgctctttatgagaatctaatgcctgatgatctgtctctgtcttccatcacccccagatgggatcatctagtcacaggaaaacaagcttagggcacccactgatcatacactacgatgagttgtataattatttcattatatattatcgtgtaataataataaaaataaagtgcacaataaatgtaatgtgcttgaatcatcctgaaaccatcctgcacccccttcctgtctgtggaaaaaccgtcttccacaaaaccagaccctggtgccaaaaatgttggagaccattgttctatacgaatatggcatcatattttaccaattcattttgcaagcatgatgaggtttaactcttataacatcttttgatattgttttagtgacatcagaggcttaaaatttataacaggggttacagttgagggtaagctctaaaaattgaattttgccgggtgctgtgactcatgcctgtaatcccagcactttggaaggccaatgcgggtggatcatttgagcccagaagtttgagactggcctgggcagcatggtgaaaccccatctctacaaacaatacaaaaatagctgggcatagtgatgcattcctataatcccagctactcaggaggctgagatgagaggattgcttgagcctgagaggtcaggattgcagtgagctatgaatgcaccactgcactccagcttagacaatagagcaagaccctatctcaaaaaaaacttttttgtttactttattgaataaaaatgtaaccaaggccgggcacagtggctcatgcctgtaatcccagtgctttgagaggccaaggcaagtggaatacctgaggtcaggagtttgagaccagcctgacaaacatggtgaaaccccatctctactaaaaatacaaaattaaccgggcatggtgacacgcgcctgtggtcccagctacttcagaggctgaggcaggagaatcacttgaacccaggaggcggaggttgcagtgagctgaaattgcaccactgcactccagcctgggtagcaagagtgagactccgtctcaaaaaaaaaaaaaaagtaataccatctgctcgggaggctgaagcagggataattgcctgaacctgagaggcggaggttgcagcgagccaagatcgcgccactgcactgcagcctgggcaacagagagagactctgtctcaaaaaataataataattgttcatatttatgaggcttataggggtgtgtgtgtgtgtgtgtgtatgtgtgtgtggcaccatgcccagctgatttttgtattttttttggtagagatggcgtttcgccatgttggccgggcatgtcttgaactcctgacctcaggtgatcctcccacctcggcctcctgaagtgctgagaggtgtgagccatcgtgcccagcctataaacaattattatttgtcaattaaaaataaaaacttttaaagtttcctttttagaaaagaaactttccaaggtttaactctgtcagtattc

SEQ ID NO: 1563181 - DNA, 4001 bp, Homo sapiens
tctccacttttcttgctttttctttttctttctttctctccttctccctttctctgggttccttcttttttcccctttcctctcccttctttccgttccctctctcactctcccccttttatttcctatcttccttcccttatctattcctcttgcccctctctcccttccttttctctccttaccttttttctttttctttctccccctcccttcttttcctcacctctctttctccttctctccccctttctttctctttttgcaggctttctctcccctctctccttctttcttctttattcctttctctttcccctttcctactctctcatttttatttcccttcccacgtcggggcagaggaaaatccgaaaacattctacaactttaaaagaaaatcaccactatcctgaaaactttgcgcatgacctctgcccgctgctccaccatgagggcaagggttggcaagaggggtgcagccctgaaggcgaccgctgcggggcggggtgggggaaagcggccctgtggccccaagtgcaggccgcgccccaacagcccacagcgggagagggtgggggggcttcttgcacaaaaaggcaaagaaaaatcatcctggcaaaaatgttctgggaaaggtctggggcagagagggagtgggagtgcagcaggcgcaggccgctccttccttttgaggaagcgcctggcataggtgccactgcaggctaaaaaaagaaaagaaaaaagtcagttttatttaaatgcccccttctcaaccgtctgctcctgccatccaaattgcgctatggccggaccgctggtttttggattttaaaagaaaccaacagttctttcctttccctgcgacacctctgcagcaagctcgaggcgaaacttgaggataacaggttcggggtaaaaggacatttgttctggaatttttaatttcagaaaaaaataaaatattttaaacagctcgtctattttaaaaaataaaatagcagagaaaaaattagcatccagaagtcacacatttcatacattttaaatacattaaggagcatttggagaatcccaggaagatgttttctgcaaagcttgggtttaaaaggtcacaagtaatctgcaattaaaaaaataaaaccaaaacattgcatatacagaaatcttccaaagaggaaaggccaaggctcactcagcctggagaccccgattcaccagcttttgggcttcttgtcttcatcaagttggtgctacaagggtccaccggccatctactgtttctgacctgtcgccgctcttcagagcacacccaaggccaccaaaaggggcatttaaacaacctaacgatcaacaccgaaaagctaaaggctccctaagcgaaaacgggcctttttctggaagcagggagggagggagggagagacagccctggctagatgtttaacgctctttgaggcagcaggcctcagagttatgccctctccttccttcctctccaaattgacaattccaggccactggcccccgaacaccaaacatccaaatcagggcccaatgcccttagtaagtgcctgacgggagcatccttaccttgcacggccttttccgggtcggcgcggctggtcagcggagcaggcaagctctgcgcggctcccagcaaccgcattttgcacgggctcctccggcccaggatgctgtcgatgcagtaggaggagagcaaagttggagatttacttttgcactcgggcctctcggagcagccctcctcctggtactgattgctcatggctggggctttttcccagggcgcagagagcggatcgccggctgcctctcccggagggtgggatggatgggtgtgtgttgggggtggggttagatagcgggttataacggatattattgcgatctttgtgcctttctgcctcccttggttgccggctgccggctcccgccctgcccgcggcccgagctcgccctctccgcgctcaggacaagcggtaacaagtgtagtgagcagcgggcgctgagctctggagtctctctcctccacgtgctgagaggcgccctctgattggctctcgccagaggccgggctgcgtcggcctgtgggcgcggcgcaaagcccggactggattccagaggggcaggcgggggtgggggcagcgggcacgcaccagagccaattttccttttctttctttctttttttaagttaccaattttctaagtccgctatcctcttcctgcagctcctcctttgaccctttagtgttggccgaagttctagcttattgggatgccaggcctgtgaatgccatctgggtggcgtgcgccccttccaccaacccgaggacctcgctccctggaggcgaggcctcgaggctcacgttcagactcactcggcacttttcaaagccgatattgggctcccaggacaccgccttgacctccctggcgctcaattgccgtcctctctaggccggacgggcgtcggggggccagggtgaccgccccaagcaaacatctgccgtctgggagttcgcttttctcttgcggcccaaggcattgcgctgtctatcttcaccctgagcccgactgtgtctctcttgtttgtagcgtcccccaaccgctctcctctccgttttaaactctggaatgggaaaaagcctccttacagacaaagctctgccataggcgcgcggccttccctagagcatttactgggtgggaagggacaggcgagtatcagcagcgaggaggggcgactggggacgagtctgggggcctcctctttctccctggactctcttccctctttcccccacaaattcgtatctgttaggccttcaccctgaggctgttcaccttccaatcgcagctagggagcagaaccctcagggatccctgacctctccagggtggaaggaacccaaattcggctgcagccaaatctaagcgtctaaaattctgaattctcatgacctggctcccttgagcaaaggtgagagagtgaaccttagagagagcgcctttcttcccaaacagtttccagcgccgagaactaaaacccaactccaactgatgttgggtcgagcctgggccagcacggacgccttccctgcctgggtgcaggttcccagggatttccaggggccccaacgctggcagaattggggcgaaggtggtgggtgagagaggggccagggagggggaatccacgccgggttttcctctctcaactcccttcaatgtgtcaaagagaaaagcattttacaaaggattatacttgaatcacttacagtcagtatttaaaaatacaaggatgcataactgggatttttttttttcagccataaacatctgcataactcttggatgctggtgggtgggtagcagacagatcgggctgcctccgcaggaaacttcaagacaaaactggggggaggggatgaagggttgggaacaggcacattaataatgcgaatactaatactgatactactactactattaaagacaggacaaaaagaattcctctgtccctctctctctctctctctggcttttagcttaattctcatccgtttttttctgcacttggatgatagggcgggctgtggtggggagcggaggagaacccgagccatcgctgacatttgattttcctttaagccctctctgcgattcaaagtcacctgggatctctccttgcctttcccgcattcttccttttccatccccaccaagagttcggtgtttttacaccgtccggttcagctttaaactaacattctgcgcgctgatttcctcccacattccctcccccggccccgaaagcccattccaggcgcgcgggtctcatcgcagccaagaggagtaaagacacttcggtttcctcctagcctccagccgcggaccctcgcgggcgtccctgcggcttggtggttgggagagacggaggcacttttccctccccggcgggccccgcgttggaa

SEQ ID NO: 1563182 - DNA, 4001 bp, Homo sapiens
gctggctaggtttttcctgcccttccttgcttttgacattgctgacaatagtttacaggaatagcatatgctagcagactcaagaaacttaaccttgggctgggacttttgtaagtcaattagctaatttactgattaaatgtcatatattttcccaacaaacatttgtctgaccagtgcaaaagtgaccaaaagcaaaggtgatttctggtttgagtttgatttctggtttgagtttaacacttccacaaaattttgttcttgatttttaatacacctaaatatattgttatgggataatttaggaattagagagactgaggggttgaggaggatttattgtttaggtgtattggcctagttgcattaatatttaaaggactgggttttgaataaagagttgttattttttaagtattttgtggggcgggggaagatttgtaataatatagtatctgactgttaacagtggtatcaaaagaaaaacacagaaccatgtgaaaaatactggtccaggcatgttactgcctacattcttatagaaagacttatttagcggccaggcacaggtgctcacacctataatcccagcactttgggaggccaaggtgggcagatcacttgaggtcaggagttcgagaccagcctggccaacatagcgaaaccccatctctactaaaaatacaaaaattagccgggcgtggtggcgtgcgcctataatcccagctactcaggaggctgaggcacgagaattgcttgaaccccagaggaggaggttgcactgagctaagatcgtgccactgaactccagcctgggtgacagagcaagaatccatctcaaaacaaacaaaaaaacagaaagtcttatttaccaaatcttggtaaatttgggggtggggggattcgtgtatatgtatacacacacacacacacatatacatatatatatgaaagaaataaaactgggaaattaacatgcaccattccctgcctctttaacaataattgaaaaatgtttttgaccttagaatactatgctacttgcaaattaacctattttaagagattgaacaagtaaagatatttgcactacagaatgaacgaactgtatttaagagatttgtattccagctccagattaaattcaaaccatgcttacatgggttttgactataaggaggttttataccttttttaagagtgcacttgaggccgggcgcggtggctcacgcctgtaatcccagcactttgcgaggccgaggcgggcggatcatgaggtcaggagttcaagaccagcctggccaacatggtgaaaccctgtctctactaaaaatacaaaaaaattagctgggcatggtggcgtgtgcctgtaatcccagctactcaggaggctaagacaggagaattgcttcaaccgggacctgggaggcggaggttgcagtgagccgagatggtgccactgcactccagcctaggctacagagcgagactccatctcaaaaaaaaaaaaaaaaaaaaagagtgcacttaattaaagaccacaaagacagaaataatgcgcaggtgcaacaggagaaaacatttgtaacatgttcttgccaatattgactttgttggacttcatctaatttagaccagaagaatgatttatctatgagaacaccaaaactattattgaaaattttagaaagcccttgcccaaattgacaaattaaattagaagataacttttcagatcatgcttaacttgaaacttatcagaagcattactttttttttttttttttgtaactagtcaaagtaacatacctccctgaaatgtgtgacaaatataatccccaaaagaaatctctttccatggtccggaccttctgatacgttctgaaacttcacaattcttctcattttccccagttaattgaagcattctgatgcttcgtccttggaggtcttatttctttagataagactgctgttgtctagtgtcttctgagttgtctagtgtattggaatcacataagactattttgaaagagaatcctggatgcaaattgaaatggatactagataaagaatgatgtaatcctggaacccctgcaaacactaaaaatacacggggaaattctgaactctgtttatgaataaatactcctctattaagtgacaatcccaggagtgacagggatatctgactcatttacttttgtagcatctcaccacaattaaagtaaatcatttcttgaaagaaatggacactattctctacaaagcatgagaatttaaaatgttttgcccaaatcttggcatttcatgttagaataaactttgtttggagtgctttgcatgctaccatataaaatgggtttagtgaagagcttttcctgacagtgacaagtggttaatcaattccagttgcaaatgacagcaaaaaaaatacacatagcttgccacgtttgctgctttaattataatttattagtcattctatttcctgagagaatttagtctggttagaatgcccttcattgttaaagtttgctttaaaatattaaagaaaataattatatacaagtaattactttggctagtagaaatgaagtttctcaaaatactcttagtaagccactacctatttacttcttaaataacaactgctacaagatctacgaacttgcaaaaaataaagctgaaaatcctccacaaattgatgcagccaacagcatttgctactttaagtgacaatttttcaaactacccacttaaaatcaaagtataaatataatctgccttccagaaatactagtcatatgaattatctaggagggattttctttaaatattaggaacaaattcatgtacttttacctgaaattccaccatagatctcttctgctatcctagccgcttcttttctatttcctttgacgatatagaaatgggttaggagagccaaaaaaactttaattaaaagcttaaagaaaaaaaacgtagcaaacattgtaataaaaatgtttttaaagccatagaaaacaggaccatcttccattttggcttatgctctgtatagggtcctaggactgtaaaatttcactgagttataattggtatcatatgacatctattttaaaccttctagcactcagtgctcctgttaccgagatctctgtaggttctaatctaactgatttggcgactgcatgtgctgactccacagcagtgttaaataaactaaagaaacttccttctaaccagaaacatccaatagttctagaactacataactcagtactatctaacagataagattcatatccaaacattttatattcctaaacccctatttttcctattttatgttagaaagcagggttggaaagatagaaacttcttggcttccacagaaacaaagcaagttatttgacatacaaaagaagtgcaaatatgctgtatgttctaagtgggaaatactactccctggagcatttcattttctcttaattctgaagtttatagaggattaaatccaaatctaaaatatgaccagttaaaaaagaccatttacctggccgggcgcggtggttgactcctgtaatcccagcactttgggaggctgaagcaggcggatcacctgaggtcaggagtttgcgaccagcctggccaacatggcgaaacccccgtctctactaaaagtacaaaaattagctgggcgtggtggcaggtgcctgtaatcccagctactcaggaggctgaggcaggagaattgcttgaacctgggaggcggaggttgcagtgagccgagatcgcgccactgcactccagcctgggtgacaagagcaagattctgtctcaaaaaaaaaaaaaaaaaagacaatttaccctaaagctgtatgtatgtatgtatgcatgtatgcacgtatgtatgtatttagttttaagatggagtcttactctgttgcccaggctggagtgcaatggtgcgatcgcggctcactgcaacctct

SEQ ID NO: 1563183 - DNA, 4001 bp, Homo sapiens
attgaacaagtaaagatatttgcactacagaatgaacgaactgtatttaagagatttgtattccagctccagattaaattcaaaccatgcttacatgggttttgactataaggaggttttataccttttttaagagtgcacttgaggccgggcgcggtggctcacgcctgtaatcccagcactttgcgaggccgaggcgggcggatcatgaggtcaggagttcaagaccagcctggccaacatggtgaaaccctgtctctactaaaaatacaaaaaaattagctgggcatggtggcgtgtgcctgtaatcccagctactcaggaggctaagacaggagaattgcttcaaccgggacctgggaggcggaggttgcagtgagccgagatggtgccactgcactccagcctaggctacagagcgagactccatctcaaaaaaaaaaaaaaaaaaaaagagtgcacttaattaaagaccacaaagacagaaataatgcgcaggtgcaacaggagaaaacatttgtaacatgttcttgccaatattgactttgttggacttcatctaatttagaccagaagaatgatttatctatgagaacaccaaaactattattgaaaattttagaaagcccttgcccaaattgacaaattaaattagaagataacttttcagatcatgcttaacttgaaacttatcagaagcattactttttttttttttttttgtaactagtcaaagtaacatacctccctgaaatgtgtgacaaatataatccccaaaagaaatctctttccatggtccggaccttctgatacgttctgaaacttcacaattcttctcattttccccagttaattgaagcattctgatgcttcgtccttggaggtcttatttctttagataagactgctgttgtctagtgtcttctgagttgtctagtgtattggaatcacataagactattttgaaagagaatcctggatgcaaattgaaatggatactagataaagaatgatgtaatcctggaacccctgcaaacactaaaaatacacggggaaattctgaactctgtttatgaataaatactcctctattaagtgacaatcccaggagtgacagggatatctgactcatttacttttgtagcatctcaccacaattaaagtaaatcatttcttgaaagaaatggacactattctctacaaagcatgagaatttaaaatgttttgcccaaatcttggcatttcatgttagaataaactttgtttggagtgctttgcatgctaccatataaaatgggtttagtgaagagcttttcctgacagtgacaagtggttaatcaattccagttgcaaatgacagcaaaaaaaatacacatagcttgccacgtttgctgctttaattataatttattagtcattctatttcctgagagaatttagtctggttagaatgcccttcattgttaaagtttgctttaaaatattaaagaaaataattatatacaagtaattactttggctagtagaaatgaagtttctcaaaatactcttagtaagccactacctatttacttcttaaataacaactgctacaagatctacgaacttgcaaaaaataaagctgaaaatcctccacaaattgatgcagccaacagcatttgctactttaagtgacaatttttcaaactacccacttaaaatcaaagtataaatataatctgccttccagaaatactagtcatatgaattatctaggagggattttctttaaatattaggaacaaattcatgtacttttacctgaaattccaccatagatctcttctgctatcctagccgcttcttttctatttcctttgacgatatagaaatgggttaggagagccaaaaaaactttaattaaaagcttaaagaaaaaaaacgtagcaaacattgtaataaaaatgtttttaaagccatagaaaacaggaccatcttccattttggcttatgctctgtatagggtcctaggactgtaaaatttcactgagttataattggtatcatatgacatctattttaaaccttctagcactcagtgctcctgttaccgagatctctgtaggttctaatctaactgatttggcgactgcatgtgctgactccacagcagtgttaaataaactaaagaaacttccttctaaccagaaacatccaatagttctagaactacataactcagtactatctaacagataagattcatatccaaacattttatattcctaaacccctatttttcctattttatgttagaaagcagggttggaaagatagaaacttcttggcttccacagaaacaaagcaagttatttgacatacaaaagaagtgcaaatatgctgtatgttctaagtgggaaatactactccctggagcatttcattttctcttaattctgaagtttatagaggattaaatccaaatctaaaatatgaccagttaaaaaagaccatttacctggccgggcgcggtggttgactcctgtaatcccagcactttgggaggctgaagcaggcggatcacctgaggtcaggagtttgcgaccagcctggccaacatggcgaaacccccgtctctactaaaagtacaaaaattagctgggcgtggtggcaggtgcctgtaatcccagctactcaggaggctgaggcaggagaattgcttgaacctgggaggcggaggttgcagtgagccgagatcgcgccactgcactccagcctgggtgacaagagcaagattctgtctcaaaaaaaaaaaaaaaaaagacaatttaccctaaagctgtatgtatgtatgtatgcatgtatgcacgtatgtatgtatttagttttaagatggagtcttactctgttgcccaggctggagtgcaatggtgcgatcgcggctcactgcaacctctgcctcctgggttcaagcgattctcctgcctcagcctcccaagaagctgggattacaggcatgcgtcaccacgcctggataattttcgtatttttagtagagacgaggtttcgccatgttggccaggctggtctcgaacccctgacctcaggtgatccacccactttggcctcccaaagtgctaggattacaggtgtgagccactgcacccggccaagcctgtatttaataaaaggcctatcttggatgcctctccaagtaagtgtcacactagaagcatcagactactcgccatggtagttccatctgggacaaggtcccatggcaaggttccctcctgatcattcacttgcatttcaagcattggtaaaggtggtgcccatttctgaaaaatgtgggctatccttgatcatggaagagtcatagtgaaatggacaaaagagatgccctaggttctggatgaagtacccaaatatttcatgaatcaaccttctctagttgggcaattttctcttatcagctggccaacacaagtgaaatgggtttatttttagttttcctcatcactctaggtctctgccttcattcttggctatgttcgattttgtaaattttaaaaatcaattgaaaagacaagccaaaatatagttatacaagtggcctaataaatcttaacaaatgatttatgcaaaaatatgggaatttctcctagcatgcaggcaaattagaatgactgcctggttaagaactgtttcactacattaaaaagctgacatgtaagaatacaatcttgagtcacaacatacagctcatcgatttcagtgtatcagagcactataaagaccttgagtcgtcttaactctcaaggaacagacattaacataagatttactttactgagcttatattacctggtagaatgccagtgtatgaaaatacatgaatacaactcttttagtccttttcatttatctttcttcaattatactctaagtaggcaatcatttagtcatgtcagaccagtgatgtacattgttctataacattattcaatcttgttttggtc

SEQ ID NO: 1563184 - DNA, 4001 bp, Homo sapiens
ttttactatgatgatgattgttacttatgtctccattttctaaggctattgctccctacttaatgttctagaacctcagagctgcaagggaccttgtagatcatttaatttaattttttcaatttacagatggggaaaccaaggttcagagcagagcagggactttggtaaggtcacatggttgttattgttagttgtctcattaacaagaactcagaacacacttataatcctgtgcttttcaaagcaatttcatgtaacaaaataggtaatattatccccattttttggatggaggaaactgagtccagagagggtaaggggttttccatataccttacatcaaggcaaaagcagagtcagaaatagaatccaggtttctctactcctcctcctgttctttctattacaagatgaaacacaaacacatacccccctcccttgactccagcagtcacattgcagctcccaggatcttcagcttttgagtgtcatgctgaattccagggtcttcggtaatggaaggttcctttacaaataatttattctgataactggtaggaattccctccttaatattttattttggcgactgggatctgggcagataattggcagggagtggcagagggaagtgctgaagttcttgctaaggttcataccaagagcccacagcagagctcatataatgagcctccagagggagaccaagccatgctctccagctggctgtggcactggagtgaatcgtgcctccattagataaggacaaggaaatccagctagcctgttgtcttacctcactttgctgtagtttattaatcaaagagttactatgtgcctgttatgtgcacgtagctccttcctgatcctaaagatgtaggagttttaaacctttttttttgtgatattggttcctgtgacaaactagcaaagtctgtaaacacctttcagaatggtttttgctacataaaacacataaaattaaaggaaaccaattatattaaaatgtgactgtcaaaatatttttaaatgcatgatatagtaagagatgttctttagtaacacattaaataaaaaggtctagtaataatttctaagtggtaataaatgacatttcaagatctctgccacaactgtaatatgatatgaaatatctgtggtttcttctggtaaccaaattacatgaactggttatgctactgccatttgatacctgcattcatccttgaaggaaatagtacattttagttagaggttagggggaaaaaaggtaattgtctattcatccaagtttctggaccccttgaattctatctaaggccctcttggtgtctgtcaatccaggttaagtactcccacaggaaagtggttggtttccgtgcatcctagagcattccttcaggcattagcagaacgtttttaagcctcatcttccttctctcacccttacgagttctgcccttatgcccttaaacccactctaaggcacccacacacacagactagccaacaccacacagggacacaaagacaaatctccacacttcctgtagtgtataatcacaattgctctcaagaagcaggtctgtttagacccgaggtcctaggcagacatatcctcttgggacacacaaggcagggagctggcattatatccctcctccctcctcctggtgggttgccctaacgaccttccaagcgcctcccccaactcccaccacgtcccagacccagcggaaacagcctacaacgggaagtgggtgatcacaggtctgtgggcccgcagtggtcactcttctcaaaccggtcctaggctccaggtactcaccgggcttcagcctgaggccatgctgcccagggtcgctgccccccgcccctctgtgaaacattggggccctggtgtcccctccttagggagcccccacggccccaacctggagcagctggggctctcgtttcccactgttaacaatgccgttgaaagactaggagtcagtccctagtcttggtccaaggggctaattttaggctaccctccaccccctcttcccaggccgtgttatcttaccagtgccattctgggagcgatttcagtaagaggaggggctctcccatggggaagtcctggaaggactgactgacagatagacaggtgcctggtgaggctagggttcctgctcccagcctatcctcctatatccctccctgccactcaaatgggagacagggtgaggcccctgagctgcggttgttcccacacctccaccagggggcactgagaaggtccagcctcagcctagcacactttttttttctcttttttttttttctaattatactttaagttttagggtacatgtgcacaacgtgcaggttagttacatatgtatacatgtgccatgttggtatgctgcacccagtaactcgtcatttaacattaggtatatctccaaatgctatccctcccacctccccccaccccacaacaggccccggtgtgtgatgttccccttcctgtgtccatgtgttctcattgttcaattcccacctatgagtgagaacatgcagtgtttggttttttgtccttgcgatagtttgctgagaatgatggtttccagcttcatccatgtccctacaaaggacatgaactcatcattttttatggctgcgtagtattccatggtgtatatgtgccacattttcttaatccagtctatcattgttggacatttggcttggttccaagtctttgctattgtgaacagtgctgcagtaaacatacgtgtgcatgtgtctttacagctgcatgatttataatcctttgggtatatacccagtaatgggattgctgggtcaaatggtatttctagttctatatccctgaggaatctcttcttttttctcttctgaactgagcctctctgcatatcctccaactcgttgcccctccccttccttcactgctcagagtgaggaggaaggtaggaaggagaagcctccataacagaatgtgttctcactcagcttttctaaagcttaagaaggccttggtcatttataaagaccttcccagtccactgacccaccaggctcagcctgaagaaaatgcccacaacctcccactatcctcaccctaaagcatcaccattactttaatgtgtccagcactggaaactttgtcaaaaactcagctctcactttttctgccccaaaacagccctctagggatctgaacccagatattatatcctccatgtcaccttgtttcagggaaaacagccccagctccttcaactatttctttcaatctgttatctatttagttccctccccagtcttgtctacctcactcatgaagtggtcaagcaatctgcttgcacattgatagtgccagggagctcacagaagaccagataactcctctggaaaatgtgggaatgtcctagtgtgatcagtgactctgaagatcagaaacatcaaaaagcataccagtttcagcttagcttgagccaggggactttgtctgaggcctcatgcaagcccaattagcagtcaacaaataagctattatgatgctaaagatgacagagtaaggtgttattcttgaaaaaaagatttgcaggattttttaatgtaagtttttgttgagataattgtaattcacatgtggttgtggaattaatacagattccaagtacactttactgagtttctcccaatgctaacatcctgcaatactatagtacaatatctcaagtatgacattggcattgatacaatccacttatcttatttaaatctccccaggtttacttgtacttttttgtgtctgtgtgcgtacatttaattctatacaattttattacatgtagcttgtgtataccaccttagacaatatacagaatagttctatcccaattaggatatttcacattgccttttatagccatatctacttccttcctacttcctttccattcttcccaccttggtaccta

SEQ ID NO: 1563185 - DNA, 4001 bp, Homo sapiens
aaatacaaaaattagccgggtgtggtggcgggcgcttataatcccagctactcgggaggctgaggcaggagaatctcttgaacccgggaggcagaggttgcagtgagcggagatctcgccattgcactccagcccaggcgacagaatgagactccgtctcaaaaaaacaaaacaaaacaaaacaccctgacttcagggtccctgtttattgcccctttgatcaacaggtgctgtggacagtataccaggtatatatttttttcttttttctttgatacggagtctcactctgtcgccaggctggagtgctgtggcgagatctaggtgcactgcaacctccgcctcccgggttcaagtgattctcctgcctcagcctcccgagtagctgggattacaggcacgtgccatcacacccagctaatttttgtattttaggtagcgacggaatttcatcatgttggccaggatggtatcctgacatcgtgatctgcccgcctcggcctccgaaagtactgggattacaggcgtaaaccaccgtgccccgcctatatatacaggcctgaacccgggaggcggaggttgcagtgagtcgagatcgcgccactgcactccagcctgggccacagagcaagactccgtctcaaaaagaaaaaaaaattaataaataataaatacagcaattcagcagggctgctgcaacaccagctttcccagctctgggtgctggggcttgtctccgtcacaagcccccaaggatctcaacagggtgaacaacagttgcagaaagtgagctgttgccttcaccctcaccctgctgctccctttgctctccgaaagttacgaactttgagtttccttcccgataaactccaaggtttcctcactgattggtctcagtttgggaaaggacgtgacatcagcaagtttgcagacttggggctggagagttaaccagtatattactaaccaatatactattatttataagaacctgtgtgcaaatgcctaaacccatttttcagaatcctttcagccaacaggcacctgctgaatgctcaccgaagtgtgtatttgtgggattctgtacattagcacagacaccacttgacagatgagaacaatacctgtaagatgattctccaatgttttaagtaaaacaaagtctcttttgtctcttttgaaagtgactcaatcagtgctcaatgtttgaacatctttataaaccctgccccacctaaatgccaaacacctaagacttacaaattaaaaagttttagcattaaaaattttcctatttataagtaactttcaaacctccaatttaataaataatgcatttgacccacaaagaatgattcctgggagctgaaattttcactggagaataatttgtgacaattgaatttgtcttgtctgtaggattctgcagaaagaagtatacacatttttgaacagctgtgtaaagaatatataccagtgagctgtggacatctgcccagtaacagccccatggacacctcacacagagccactgaaactgcccaaccctcctctcctaagcacattagccaacctccccagggctgattccactgcccctatgactcaccgcccatcaatgggtttgaaagaagcctgatgccaggaaagtcccttggccccgcgggcttgctcccatccatgcccccttgtttgccatccatgatgctctctcctaagcgagcaagctctgcgctccacttcagttgctcagcaaagtccaaactccatgctccccctgctcctgaaaaattccagttctgtggctggctgagctgcacacgttctggtcaaatggtctgcagcaaagcacagagcaggcagggtaatctgagtgctacctgtgatcagagagaggcatgcgctcgtgtacacacacacacacacacacacacacacacgttttacctaactggctggaggcccgccagaggccacaagaaccctccagccctaagtctgcgaagttgctgatgtcacgtcctttcccaaactgagaccaatcagtgaggaagccttggagtttatcaggaaggaaactcagtttgtaacttttgagagtgaagggagcagggtgggggtgaaggaaacagctcactttctgcaactgttgttcaccctgctgagatccgtttgttacatggtagcttgttatggagacaagcccgagcacccagagctgagaaagctggttttgcagcagccctgctgaattgcttgcacagtaacatgcacagcacgccctggccatctgtacatgtgctttcaattgtgctgggagtttcttatgggaaatgtgtctatatgttacaaaaaatgtacctttggaaagaaccatttgttcctttcagctgcaagaatttcactaaatgtcctacctcacccctcctccactcattttaacttctaaataaataatgaacggttgcaattggaaaaatggattgctaggtggcctgagatgtggaagagacctgctatcttttcattgtgaattactaaaatttattttgttaacgttttgctgtttttgcttatacaaaacattaggggccgggcgcggtggctcatgcctgtaatcccggcactttgggaggccaaggcgggcggatcacgaggtcaggagtttgagaccagcctgactaacatagtgaaaccccgtctctactaaaaatacaaaaaaattagctgggcctggtggcaggcgcctgtaatcccagctactcgggatgctgaggcaggagaatcgcttgaacccaggaggcagaggttgcagtgagccgagatcatgccactgcactctagcccaggcgacagtgcgagactccacctcaaaaaaaaaaaaatttggatgtactgtgtccatgtcttttcagataaacccagttgcctcacacccctgggtgctacttcaggctgacaggcacctctagactcccaccattcctctcttccaggtagaagaggatttttcatccccatgggggaaggctctgagttaagtctcaagcatagactggctgtgaagtgattgcagatttgtcttaatgccaaagatgaggcctagatgttttagatttacggagtctcagttaaaacatttggtggctgttattaacagtttgaggggtgtaattcacgtttttaaaggcatttatatgcatacacatgtatgcacatttatcaatttacattttccacataaatgtacctatattattcttttttttttgagacagggtctcactttgtcacctggactcgagtgccatggtgtcatatcggctcactgcaactttcacctcctgagctcaagcaattctcctgcctcagcctcctgagtacctgggattacaggagcgcaccactgtgcccagctaattttagtatttttagtagaaacagggtttcaccatgttggccaggctggcctcaaactcctgatctcacgtgatcccccttccttggcctcccaaagtgctaggattacaggcgtgagccaccgcacccggcccctatattattctattattctatgctttttacacttattttgtctgtgagagctttccatatcagcttttataggtatgctcctgtctttattcactgttgcatagcattccatattgtgccagaagtatttaattatgctcctaatgatgcaagcagaatgtcattatttctgttagtactatgaaaggactaaagttcatatttttgtacatgtggctttgtgcacataggcaaatatttctagaggagagattcctaagagtggaaatgctaagtcaaaggcatacttatgcacatgtaataaattgtataaaactgaagacacacacaggaatgagtacaagtaaaaccggggaattgaataagatcagtagattgtatgaatgttgatttcccagttacaatattgtactatagttttgcaaaaagtcaccattgagggaaac

SEQ ID NO: 1563186 - DNA, 4001 bp, Homo sapiens
caggctggagtgctgtggcgagatctaggtgcactgcaacctccgcctcccgggttcaagtgattctcctgcctcagcctcccgagtagctgggattacaggcacgtgccatcacacccagctaatttttgtattttaggtagcgacggaatttcatcatgttggccaggatggtatcctgacatcgtgatctgcccgcctcggcctccgaaagtactgggattacaggcgtaaaccaccgtgccccgcctatatatacaggcctgaacccgggaggcggaggttgcagtgagtcgagatcgcgccactgcactccagcctgggccacagagcaagactccgtctcaaaaagaaaaaaaaattaataaataataaatacagcaattcagcagggctgctgcaacaccagctttcccagctctgggtgctggggcttgtctccgtcacaagcccccaaggatctcaacagggtgaacaacagttgcagaaagtgagctgttgccttcaccctcaccctgctgctccctttgctctccgaaagttacgaactttgagtttccttcccgataaactccaaggtttcctcactgattggtctcagtttgggaaaggacgtgacatcagcaagtttgcagacttggggctggagagttaaccagtatattactaaccaatatactattatttataagaacctgtgtgcaaatgcctaaacccatttttcagaatcctttcagccaacaggcacctgctgaatgctcaccgaagtgtgtatttgtgggattctgtacattagcacagacaccacttgacagatgagaacaatacctgtaagatgattctccaatgttttaagtaaaacaaagtctcttttgtctcttttgaaagtgactcaatcagtgctcaatgtttgaacatctttataaaccctgccccacctaaatgccaaacacctaagacttacaaattaaaaagttttagcattaaaaattttcctatttataagtaactttcaaacctccaatttaataaataatgcatttgacccacaaagaatgattcctgggagctgaaattttcactggagaataatttgtgacaattgaatttgtcttgtctgtaggattctgcagaaagaagtatacacatttttgaacagctgtgtaaagaatatataccagtgagctgtggacatctgcccagtaacagccccatggacacctcacacagagccactgaaactgcccaaccctcctctcctaagcacattagccaacctccccagggctgattccactgcccctatgactcaccgcccatcaatgggtttgaaagaagcctgatgccaggaaagtcccttggccccgcgggcttgctcccatccatgcccccttgtttgccatccatgatgctctctcctaagcgagcaagctctgcgctccacttcagttgctcagcaaagtccaaactccatgctccccctgctcctgaaaaattccagttctgtggctggctgagctgcacacgttctggtcaaatggtctgcagcaaagcacagagcaggcagggtaatctgagtgctacctgtgatcagagagaggcatgcgctcgtgtacacacacacacacacacacacacacacacgttttacctaactggctggaggcccgccagaggccacaagaaccctccagccctaagtctgcgaagttgctgatgtcacgtcctttcccaaactgagaccaatcagtgaggaagccttggagtttatcaggaaggaaactcagtttgtaacttttgagagtgaagggagcagggtgggggtgaaggaaacagctcactttctgcaactgttgttcaccctgctgagatccgtttgttacatggtagcttgttatggagacaagcccgagcacccagagctgagaaagctggttttgcagcagccctgctgaattgcttgcacagtaacatgcacagcacgccctggccatctgtacatgtgctttcaattgtgctgggagtttcttatgggaaatgtgtctatatgttacaaaaaatgtacctttggaaagaaccatttgttcctttcagctgcaagaatttcactaaatgtcctacctcacccctcctccactcattttaacttctaaataaataatgaacggttgcaattggaaaaatggattgctaggtggcctgagatgtggaagagacctgctatcttttcattgtgaattactaaaatttattttgttaacgttttgctgtttttgcttatacaaaacattaggggccgggcgcggtggctcatgcctgtaatcccggcactttgggaggccaaggcgggcggatcacgaggtcaggagtttgagaccagcctgactaacatagtgaaaccccgtctctactaaaaatacaaaaaaattagctgggcctggtggcaggcgcctgtaatcccagctactcgggatgctgaggcaggagaatcgcttgaacccaggaggcagaggttgcagtgagccgagatcatgccactgcactctagcccaggcgacagtgcgagactccacctcaaaaaaaaaaaaatttggatgtactgtgtccatgtcttttcagataaacccagttgcctcacacccctgggtgctacttcaggctgacaggcacctctagactcccaccattcctctcttccaggtagaagaggatttttcatccccatgggggaaggctctgagttaagtctcaagcatagactggctgtgaagtgattgcagatttgtcttaatgccaaagatgaggcctagatgttttagatttacggagtctcagttaaaacatttggtggctgttattaacagtttgaggggtgtaattcacgtttttaaaggcatttatatgcatacacatgtatgcacatttatcaatttacattttccacataaatgtacctatattattcttttttttttgagacagggtctcactttgtcacctggactcgagtgccatggtgtcatatcggctcactgcaactttcacctcctgagctcaagcaattctcctgcctcagcctcctgagtacctgggattacaggagcgcaccactgtgcccagctaattttagtatttttagtagaaacagggtttcaccatgttggccaggctggcctcaaactcctgatctcacgtgatcccccttccttggcctcccaaagtgctaggattacaggcgtgagccaccgcacccggcccctatattattctattattctatgctttttacacttattttgtctgtgagagctttccatatcagcttttataggtatgctcctgtctttattcactgttgcatagcattccatattgtgccagaagtatttaattatgctcctaatgatgcaagcagaatgtcattatttctgttagtactatgaaaggactaaagttcatatttttgtacatgtggctttgtgcacataggcaaatatttctagaggagagattcctaagagtggaaatgctaagtcaaaggcatacttatgcacatgtaataaattgtataaaactgaagacacacacaggaatgagtacaagtaaaaccggggaattgaataagatcagtagattgtatgaatgttgatttcccagttacaatattgtactatagttttgcaaaaagtcaccattgagggaaactgggcaaagtgcactggagatctctatgtgatttcttacaactgcatgtgaatctgtaatgatctcaatacaaattgcactttttgaaaagaggctgctcatttaaaatttggataaacactactaaacttccctctatctctatttgcagaattaactgagaaggccataagcatacaaattctttaccactccatcaggaaagatctgaagaatgatacatttgtttggcagagagtgaggaattgattcccaacacagactggatgaggagttgaacagaagggcacaatggg

SEQ ID NO: 1563187 - DNA, 4001 bp, Homo sapiens
ggtgtgcaccaccccacctggctaatttttaaaatatttttggccaggcacagtggctcacgcctgtaatcccagcactttgggaggccgaggcgggcggatcatgaggtcaggagatcgagaccatcctggctaacacggtgaaaccccgtctctactaaaaatacaaaaaattagccgggcgtggtggcgggtgcctgtaatcccagctactcgggaggctgaggcaggagaatggcgtgaacctgggaggtggagcttgcagtgagccgagatcgtgccattgcactccagcctgggcgacagagcgagactctgtctcaaaaagaaaaaagaatttgtagaaatggggggtctcactatgttgcccagactggtctcgaattcctgggctaaagcgattccctcgtttcggacccccaaaccgttgggatgacaggtgtcaccgctgagcccggccatcattaacccttttcaagcataattcaggggcacttagtacattcgtgatgttgtatagccagcacttccgccgggttccagaacatttgcatcaccccaaaaagggacactgtctccgttaaacactccctccgcagtcctgcccagcctctgcaaaccaccagtccactttccacctcgaaggatttgcctgctctgcacatttcatataaatgaagtcataccatatggggcctttcacgtcagccttccttcactgagcacgatgttattctgtgagaagaagaaatgaggccttgggaggccgaggcaggtgaatcacttgaggtcaggagttcgagaccagcctggccaacatggtgaaaccccatctctactaaaaatacaaaaattagccgggcgtggtggtgggtgcctgtaatcccagatactcgggaggctgaagcaggagaatagcctgaaccctggaggcggaggttgcagtgagccaagaccgtgccactgcactccagcctgggttacagagtgagactccagctcaaaaaaataaaaaaaaggaatgaggtgttgctcctctacgggtgaaccctcaaaactcacctctatgataaacgcacagtgtaattatttactgggttaataaacaaccacatatactactctatcatgaaatgttttaaaaatttcaacacttgcagttcaataaacattgtcttgtttctaatcctatgtatttcatcttaagctttgtttctttttttttgttgtttgtttggtttttttttgacacagagtcttgctgtgtcccccaggcgggagtgcagtggtgcgatctcggctcactgcaacctccgcctcccaggttcaagcgattctcctgcctcagcctcccaagtagctgggattataggcatgtaccaccaagcctggctaattttgtatttttagtagagatggggtttctctgtgtgggtcaggctggtctcgaactcccgacctcaggtgatccgcccgcctcagcctcccaaagtgctgggatcacaggtgtgagccaccacgactggcccaatgtacttacatacattgattgatgactcatgtctctgtaaaatgtatcaaaccaagctgtccccagaccaccctgggcacatgtcctcaggaactcctgaggctacatcgtgggtgtacgtctttcacggtggaaaataaacctcctaaaatgatggagactcatcatttttctcgactgacacaacaatggaacgtgagtgtgatgaacggaagtctattcccccttgtcccacagagcgtatcctacctgggacaccatgaagccgttggcgtagtcattaaggaggcgataggcctggtcctctgaggatcccatcttgtctccaatccagccgtggcttccggagcctctggagcgcttgcttcaaggagcacagagcctgctggcaaggtggggaagagccacccgctcacagctgctgcctgactctccctgctgcctgcccagtactcaaacaaagacggatcactctagaaatttgcattaaccgtattaggggatcacaaagcgtgtggcgattccctggctttctgggcgcccctccgcagccctaaaatagtctgcatcaggcccccccgagcccttgactcatcagctgtagaactgatcccaaaccaatatgctcacccatcattagcactcattaatcgtcttatggattgagcaggtcctgcattcatttctgggggtcgtgcgaatttctgcaaactgggtggctcaagaaaccagttctctcacacttctggaggctggaagttcaacatcaagatgccagcaggccagcctgggcaacatagtgagaccccttttttttttttttagatggagtctcgctctgtcgtcaggctggagtgcggtggcaccatctcagctcactgcaacctctgcctcctgggttcaagcgattctcctgcctcagcctctcgagtggctgggactataggcacacaccaccacacctggctaatttttgtatttgtagtagagacagggtttcaccatgttggccaggctggtctccaactcctgacctaaggtgatccacccacctcggcctcccaaagtgctgggaagacaggcatgagccaatgtgcctgactaattttttaattctttgtagagatcggggtggggggggggtgtctcactatgttgcccaggctggtcttgaactcctgacttcaagagatcctcccacttcagcctagatatcttgcaacgtttatttggacaatctaaatgcctgcacataattaaaatgtgaccgtgccagggctgggcgtggtagcctgtcatcccagcactttgggaggccggggcaggcggatcacaaggtcaggagatcgagaccatcctggctaacacagtgaaacccagtctctactaaaaatacaaaaaattagctgggcgtggtggcgggtgcctgtagtcccagctacttgggaggctgaggcaagagaatgggtgtgaacccgggaggctgaggttgcagtgagccaagatcgcgccactgcactccagcctgggcgacagagcgagaatctgtctcaaaaaaaaaaaaaagtgaccgtgccaggtctctaccccatttctgaggatgcatgtctcgccgcaacctctgcctcccaggttcaagtgattcttctgtctcaggctcccagtagttgagattacaggcacccaccaccacgcccggctaattttgtatttttagtagatacggggtttctccatgttggtcaggctggtgttgaactcctgatctcagctgatccgcctacctcggcctcccaaattgctgggatgacaggcgtaagccaccactcccagcctccagagtgattttctaggggaaaaatataaacacagcctgtcatcccagcaatgtggggcagatcacatgaggtcaggagatcgagaccagcctggctaacacggtgtaaccccgactctactaaaaatataaaaattagccaggtaaggtggctcatgtctgtaatcccagcactttgggaggctgaggtgcgaggatcacttgaggtcaggagttcaagatcagcctggtcaacatggtgaaaccccgtctctactaaaaatacaaaaattagccgggcatggtggcaggtgcctgtcatcccagctacttgggaggctgaggcaggagaatcacttgaacctggaagggagagattgcagtgagccgagattgggccattgcactccagcctgggcaacacagtgaggtctgtatcaaaaagaaagaaagaaagagagaaacagagagagagaaagaggagaggagagagagagagagagaaagaaagaaagaaagaaagaagagaaaagaaagaagagagagagacagaaatggaaagaaagaaaggaaagaaagagagagagagatacagaaagaaagaaagaaggaagggagggaggaaggaaggaagaaaaagaaggaaagaaagaa

SEQ ID NO: 1563188 - DNA, 4001 bp, Homo sapiens
tggtgcaatcatagctcactgcagccttcatctcctaggcttaagcgatcctcccgcctcagcctcctgagtagctgggactacaggtgtgcaccaccccacctggctaatttttaaaatatttttggccaggcacagtggctcacgcctgtaatcccagcactttgggaggccgaggcgggcggatcatgaggtcaggagatcgagaccatcctggctaacacggtgaaaccccgtctctactaaaaatacaaaaaattagccgggcgtggtggcgggtgcctgtaatcccagctactcgggaggctgaggcaggagaatggcgtgaacctgggaggtggagcttgcagtgagccgagatcgtgccattgcactccagcctgggcgacagagcgagactctgtctcaaaaagaaaaaagaatttgtagaaatggggggtctcactatgttgcccagactggtctcgaattcctgggctaaagcgattccctcgtttcggacccccaaaccgttgggatgacaggtgtcaccgctgagcccggccatcattaacccttttcaagcataattcaggggcacttagtacattcgtgatgttgtatagccagcacttccgccgggttccagaacatttgcatcaccccaaaaagggacactgtctccgttaaacactccctccgcagtcctgcccagcctctgcaaaccaccagtccactttccacctcgaaggatttgcctgctctgcacatttcatataaatgaagtcataccatatggggcctttcacgtcagccttccttcactgagcacgatgttattctgtgagaagaagaaatgaggccttgggaggccgaggcaggtgaatcacttgaggtcaggagttcgagaccagcctggccaacatggtgaaaccccatctctactaaaaatacaaaaattagccgggcgtggtggtgggtgcctgtaatcccagatactcgggaggctgaagcaggagaatagcctgaaccctggaggcggaggttgcagtgagccaagaccgtgccactgcactccagcctgggttacagagtgagactccagctcaaaaaaataaaaaaaaggaatgaggtgttgctcctctacgggtgaaccctcaaaactcacctctatgataaacgcacagtgtaattatttactgggttaataaacaaccacatatactactctatcatgaaatgttttaaaaatttcaacacttgcagttcaataaacattgtcttgtttctaatcctatgtatttcatcttaagctttgtttctttttttttgttgtttgtttggtttttttttgacacagagtcttgctgtgtcccccaggcgggagtgcagtggtgcgatctcggctcactgcaacctccgcctcccaggttcaagcgattctcctgcctcagcctcccaagtagctgggattataggcatgtaccaccaagcctggctaattttgtatttttagtagagatggggtttctctgtgtgggtcaggctggtctcgaactcccgacctcaggtgatccgcccgcctcagcctcccaaagtgctgggatcacaggtgtgagccaccacgactggcccaatgtacttacatacattgattgatgactcatgtctctgtaaaatgtatcaaaccaagctgtccccagaccaccctgggcacatgtcctcaggaactcctgaggctacatcgtgggtgtacgtctttcacggtggaaaataaacctcctaaaatgatggagactcatcatttttctcgactgacacaacaatggaacgtgagtgtgatgaacggaagtctattcccccttgtcccacagagcgtatcctacctgggacaccatgaagccgttggcgtagtcattaaggaggcgataggcctggtcctctgaggatcccatcttgtctccaatccagccgtggcttccggagcctctggagcgcttgcttcaaggagcacagagcctgctggcaaggtggggaagagccacccgctcacagctgctgcctgactctccctgctgcctgcccagtactcaaacaaagacggatcactctagaaatttgcattaaccgtattaggggatcacaaagcgtgtggcgattccctggctttctgggcgcccctccgcagccctaaaatagtctgcatcaggcccccccgagcccttgactcatcagctgtagaactgatcccaaaccaatatgctcacccatcattagcactcattaatcgtcttatggattgagcaggtcctgcattcatttctgggggtcgtgcgaatttctgcaaactgggtggctcaagaaaccagttctctcacacttctggaggctggaagttcaacatcaagatgccagcaggccagcctgggcaacatagtgagaccccttttttttttttttagatggagtctcgctctgtcgtcaggctggagtgcggtggcaccatctcagctcactgcaacctctgcctcctgggttcaagcgattctcctgcctcagcctctcgagtggctgggactataggcacacaccaccacacctggctaatttttgtatttgtagtagagacagggtttcaccatgttggccaggctggtctccaactcctgacctaaggtgatccacccacctcggcctcccaaagtgctgggaagacaggcatgagccaatgtgcctgactaattttttaattctttgtagagatcggggtggggggggggtgtctcactatgttgcccaggctggtcttgaactcctgacttcaagagatcctcccacttcagcctagatatcttgcaacgtttatttggacaatctaaatgcctgcacataattaaaatgtgaccgtgccagggctgggcgtggtagcctgtcatcccagcactttgggaggccggggcaggcggatcacaaggtcaggagatcgagaccatcctggctaacacagtgaaacccagtctctactaaaaatacaaaaaattagctgggcgtggtggcgggtgcctgtagtcccagctacttgggaggctgaggcaagagaatgggtgtgaacccgggaggctgaggttgcagtgagccaagatcgcgccactgcactccagcctgggcgacagagcgagaatctgtctcaaaaaaaaaaaaaagtgaccgtgccaggtctctaccccatttctgaggatgcatgtctcgccgcaacctctgcctcccaggttcaagtgattcttctgtctcaggctcccagtagttgagattacaggcacccaccaccacgcccggctaattttgtatttttagtagatacggggtttctccatgttggtcaggctggtgttgaactcctgatctcagctgatccgcctacctcggcctcccaaattgctgggatgacaggcgtaagccaccactcccagcctccagagtgattttctaggggaaaaatataaacacagcctgtcatcccagcaatgtggggcagatcacatgaggtcaggagatcgagaccagcctggctaacacggtgtaaccccgactctactaaaaatataaaaattagccaggtaaggtggctcatgtctgtaatcccagcactttgggaggctgaggtgcgaggatcacttgaggtcaggagttcaagatcagcctggtcaacatggtgaaaccccgtctctactaaaaatacaaaaattagccgggcatggtggcaggtgcctgtcatcccagctacttgggaggctgaggcaggagaatcacttgaacctggaagggagagattgcagtgagccgagattgggccattgcactccagcctgggcaacacagtgaggtctgtatcaaaaagaaagaaagaaagagagaaacagagagagagaaagaggagaggagagagagagagagagaaagaaagaaagaaagaaagaagagaaaagaaagaagagagagagacagaaatggaaagaaagaaa

SEQ ID NO: 1563189 - DNA, 4001 bp, Homo sapiens
gggaccgcctcccaggatggcgacgcagcagcatgtccctccctcccagggcgtctgcctctctgtgctgcctgccttaggtcctgggaatcctgacggctgacatgggcccccccagcacattcacggccactcgcttacacactgcacctgcctcacctaaggagccctcggggttcagattcagaggctgacaacccgactctcccctggggaggcaacgggggctacgtaaagaacaccacgggcaggatggacctgctcccaggagttcagtgccgggactctcgtgcaaacatcaccagccacacacatcaacacgctggcaccagcgtcacataaagcagtgagaaatggaaacaaaacggaccaactcggtcccaccagaggctgtccaggagccccccagccaagtccaacacgtcccagacttgatatcggcgacatgaagcgcaacagacgtgcaggacgcaccaaagtcgtcagaggacacagcgggagggacggaggacgaagaggagtaggaggaggaggattccgcctcactaggagggtgggagggacggagaaggaggaggaggaatccacctcactaggaggacacggcaggagggatggaggaggaagaggacgaatccgcctcactaggagggcacagcgggagggatggaggaggaagaggaggaggaggaggaatccacctcactaggagggtgggagggacggagaaggaggaggaggaatccacctcactaggagggtgggagggatggaggaggaggaggaggaatccacctcactaggagggtgggagggatggaggaggaggaggaggaatccacctcactaggagggtgggagggatggaggaggaggaggaggaatccacctcactaggagggtgggagggatggaggaggaagaggaggattccgcctcactaggagggtgggagggatggaggaggaggaggaggaatccacctcactaggagggtgggagggatggaggaggaggaggaggaggaggattccgcctcaggggattcacagaaagttgttggttccctcctgcaatgctaagaagataaaaggggctacaaagagtgacctgaggttgtctctggtaccccaaccacagtgaacgacccaggcaattgctttaaaggcctcttatgtgaaaccgggtttttgtcctatcattggttttttgtttttttttttttttttaaatctggccatcaccatcaaccctctacttcattttgtaaatgtagcctcaacctaaatgcaaacttgcaaacagccaaggcattctgcttgtttcagcgggaggtgtgaacagcatgtggagggagaagaggtggctcttcgggcaaggcgcggtcctgggagccggcagagatcgtgtcagaccacgacgtgtgacaagaaaaagagaaacattcatattctgctgcgtctcaaacagccactcacgcaggtcctcacgtgcacagctgagcacccacaggcctgcacacacacccatacgtgcacacacaagtacacacacgggttcacaggcacacacgcatgcacacaggcacatgtgtgctatgtgccgatacagaagcacacacatgtgggcacacgtgcacatacacacacaggtacacacacgagctcacacacatgcacgcacacacaggcacacgtgcacacagatgctcaggcacacactcgggcgcacatagggacatacaaagtacacacaccggttcacaggcacacgtgcgtccatgcacacaggtacacacacaagctcacaagcatgcatgcacacacacacgcacaggaatacatgcagacacacgcacacgggtctgcgcacactcccaggtgccggacaccagcgccgagggcccgctcccgcagaaggtacctttcctccgctcgctgcctctcctccgcttccttctctctgcgcttttgttcttctctttgctgctccagttcctgaagcttctgcctctccagctgccgcttcttaattgaggcatcactcaggtgtttggtcgaatcaaaagaaacctttaaaagcaaaaacagtgtcagatggccttcccccaaaaccccccagacacacggccaggcgccctctcctgggccgtagggccgagtggcctcagagcctgagcgcccgctcaccgctcaccgctcaccactcatgtccggtgcagacccagacagtggagcccagaagccaaaccaatcccttcaagtcaccatcagtggctcaagacttagctcatcccacggagttacgactcagcgaggaacaccaactagccctcgccacttactgaacacaagtgacacgccaccgctgcgagacacagctccccttccgctacccggctccaccattccctgtggccacagtcactgagcaggccgcctgcccacacccacagggcacatcttaaggccacaaaaccccctccaggaggctggctcatttgtcactgtgaagccaacacggtcaaaacacgaggctaggctgagcgcagtggctcacgcctgtaatcccagcactttgggagggcgaggcaggcagttcatgaggtcaggagttcgagaccagcctggccaatacggcaaaaccctgtttctactaaaaatacaaaaattagccaggtgtgatggcacgcgcctgtagtcccagctactcgggaggctgaggcagaagaatcgctcgaacccaggaggcggaggatgcactgagcaaagattgcgccactgcactccagtccaggaaacagatcgagactctgcctcgaaaaaaaaataaaaataaaaaaaataaaaaaaataaaaaagcacatgaggctaaagggaacgttcagccctggtttcaaggtgcattctgggaaggccgggttctcttggttctgacacggttcaaatccctgtcagagttcctgaggctccatccctcacctactatatgacctgtgtctcccccacatcttccttaagataccaaatttccaaaaccacagcacgggacccctactccacctcacgcctgtgcctctgaaattggacaggcacaggactgttgctgccattttacttaggggaggtccccacagcctcaggggtgtggctgggagcgttctgctgaccctgctggaaggaagtcgccagagggaggaagcgcgtggctctctcggtgcccaggactcaccttgatgttgcaggccacggccttgccgtcctcgcccttgtacatgagtttcatcccgcgcagggcgctcatggcctggatgaagcccatgtactcgcggtactgcacataggcctcgaagttcaagtgccccccgaaactgaaggtgtggaagttgcggcccgtcatctcctcccggtaggggtccagcatggggatgtccacattccggatctccccgaacttctcaaacaccttgaccaggacgtcctcgctgggcttctcggagcccgactccttcagggcgaaccacttgcagggcagcccctccaggtggatggtgtccggccgctcccccggcagggtctcgttcatgtccttggcgtcgcggaagaaggagtcccagtcgtggcgggtggggaagtcgatcttgaactcggccgcgcgcaccttcaggatgtcggagaagccgctgagcttgatggtcttgccgtccaggcaggccagaaaagacttgaccaggctcttgttctccacctccccctcgaagcggatgaagtccatggtgctcttggaaatacgcagcgtggagaactggtggttctgcaccatgcccttcagcctctccatcacctcccagttggagatggacttccccggctgcttcagctgcgggagtgccacgctgatggtcatcttggtgatgggcttcaggtacaagccgtaagcagggcagagctccacggcctcagacgtgtcgtgcacgatggtagccgctgccatagcctccg

SEQ ID NO: 1563190 - DNA, 4001 bp, Homo sapiens
tctccctatccccaaccctggaggtcccgggttactctccccatccccatgcctgggggtcccgggttactctccccatccccatccatggggctccggggtcactctgctgtccccatccctagcggtcctgggtcactcctccctccccatccctagggggtcccgggtcactctccccaaccacatgcctagggcgtcctgggttactctccccacccccatcgctagggggtcccaggttacaggttactctctccaaccccatccctaaggtgtcccgggtttctctcccctcccccacccctaggggggtcccgggttactctcccctcccccatccctagggggtcctgggtcactctccccaaccccatccctaggggtcccgggttattctccccaaccccattcctgggggtctcggcttactctccccatccccatgcctgggggtcccgggttactctcctctcccccatccctaggggtcccgggttactcccccacccccatccctagggggggtctcggcttactctccccatccccaaccctggaggtcccgggttactctccccatccccatgcctgggggtcccgggttactctcctcatccccatccatggggctccggggtcactctgctgtccccatccctagcggtcctgggtcactctaccctccccattcctaggggtcccgggttacgatcccctcccccatccctatggggacccaggtcactccccacccccatgcctagggggttccgggttactctcccctcccccatccctagaggttccgggtcactctccccaaccctatccctggaggtcccgggacactctcccctcccccatccctaagggtctcgggtcactctcccatccctatccctagagttcctgagtcgctgggccctccggggttcagcccctccgtccccggtcccctgccccgcccaggcccaggccgtaccgcgttgctgaggatctcctgacggcgtggggaggcgctggccagcaccacgcgcttgtgcagcagcttcccaatcaccgggcacagcaccatggcgtccacgccgggagccgggcgtccgcacttctgagcccggagcccgcggtgcgcgcagcgcggctgcaaaaaaaacaggcggccagagtcccgcctccgcgaggccacgcccccgcccgcctccgcgaggccacgcccagtccgcgccttcagtggcctccccgcgagaccgcgcccaggccacgcctccattgaacactccgtcaggcctcgcccaggccacacctccattgccctctccaccaggccacgcccatgtcacgccccattgatctcccctgagaccacgcccagaccacgcctccattgccctctccgtcaggccacgcccaggccacacctccattgccctctccgccaggccacgcccatgtcacgccgccattgaccgctccgccaggccacgcccaggccacacctccttgccctctccgccaggccacgcccatgccacgccgccattgagctccccgtgaggccacgcccaggccacacccccgcccgcctcccccccgggcaccgccccggccgcttggtgaagcaccgcccccagctccgcctcccgggccccgtccccgcccccggcgctcgccccgcccctccccaccccgcctgcggcgccaagacctgcaatggcgcaggcagctgcggggtcccggggaggaaaggctggcgtggatacttggggttccttgcaggcgcggcgtggggagtggaaatgctgggtttccgcagctgcggttgtgggcagttgtgggggtggggggttcttacccgcacgtggaggggcccggcgcagagatgggggtcttgtgggagccgcgtcggggaaggtagagatagggggttccccgcggacccggtgcgagtggcgtggggatggggatgtcctcgtgcctggtgggaggggagtggagatgggggtgtccacgggcctggtgggaggggcgtggagatgggggtgtccacgggcctggtgggaggggcgtggagatgggggtgtccacgggcctggtgggaggggcgtggagatgggggtgtccacgggcctggtgggaggggcgtggagatgggggtgtccacgggcctggtgggaggggcgtggagatgggggtgtccacgggcctggtgggaggggcgtggagatggggatccccgcggggatggtgggaggggtttggagatgagggtccccgcgagaatgctcggaggggtatggatatgggggtccccgcgggccgggtgggaagggcggggagatgggtggggggggggtccccgcgtgcctggtgggaggggcgtggagaaggtgggggtccttgtgggaggggcgtggacactggggatccgcgcgggcgtggtgatgggcgcggcgtggggaccccctgggggcgcggtgctgggggcgcagggatgggaccagggcgggcgctgtgaggtgggggacgcccggctgtgccttccctccctaaacggagcccacctccagggcagcgggtcccttgcgcgccgcaggctgcagggggcgcgcgtgagctgtgcgaggatttttcttaaaccccagagcccagccgcacctgctccacataaacccagcgtggcgtggagactccgggcactgtttccccagcctttgtgactcaaaagattttaaaataaaatgtcaaaaataataatatacccagagcctatgccagtgatgtgtagatgcagaaaatggaatcctacagttaattttgttaactgtggaatgacatccgagggtgtccaacacattacggagaaaacgaaaaactgtagtcagagaagtcacagaagagccaaataaaagagaggaaaaaagcatctaaaccatgtgatgtctgattttcaatattgtgagtttttgaaaaaaaattttaaaaagcacatagattcacatttcagaattttggagaagtaactttcttcgttttgaagcgatagaaggaatcataagtttataaactgtactgcatataacataaactccatgcaggtgaaggtttttgtttgtttgtttctttcttttctgtttgtttctttctttgttttttgagaccgagtctcactgtgtcgcccaggctggagtgcaatggtgcaatctcggctcactgcaacctccgcctcccaggttcaagcgattctcctgcctcagcctcctgagtagctaggattacaggcacctgccatcacatcgagctaatttttgtacttttaatagagatggggtttcgctgtgttggccaggctggtctcgaagtcctgacctcaggtgatccacccgactcagcctcccaaagtgctgggattacaggtgtgagccaccgggcccagctgcgggtgagatattaaacataaagaaaaatagcaaaggaaattacagtaattctctatagaagatgaagtgaaggctgcctcttcctacacgggtacaggcaaagctggagggtttagtgacctacagtgggggttgctggtaactgtcactcaaaaccctggggcttaaaacagcaaaacttaattgtattacagctctggagcccagacatctgaaatcaaggaataggcagggccacgctccctccgaaggctctaggggagggtccttcctgcctctcccgctcctgggggctccaggcatccctgggcttgtggccgcatcactctagtctctgcctccgtctctacgtgggtttctctgtgtctgtgtctcctcttctgtctcttacaaggacacctgtcattgtgtttagggcccgtccttctccaggatgatctcatctccagattgttaatcatatctgcaaagatcctttttccaaatgaggtcccattcccaggctctggggcttaggacatggacatatggtttggagctcaccatctaaaccattgcaat

SEQ ID NO: 1563191 - DNA, 4001 bp, Homo sapiens
ttattctcccctcccccatccctaggggtcccgggtcactctgctttctccattcctagggggtcctgggtcactctcccctcccccatacctagggattccggatcactctcccctcccccatccctaggcggtcctggatcactctcccctccccattcctagggggtcctgggacactcctccctccccatccctagggggtcctgggacactcctccctccccatccctaagggggtcccaggtcactctccccaaccccatgcctagggcgtcctgggttactctccccacccccatccctagggggtcctgggttactctccccttccccatccctaggtggtcctgggtcactctcccctccccattccttgggggtcccgggtcacccttccctcccccatccctagggggtcctgggtcactctccccaaccccatgcctaggggttccaggtcactctcccctccctcatccttttgggtcccgggttactctccctacccccatccctagggggatcccggcttactctcccctcccccatccctagggggtcccaggttactctcccatccccattcctagggggttctgggtcactccctgcaaccccatgcctaggggtttcgggtcactctccccacccccatccctaggggggtcccgggtcacttgacctccccattcctaggggtcccgggttactctcctctcccccatccctaggggtcccgggttactctccccacccccatccctaggggggtctcggcttactctccctatccccaaccctggaggtcccgggttactctccccatccccatgcctgggggtcccgggttactctccccatccccatccatggggctccggggtcactctgctgtccccatccctagcggtcctgggtcactcctccctccccatccctagggggtcccgggtcactctccccaaccacatgcctagggcgtcctgggttactctccccacccccatcgctagggggtcccaggttacaggttactctctccaaccccatccctaaggtgtcccgggtttctctcccctcccccacccctaggggggtcccgggttactctcccctcccccatccctagggggtcctgggtcactctccccaaccccatccctaggggtcccgggttattctccccaaccccattcctgggggtctcggcttactctccccatccccatgcctgggggtcccgggttactctcctctcccccatccctaggggtcccgggttactcccccacccccatccctagggggggtctcggcttactctccccatccccaaccctggaggtcccgggttactctccccatccccatgcctgggggtcccgggttactctcctcatccccatccatggggctccggggtcactctgctgtccccatccctagcggtcctgggtcactctaccctccccattcctaggggtcccgggttacgatcccctcccccatccctatggggacccaggtcactccccacccccatgcctagggggttccgggttactctcccctcccccatccctagaggttccgggtcactctccccaaccctatccctggaggtcccgggacactctcccctcccccatccctaagggtctcgggtcactctcccatccctatccctagagttcctgagtcgctgggccctccggggttcagcccctccgtccccggtcccctgccccgcccaggcccaggccgtaccgcgttgctgaggatctcctgacggcgtggggaggcgctggccagcaccacgcgcttgtgcagcagcttcccaatcaccgggcacagcaccatggcgtccacgccgggagccgggcgtccgcacttctgagcccggagcccgcggtgcgcgcagcgcggctgcaaaaaaaacaggcggccagagtcccgcctccgcgaggccacgcccccgcccgcctccgcgaggccacgcccagtccgcgccttcagtggcctccccgcgagaccgcgcccaggccacgcctccattgaacactccgtcaggcctcgcccaggccacacctccattgccctctccaccaggccacgcccatgtcacgccccattgatctcccctgagaccacgcccagaccacgcctccattgccctctccgtcaggccacgcccaggccacacctccattgccctctccgccaggccacgcccatgtcacgccgccattgaccgctccgccaggccacgcccaggccacacctccttgccctctccgccaggccacgcccatgccacgccgccattgagctccccgtgaggccacgcccaggccacacccccgcccgcctcccccccgggcaccgccccggccgcttggtgaagcaccgcccccagctccgcctcccgggccccgtccccgcccccggcgctcgccccgcccctccccaccccgcctgcggcgccaagacctgcaatggcgcaggcagctgcggggtcccggggaggaaaggctggcgtggatacttggggttccttgcaggcgcggcgtggggagtggaaatgctgggtttccgcagctgcggttgtgggcagttgtgggggtggggggttcttacccgcacgtggaggggcccggcgcagagatgggggtcttgtgggagccgcgtcggggaaggtagagatagggggttccccgcggacccggtgcgagtggcgtggggatggggatgtcctcgtgcctggtgggaggggagtggagatgggggtgtccacgggcctggtgggaggggcgtggagatgggggtgtccacgggcctggtgggaggggcgtggagatgggggtgtccacgggcctggtgggaggggcgtggagatgggggtgtccacgggcctggtgggaggggcgtggagatgggggtgtccacgggcctggtgggaggggcgtggagatgggggtgtccacgggcctggtgggaggggcgtggagatggggatccccgcggggatggtgggaggggtttggagatgagggtccccgcgagaatgctcggaggggtatggatatgggggtccccgcgggccgggtgggaagggcggggagatgggtggggggggggtccccgcgtgcctggtgggaggggcgtggagaaggtgggggtccttgtgggaggggcgtggacactggggatccgcgcgggcgtggtgatgggcgcggcgtggggaccccctgggggcgcggtgctgggggcgcagggatgggaccagggcgggcgctgtgaggtgggggacgcccggctgtgccttccctccctaaacggagcccacctccagggcagcgggtcccttgcgcgccgcaggctgcagggggcgcgcgtgagctgtgcgaggatttttcttaaaccccagagcccagccgcacctgctccacataaacccagcgtggcgtggagactccgggcactgtttccccagcctttgtgactcaaaagattttaaaataaaatgtcaaaaataataatatacccagagcctatgccagtgatgtgtagatgcagaaaatggaatcctacagttaattttgttaactgtggaatgacatccgagggtgtccaacacattacggagaaaacgaaaaactgtagtcagagaagtcacagaagagccaaataaaagagaggaaaaaagcatctaaaccatgtgatgtctgattttcaatattgtgagtttttgaaaaaaaattttaaaaagcacatagattcacatttcagaattttggagaagtaactttcttcgttttgaagcgatagaaggaatcataagtttataaactgtactgcatataacataaactccatgcaggtgaaggtttttgtttgtttgtttctttcttttctgtttgtttctttctttgttttttgagaccgagtctcactgtgtcgcccaggctggagtgcaatggtgcaatctcggctcactg

SEQ ID NO: 1563192 - DNA, 4001 bp, Homo sapiens
aatgttgctgccattttggaaaacagttttgcagtttcttaagaagttaagcataaattttccctgtgatccagtaactccacccttaagtatctatcaaagagaaatgaaaaaaatatgtccgcacgaagacttacatactaatcttcttagcagcactagtcatagtagccaaaaattggaaactgatgtgcctatctaatagtgagtagacagataaaaatgtgttatatccataaaatggaatactattcagcaataaaaaagtaaggaagtactgatacatactacaatatggatgaatctcaaaaatattatgctaagtgaaagaaatcagacacaaagactgcatattgtatgatttcatttatataaaatgtccagaataggcaaatttatagaaacaaaaaagtagattagtggttgtctggggctgggaatgggacagaggattgattaactataaataggcatgagggaccttactggagggatcaaaaagttctaaaactgatttatggtgatggttgccccacttcagtaaagttaccaaaaatcatttaattatgcacttgaaatcagtgaattttatgatatgtaaaatgtgcctcattttgagtgagtgttatacaggaactctactaaccttgcaacttttctataaatctacaactattctgaaatttttgaaaaattaaataaaaataaaaataaaaaagtatatgtttatgaattgatatcagtatttggcagtacctatctatgtaaaatgacattttcaaagattaaataggtaaaaatttcctaacagatcagcattaacagatgaacacttaaaatcaattttgacaatagggaacactaattctgagccccaattaagcaaaatattatcccctaaaaagaattctattcttctcattggtagtcttcctgtattacaaaaaaagtactcaattactattatattttgaatttcatcaataaaaatttgttgaaatttgttttctcttttgtcataaaagtaccaacaaaatattcttgattttgccttttggcctacaaagcctaaaatatttactatctggctctttacagaaagtttcccaactcctgttctacactataacaggataaacataaacatcatgagtctctttcttgaatgtattcttatcgttacctagttgtggcataatgtcctctggatatgccctataaaggatcagtcttgcattgcttctgctatggcactatttgggatttctataaaaagaaacactattagcttaatagttgtagcaaagccttgacaacatagttaatatcgtgatattaaaatgccaacaccacagcccggtatccttaagatgaccctcatcaagctgtgatgtcaccaggctatggactcaccgaggtctcttagatatcaggtggctcccacggcatcacaccctgcctttggcatcaccctggcacatcacctcagtacggtgccatatgctatcactgctgtggtagaaccctgtcctgatgccacaccgccgagatgtcagagtaattaacccccacttctttccactccctaggcggtggcagggagggggagggtagccacagtcaccggttcgagctcagtaggtagtactcagctccaacccttgtcccttccgcctgccactgcaggtcaggaaccccgggggacaggacctttaggctctcataactcttgccctgcccccgaacctgtttcatatggccgactcaacgacccgccagcgactacccaccccggctctttcacacggttccactcaaagccgctccccgtacctgactccattctccagctgtcatcctgggccaattccaccggcaacttgactacggacggacggtcgctaggatccctgggacttgtagttctgcactgctaggggccaagtctgtgagggcagcaaaggcgcctccctgcccggaactgctctcaaactgcaactcccagaggcgccgcgcgacgggaaaagaaaagggaacgaggaaggccggtgattggtgaagctctaacggctgttttgactggcgtagccggagccggcgacgtgaggcgggcgttgctcgcgcgacaagtagttgctgggacagcgaaatggaggggtgtgtgtctaacctaatggtctgcaacctggcctacagcgggaagctggaagagttgaaggagagtattctggccgataaatccctggctactagaactgaccaggtaaagcaacgctaggtctctccgcagtcggcgacgtcggcgaagccctacgtggctttcggggcccggccctagcggaggccccgtttctgagagaagcagaaccccgcccccgccgccccaagcagtccccctgggtcacctcgggactcgcgataggcctgcgggagctagccccacagacctcagatattttcccgttggcccggagctccgctccctgatttttggatagttctagaacgtctaccgcatttctcagaaactcccaatcagtgaaaaggaaggctttttatatggatttatttacctttactagtaactgtattcagtaacgcatgtgaaattgaacgccccttccgtgccaggcagtttgctaggagctggggatacggtggagtggaagatgcagacaataaaataagcacaaaaacatgtccgattacaaattgtggtaaatactcggcagagaagtttacatggtgctttcagaacacgttaataggaggatctgatgctgaatatgactgtcgttaattggaaaagtttttgcaaagaagggaaggttagttagactttgaagcatgagtgggatttccatgggggaatgagtggacattctaagcagaggtagacagaagtttagaagtgtttctttctgccctcctgctcacaggactctcgtgctttcatcctcagtttctaggattcatggtgcctttagtaagcccacaaatatttatagatggccttgtgtttcgcagacagtgtcgtaagcactagtgagactgtcccatacttacagatctccattttgtgtcttttgggagagaattagaaatcaagagactgttttctcttttctggaactttcctttattactcaacctgaaaatggccttatctttacctggtttacttcattatggtctggtgatatttaaggatttaaatttaaatgtaatactttatattaagatttaatactccattggaaatttaaccattcttcagtcaagtcagtggcttaaaaagggaaaggaactattcagcatcaagagacgtaaaaaacatgaagaaatgcaatttatggatctcgtctggttcctgatttaaacaaaccaactgcaaaaagacatttgggagacagttgggggcaatctgaatacagaccggatattagacattctaaaggagttagtgttaattttagtaagtgtaataatggtctcatagttatataagaaatacctttattttttacatactgaaagagaagggtgaaaagtcatgatatttaggatttgtttttggaaagctcagcaaggaaaaaactagttaaagcaaatagggcaagatgtttgttgttaaatctaagcagtaggcctgtgggtttctattctattccctctatttttgtgtttgaaatttttttgtaatagagtttaaaataccattttctattctgtggggctaagaagtatagcagtcactgcaaatagggattccctttgacaaataatgactactatagcttttttaatttttatttatttttatttatttattttttgaaacagagtttcgctcttgttgcccaggctggagtgcagtggtgccgtatcacctcactgcaacctctgcctcccgggttcaagcgattcccctgcctcagcctcccaagtagctgggattacaggcgcctgccaccacgcctggctaacttttgtatttttag

SEQ ID NO: 1563193 - DNA, 4001 bp, Homo sapiens
ctgccacagactctttcaaacagtgatcgtccttaaataacatcctgcaagtttttagtatgccagccataatcttgcactatttctttaaataatttaaacaatttgctttccaaaggttaaaaatacaaataaccctcagtgttccgtccaaccattttaagctgctcgcaaagtaagattccccttcgacaatttattttgcatgtggttatctcccatcaattattcagatcactgataatgagaattacaggccctgatataatgcaaagctacttggattatcagcaaataatcttaaaaccgacgtaatccctggcagttacagcattacttttattggtcatcgaactgctttctgtaagcaaccacagcaaataaaagtatttgctcaaaaatgaacaaaaaaatttcttattaaaatctgaagacttggcaatgatttaaaatggttctccactctccagcccaaagctattttcttctctgaagcaggaatatttttgaacagcatagtgtcttaaaaaggccaaattcaaaattgaaagagcatttcatcaaaatttcagatgtctactaaaatgctcccagaagtcagcatttccatactagggctgaaggggtgggggtatggggaggagatcactacagtgccaggaaacatttccagtgtattaagcttcttggttaaaataactacaatgtattcggtggtcaaattgctgaggtttccaagcccactccattataacaagcaaaaatgaataaacttaatgtgtaatttacaatcataactctaaaatgatccttaaaattgcacttttcagattttgcttttactgcaacttctgaagtgattaagctgtctctccttttgccaaaggaagtgaagcaagactgatggggcattttgtgttgttctgcctttaaagcttaattacagtcatattaactgaaattctcaaacacctgaccaaaggacaaatgaatacataaagtttatccctaaacacaaagatttctctaattaggcattacccaatggcttcacatttaattgaaaaaaaaaaactactacaggaaatggatattaagcctcacacaaacacctaaatcagcaagcacaacacttaagaaaaagactgaccatgaggatttggataagaacaatgccttgtttggaagctcagagtggacctttcattatctcaaagtgatccactgagcagtttaatttcaccagggacaatcaattctaagtattcccaatctgatcccccttcccccaccatgcccttactccaagaacttcagggctcagaaattgtggctctaaagactgaaatgcagcttcattaaaggattgctaatagaaagttgatggatcaaaaatactgtaaacattctgtgattcaagattctaacaggaattttatcttttaatgattcaggttcttccatttataggaagtaacctgcgactctcagtgttcctttggggtctcagcaactcaacttcccttattaacagaatctttcctaacccaaagcctgacaatatgcacagaaacttaaccagcaagtatacaaaacctcagaagttccctttcactttcaccctacccatctctacacacagcctttcattccaaacacttaacaaaatttaaaactctaaataaggagattcttaactcttaaagataggagcagtgaggctgaaaatccagctaaccatttacgattaccctcaggaaatggataaaaatatacatgcaaataaaaagcaggaataaagcaggccccaagacctcaaaacccaacctggctgaaaagaggagaaataaatatagattacaaacctcagaggctggagggagagatgggaccatctgcatactgacatgcagaaatttggcaacacaatggcagctaaatctcagagagaatgctgcagattatcaagcaacttgtaccaacccctgtgatccttgtaaagtttcccagaacttgggaagtgagccaattatggcttgcctagttcctgtacttccatgggaggcagcaaaggaagcatcagatgacagtctattccttaagagctcaaagcagtactctggcggccttagccccattattgcaccatttcatatctttttgttattcttctccaaagacctgatttgcctttgtaacttctgtattttaaggtgttattattttaaatatcagtatcttacaccacacagtaatttttcctcatcttgggaagttcttttctaatccctgcctacaataaatggaccacaataaaaagtggggctaaacaataagcttcggaggaaagttgaattgaacttttagttgtagtttaagaggaagagacataatctaagtattcactatgatacagtttctccaccctaagagtcactgtaatacagtaaattcaagcttcaaaaatatatgcaacaaaggcctaagcagatggtttatgtggaaaggtcccttagggatggaagacttttctcactatttagatatctcagaggtaagaaagttatatctcagcagccaacagtaatatctagcaatcgcaaggaaaaaagccagtggatattagggagaaaaatgccttgaccagcatcattacctagaagagataaattctcatccaaaaattactttctagatcaccacagaagaatttttattacagtttaagaagagataagaaactctagctggagcaaaagaaaaaatattgtaaaactggtgtctgacgacctgaacagggttttatttcttttttcagtgatagtgtcattactataaaagtgatgtttcctagaaaggtctgccagttcaaatacaagttggagtgtgtccagcaaaaccaatgaatgcatttttccaagtaaactgttaaataccatacaaaaagcaaactggcttaaaaactgcccgagctgtaaatgtaattaatttaaagagcacatccaggctataacttttcttaacatccccaacaaaagaggtagataaaaagcaagtttccattgtggagcatggcttagttgaataaatgaagaaagtaaagggtttcggggcggggggcgcattcttcctggacctggcacagtggcttggacctgtaatcccaatgctttgcttgaggcccagagttccagaccagcctggtcaaacatagtgagacccctgtctctacgaaaaaaaaattttttttaattagcggggcatgctggcacacacctgtagtcctacctactagggaacctgaggcaggaggaccacttaagcccagaagttcgaggttacagtgaactatgatcaccactgcactccagcttgggcaacagagtaaagaccccatctctttaaaaaaaaacaaacattcttcctacagggaaggctttcagggcaaaatctggagaggacagggaaagcaagacagttatgactctgagaaatattatttacattttttttttcttcaaaatgagacctggagaaaatggcttagttgagcctcatttccttatctataaaataaggtcacataacgtaagagactgcttacagcaggattaacagaaacacccagaaatcactttaaatgactgtaaactattcgcaggaacaaaggatgaggtttgcagatgttaacaaactataggaatattgaaactctagcaactgggccagcatggaactaggcaacgtcctcaacataacccacatgtaaatgttttatttaaagcaagaaagtttctggctctacagaagaggcacgggaaattttggtgctacccctgcctaaaggggcaggatgaattatggtccactagcagagagtgcttggttttgaaaacactgttcttcagtgttcatgaagaggactagagttagccagggagcttgacaagtgccatgtttgatgacaactgagggccactggaggagcttatggaggctgc

SEQ ID NO: 1563194 - DNA, 4001 bp, Homo sapiens
agaattaatcttctcacggctaatttgcccctacagctctcacacccgagaggctgtgagaggttcctgagctttactttaggaacctcgaatcttttctcctctcctctgtttccaggtaaaggaaatggtcacactgtgcaagagaggccttccccaaaagatcctcattaattaaatcctgtgtaaaatgtatctttgtgaaactatttaacaaaatccaatagaaaatcctttggtaatgagaatgcttatccctaagattctgtcttgtcactttcctaaagtggcactaccctcatgtgatagtgtgtgtgagtgtgctgggatatggtagtgggtgtgtgatggggtcatcaggtttccctgaaagggaagagtctgaagaacagagggtagctccattttgagtaatctaaatatataaacatataaacaaatatataaacaaacagtatgacccaaaggataaattttaaatttgtgctctgcaaagaagacagcaaggcatgtgtttatacaccataaacatttgaatggctggttaattttaaaagagaaattagcacaggattgcattaatttatttttaaatttggtcaagtattataaagagcaagatcccctgatgcatttaaaatccaagccacttaacaaataactgaaattatacacaacattttaacaagattacatagaaaagaaggcaagtaagaaatagttttatacccctgcagattgtaactgttttgagagctggaagaaactttgggggaagttaaacggttcttcaaattgtggctaaaaagctaagagaagccctctgtagattgataggaggttagaataatgtgtgttttcttctgcgggctgttgacagtcttcacttaactccctggttacataagtggccatacccaaagaaaaatggcttaggctttgtttcctcctggggctgagatcacaatcctctctggggaacatttcaaaatcctctccccaaaaagcactgcgtgtggcatacattaatgacttatagcaaaataaatgcaaataaacttttggatcaaataatttgtaatacaccctggaaataaatgatgagacaaaagaatgtatgtgtgtctacatgttgggcagtgtggggtggcagtcaggatggcaatgggtagtggcagatcgggggtttggaagatgcattctgcaaatacaatggaaagagtacaagattagcagtgaggatattgcattttcactttggctcctccactaacttgcaagtcactcctgtactctgagccacagcagcctcctttaggtaatgaggggttctggagagataatgtctaggattcctccctgctcctattggggattctatgattttagctatagtttggaatttctactttagaaagagagcagctggactctaagaagctaccacccaagagacagctgggtaggcagtgcctttcatttcctcttcctccttccttccctcttggctaaatttcttgctattagaattaaacttttatactccaaaaggtctgtgaaaattctatactcccaggaaaagattttagaagccacttattctctgttatcttctccttcccttatctttgtttcacaggaagaggggcttcctccttttatccagcagtttagggtgcccgggggtgctgggagtcactgctcctttttgaaaccctgggctcccctaaacttcgctgtttctgcccgtctcaaagagaggcagccgtaaaccaaggtctacacagcccccaacccaccccattaaaataaaaggggagggggcagcaaaatattctgctctctggcactcacgagtctgtagcgataactgtaaggaaaggatggagcccttctggaccggagttgccttctcatggctgttcagtgggcaaagacgcagcagaggcaggcaatcgggtgagagttctggagcttctgctggtacaggagacactggttgctggggacacttggcgcctggtaaaagtgaaccctcctggcatgagcccttccccagaataatctaacatgtccctctgtcattggttggctccttccctgaatcaagggaaagcccttatggaaaagcaagctcatcattacaaggagggggagatattctgggtcacgaggatgagcaactcaccctcccgccccctttatatgtctttccaccccttgtctttctccagcgcttgagatatgatggccccaatggaaatcttaagtcatgttcttctcaattgagagttggatatcagtgcatgcagggggtgggtgtgggtgggagttgggggtgaggggagatggccaagaataacttgcttttttcataaggctgatctcatgcaaaaggatctaggatgtcaggaaagattccctttgctctctccccccacccccacacacactgtaagccacctacaatatttcttatttgtgtcaatccatgagcttcttaaaatgtggattattctttctgattttagaagccaggctcctacttcattcctccctgccccaaagagggtcttggacataaggaagcctttttctagcccacatgtcagagtggccccatcagtcactgcccctcatacacacacccctccaaatcctggccaaatttctgtagtggttgagatctatatttatcccttagcatcagggcagggaacaagccagaactttgcagtgtcagtttcccagacatatgtaactcctgaaaccaacatgggatccaatgaaaggaaaaattagaagaaacagttaagaatattgtatagcatttttggtctgtttggggtccaccctactggagcctgggtggctaaaaggcctggatggagtttgtgatccttccttcacaaatcaaaccccattatactcaagtggctgagaatgttgcagatactgacattctgggcacattcattactgagaaaaacagcacaatagcttagaaagatttaatcataactccaattcaaggctattctgatgaaaatggcttcaattgcagttaattttaaataagaattcctttcactgtaatgttactaatcagacctcttctttaacagtgtctcttcccatatgcttctttgaagggaaaaaggccacttacaaaaaagagaaacttattcttctctttgaattttattaaaagcaaaatatattctaggggataatctggtctctggtctcagtagatgttgatctctatcttctacaccttctccaagccagtcttttgtgtgattccttacattaagtatgagaatccccaggcccttggaagccttaaaaccaaacaatggctaggctaactggtctaaggctgaaaagagagtacactcactttaaaacatttcaaaaactgagagtagggggacaaaagggagttaggagtgacatgaccttaggtaacaaaatactccattctctagaatcttccattcctaagcattctgggtaattggaggtttgatgtatacttaagacatttgccatgtatttcagctatagcccaggctgtgttctggaatgtcagctgttgggtggggtaaaataaccaaatcccataggatgttgaagacagaaatctgtatgaatttacactcaaaacactagttagaagggaaatgattcctgccaaatttgaaaaaaaaaaaaaaaagcaatatgcctaacagtgcagcagaatggagccacaagtggctaatgcggatgcaaatgaagcagtggctacaaagggacaaggggagggagaaaggagagactttgaatataacagcagattcgggggcacattattaaagtctagaaaactacatgctcatttcttgggcacaggtattagcaaatgcttctataagccccttgtcctgagtgcctgctgtggtgaaaccacagagttggctgacaatggcaactaactgggaacagaaacaatctta

SEQ ID NO: 1563195 - DNA, 4001 bp, Homo sapiens
acagctcaagcccgacagctccagcccgaggaccttgagggttgaagaggggaggggccggtcctctgctgctcattctgtgggcagcagatccaggcctggccggctccctgcactgtggccttggggacccaggtgcttggaagcccgtcagaggccaagccacccacctgtgcacctgcccttctccgtgcccctgcctccacaggcacgcaagagctcctgagctccatggcagaatcgggcaggttcccaggggccttgacattttaaatatttaacaaggcctggcagacaggggaagagcagacagctgaggcccatctgcttcctttgatctgggagaggccagagctcttgtggataaatggccctccacagcctcctcgggggctgggcaaggaggagggaaggcaagagatgctcgggagcagagccaaggcatcagccccagcagcagctgcaccgtgagggcgtgtgcggcggcgaggccgggtgtcacgggcgcatcagctccagggcacaaagctagggagacccaggcagaccctggagttcctgacctggcccgcagcccccctcctccatcttcactcctccctgcagcctgagtgccacctgcagacagacggggccgaggccggagccacaagagaacagtctctgggttgagggtgagggcagagcgggaggctggaggtgccaaggagcctcacggctgggagcagaggagatgggtgggcccaggcgttgcccagatgggcagcagatcaaatcagcccgcactggctggggaacaggcctggcactaggctgggatagccccagcagccctgccaggcacgcagcgccagagaatgctgtggctcctggaatctggggctgggcctggctcctgggggtccccgcttcatggcagaccgcagcaaccagggctgggcaggcctcacaaggccgggtggaacattgcctcccacagggatagtcaggcctccgccccagatctttctagacagtgctcaccgggctttctagagcctccctcagcagtgagaccgacactaccctgggcttgtgcctctttgggacagcctgtggccagtcagtgccacctctgatcagcactctgggcctcccgtgacccagcttcggtcaccccttcctgccagacccaaatggcttgtgccatccccaggccatcctctctcttcccaggagaggccccggtcacccgaaactccgaaggcttgcaccctgcatcccttcctcctgttctgatcccccttaagtgaacacagggttgagcacaccggaaatccccaaatatacagatggggctgtcttcctcctccctgccctgccctgccctgttcctcggaagggtttctgtttggggcccattccgcctgtgtgtgtgtcccatgaagttcccatctccccctccccagtctcgctctatagagcggagaactcctgattgtggaggtgtggagatgagggggtcaggtcaggttacccagggcatctccccctcaagggaaatggctgagaggaggggcacaggtggcccttgaccctggccagccttggggctaaggatgccttcaggtcgctcctctgaaggctgggagcagggctgggtggcatgcagcctgagagggacttaccctctgtgggtgaggtcttcagcctccggcagagcccgctgacatccccgtaggcctcctcgatcttctgcagcgcctcggcccctcgcagctccatgagggtgcgcagctccgccagcgtgcacccaaagcctccagcctgggggacatcccgctgctgctggggcttggggtggaactcgatggaactattggccatgtcgcccatgctgcctgtcaggccttctcacaagtgcaatcttggctcagccacagctagggacaggcggccacccacggtcccagtgcccaggcaaggtttggcggcggtgagaaagctgctaagcgtggacacctggggagatggaggcgagaagaagccaggggagtggttgagacaaaactgaggtcccatcttccagaatattctcggcaaatcttcactcagtctgtgccatgaccctcgaagtgcagaaatcacctcccaggctgggccagtggccctcatgctctgccaggccccaccagccaggccactcccgggtcctgcccaccatgggtgcccagaacctggagggcttgcccaggtgggggaggggaagtgtcgatgcctcctgccaggaccctgcagtggttaacactagctagctggaggcagaggctgtcactgccccccagatccattcgggaacccacgctgaagtgagggcagcgtgctgggactgatcagtggctggtcttgcccgcgccccaccaccagtcctgcgcttgttcactccggttcactccctgctcttgcctggttaagatgcgccctgtgcagcgggcatgccatgagtccctggtggtcttctggtgtggccttagtggctcacggtttctgtggccctgagagtacctggggggccaggggcgaggaaaggaggaggcccggaggaagggtgggaaacaggggaggggagagagggacaagacggaaaggcaaagagagggagggaaagggggatggagggagggagaagagggaggggataaagggagtggctgaggaggagaggaggagagggtacacaggagaaagccaaagcagccacaggtcgctggtgagtctgccaacgtcccagcccacagcatggtgccacccactcccctccacgctcttcttccctccagatgacaaagtaaggagccaaagtctccccacactgaaagcatccaggccacggccctggccccactctgccgagcatcgcaaagttgtcatccctctccctgtccccgtcaccttacccaaggatccgctagggcccaggctgccccttctgcagccatcacagtgtttggcggggcccactgcagctcctctctctccgctccttcccggcccgagctaagcctgtcacatcctcatggaactgaaatggcctcagtgcacatggcctggccttgacatcagccaagagccctcctggcagctcagcagggccctgaacccccgtctctggggaagctcctggctcagaagcatccgttggaaacgagtggcccagagccctgaagaaaggggagaaagccctcaggcagccaaagcagacacggccaagtccatggccttattctcaggagaggccctggtggatacttcacgaaacatccatccacagtgacccatgtttgaaaagcgtgggcacctgcgcgtttactctcgcgacacattgcacatgaagcagccttcacttctgggagatgtggggacaaaatgatggccatgtgcctgtgccgtcctctctccccacctctccccgccctgtcttgcagttggtcacctgacacatattcaccgagcagctactacatgcctggcactggcttgatgtgctgggacaggtgctcaacaagtttcaactaaccccgtccctctctagctgggacagggagaacagcaggcccgagggccaagagctgtggggttgcagctggggcaaaggtgaggcaaggcgtctggggacaggcattggggggaaaagactagaaggagtgaaagctgaggagagggggccaggacagcaagcgaagctgtcccaggtgaggcgggctccttctgggggtgctgtgtggacgaattgcccttgcttttctgatgcgggaaactgaggctggcttggggaagtggcagagccagaggacagctgggtgtcccacttctgacccctcaaggcagcaatggcagctttcggctctcacctggactcctcgtcttctcgagacagcctcccctccccaccccaggacctttgcttgtgacggtgcacctgccagggcgccttctccctgccttcctgagctccagtcacc

SEQ ID NO: 1563196 - DNA, 4001 bp, Homo sapiens
cgacttagtatttactggccaccctcacaagaatgtcagcttcctgagggtgggggcttgggttcttctgctcactgccatatccccaacacttcacaatacctggcacatagtaggctttccatattgggcaaatgaatgaatgggtgaatgccctaagactgggggatcctggctagatgttttatgtggattataagaattccccctcacaggccgggcgcggtggctcacgcctgtaatcccagcagtttgggaggctgaggtgggtggatcacgaggtcaggagttcaagaccagcctggccaacatggtgaaaccccatctctactaaaaatacaaaaaaatacaaaaattagctgggtgtagtggcgggcgccctgtaatcctagctactcgggaggctgaggcagagaactgcttgaacccgggaggcggagggtgcagtgagctgagctgacattgcaccactgcattccagcctgggcaacagagcgagactccgtctcaaaaaaaaaaaaaaaaaagatttcccactcacagccctctgatataggtggtgtcttcattttacagatgtagaaactgtcattcacaaagattatttcatgcctccaatggctggttacatggtagaactaggactcagttcctatttgactatattatttaccacctcctgaaaagacttcaggccaccaccatctgcccacacagcaaccaagggagactacaagggcaatgagccatacaggccaccaacaagggagggcctagcagagacttgctatcttagagtcatctcatggtctccacgcctgcttttggggcaaagatcctggatgggaaggaaaacagcatgcgggttatgagctccaattgggagggaggattggcagactcaggctggaaccaaagtggtatctatcaactgtagtgaaacattgtatctcgacaaaccttactttccttggcagtgaaaccaagataatgacatcagtgtagcaagtgcctacaaagcactaaacaggtgagcattttccaattatcattattatgatcatcacagctagaattacaactctgccacccattagctgtatgagcttggacaagtcacttaacctccagcctcagtcttctcatctataaacaaacagggacgataatccccacccaccatattggactaagtcagatatccaaagtgcttggtactcagtaggtacctggcctctggtccgtcgcttcctccaatcaagttggtgccatttccgaggctgtcgccatgcccactgaagcgtttactacaggccttcccatgagacgacccacacctccctacagttgggacaaggtcactgaagcttcccttggggaatgggcgtcagtgtcatggggggagggggcctggctgcctcccgatgaccgggggagagtgggctggggcgggcgcaccttgtcctgcaggaacagcagcacattcctgggacccagctccagggcgggatctaagtaggtagagagctgcaagtcgctggtgatgtggccttcatgagtgtcggccgcaggagcccacaagtccctggcagggcacagaagaggtgctgtcagacgggggcgcatgtggactggagctctgtcgccggcagattcgctgcgagcccccgagcaaggaacagtccacctccgggcctcaccacccctcgcctaggacagcgccggagtcgggcgagggcgcctcagccgccacagcgcatcccaccccggcccgctcaccggtcactcgaccacagcaccagcgggacctgctgctccgccgctgccgccgccgccgccgccgccaacgacaaaaacaccggcagccacggcatgcgccagagcgcctgggcgcaccgcggccccatccgcactcgagccgtcgccatggccgccatcatagcctcagcctccactgcctcagcggcctcgacagccgcagatcaggtgaccgttgcccccgcccgagccccgcctcgcacctccattggccccagcgcgggccgaccggcagggccgcaggtaattggaccaagtgcatgccactcgcggccactccttctcactggttggctgtacgtgtctccaggcgctcacgctccgagtgggaaaggggatggggcccagctagaccgactaggacgagacaagagggacagggaggcttcgcggaaccctacgcccacccgacgcgttcgcccgtccgtttttatttttatttttattttggtttttttgttgttgttctcttcttttgtcttttttttttctttagagacggggtctagctatgttggccaggctggtctcgagtccccgggctcaagcgatcctcccgcctcagcctccggaaaagtgggactacaggcgcgcatcgccgcacccggccaatccctgttttaatccttttccttaaaattgcaaaagtggtgtctttttcctgcagatggaccctccctgatacaggtgagaggagactgtaatcccttagaacgaggagtgaagcgggctcaggatagcatctaggggaacacccagcacttacattgggcaggaggagaagggtccagaaaagagatcggacaaggagcaatcaaagaggaaggagaaaacccagagcgaagcgtggcatcaaagacaccctaacgggccgggcgctgtggctcacgcctgtaatcccagcactttgggagcccgaggcgggcgaatcatgaggtcaagagatcgagaccatcctgcacaacatggtgaaaccccatctctactgaaaatacaaaaattagctgggcatggtggtgcacacctgtagtcccagttacacgggaggctgaggcaggagaatcacttgaacccgcgaggcggaggttgcagtgggccgagatcgcgccactgcactccatcctgggcgacagagtgagagtccatctcaaaaaaaaaaaaaaaaaaagattgtagtcatgattgtcacatgtgattcagactaggactaggatagtggcagttgagctggagagaggaagtgggtctgacaatacagtcaaagaagattgtagcttttgggtctctctgagttggggactgggagacgaggtcacttgggggctcactgagtttcgggtgcttagggaaacccccaagtggccatttccaggccttaactagctgaggagagaggttttcactggagcttcactgtatcccaggagaatccagcaaacttaaaaaggaaagcatgtctattatgtttctgttacttttgttacatagtttcaaggcaaatacttcctctggaatgcggaaggcaatcttgcctccgccaggactctgttgctgagctgcttccatgcttagggaagaaacccacctgtggctgcttttattcttccctgcattgctaggggtccctggagtgatggccctggaggcttcctgaagcacctgctatgggccaggcacctggactctgccccggaagttgacagtttggtctagaggacatgcaggacagcaggtcatgatacagggtcatgaatattccaaaggttgagacatgggactgggagggatgtaaggagaggggcaccgatgaagctgctcccaccaggaggtgatatctaaactgaaccaatcaccaaatgttgacagcaccaatgagcaccttctgtctggggacttcatctttagggtaaaagcattttgttcattgaaatcctggctgggcgtggtggctcacgcctgtaatcccaacactgggaggctgaggcgggcagataacctgaggtcaagagtttgagaccagcctagcaaacatggcaaaaccccgtctctactaaaaatacaaaaattagctgggcgtggtggcgggcacctgtagtcccagctactcaggaggctgagacaggacaattgcttgaacctgggaggcggaggttgcagtgagccgagatcgtgccattgcactc

SEQ ID NO: 1563197 - DNA, 4001 bp, Homo sapiens
taataactgaacctcatctgacaagactgagcaattcagaagctgacaggatcaggttcttgttctgtatgaactcggctatgctagtaaggaaaacatgttcaaaccatgtgcagaagcaattattttatctcagacccaaaacaaaaaagcctatacctcactgaatcaaaataatatcagtcaaaatattaaaacatggaatctcaatagatgttcagttaaaccacaggatcaaagggaatatttttaaaatttcaaaaactgaattaaaattaattccctcaaagtatctcagtagatcagaaagacctttccagagccagaaacagaagaaagaaacaaagaactcgaaaacgtttggggcatggatacaacgtaactatcattaacacacaaaacccccgcacctctagggacagagatctgcagatttcaagagcatactggtgcagaattaaatcgccattccacaagcaggacctcccaacacctcacataggtttttggtttgtttgtatgtttgtttttgcttctgagacaaggtctggctctatcgcccaggctggagtgcaatggcgcgatctcggctcactgcaacctccgcctcccgggctcaagcgattctcgtacctcagcctcctgagtagctgggattacaggtgtgccccaacacacccggctaatttttatatttgcagtagagatggcgttttgccttgttggccaggctggtctcaaactcctgacctcaggtgatctgcctgcttcggcctcccaaagtgccgggattacaggcgtgaaccaccgcgcccggcctcccataggttttaaactgacacactgagatcagagcacccattcctccaagccgttctcaacttggcctcttgttcactactgtctgtgcctccagtctcagtccccatcactcccacattctcacacagtaatagcgttacttgtgcaacacaacatatataatggaaaaggccgatgcgctggcaccacctcatctgaaatcaaatccagcacccaacctgtttagtgttgggtaatttatttaggttgatcaccctgcaaaacaaagatgatgccctctaaggactgctgtcaaatgaaatacattaccacatgatatgcagtaagaggccacgtattagctgatttcttcacctcttgctgaatgcttaggaatctaggttctactcagaaagctaccatttattgacatgtgaccctaaaaatgcgactcacatcctgtttccaaatccttaaaatttggaactctgacaaactattgagaggtgctttgtattcgccttaagaaatataagtcatataaaaataatgactccatctcaacttttgcatccggaaatatacataagggaagggaggggcagggatttcagcaattactgatgacaaccactagaaatgaaggcaccatacaaatgcaaaaacatcgtggcagccagtggcagctaaaaagtctgccttctcttcttcgcagcgggctgcgactcaatcccagttcactgagaaatgcatctccgtactctgaagggccttttcaggcgcaagaagccggccggacgcgccgccctcaaagtggagggtggaggcaggctcaggggccccctacgcagcccagccccggccccggcggcccgtgaggccgcgccgccacggccgatccagagaagatgctgacggggacgcggctgaggcgaggccgccgctgacggaccgcactgcggcacctgcctcgcagctactcgcccgcggccgcccccgacccccaagccccgcggcgcaggacctccccaggcacgtcctgccggcccccggctcctcacccgccaccaacgccaggagcacgacaaacacagccatggtgccgcggcggccgcagcactgcggggcgacacggaacgggccggcgggacacgggcgacagccgcagcgtgaggaggtgacgcgctcggactcgtccaggctcccgggtcccgtcccttcgtcgcttccgctgggacagctgccgctttctccaccaatcaccagttacgccgcggcctacggaagggacgtaacctgggaagcgacagcctgataggcgggacttaaagtaacggatggagagttctaccaatggtaggcagcgattgaaaagtcgggcagtcccgccccccggtcggtgatgacgggtcaagaggtggagcgtagggcgggtagtcggaatgggtgatggagctagtcgaggggtcccggagcccacggggtgagggtgcctcccgagtgcagatctttctgccagtctcgagcgacggtctccaaccagggtgtctgtctttcctggtcgtgtgcctccgcccggctacggacgccagctgtgaaaggcggggctggttggggtttcgctctaacaagtatacagacgccgagcacctactgggaagaagccaggcgcaacggggaacccctgccttccacatagtggtgccagataaaatacagggcgcccagttaaatttgaatttcatgtaaacaacgattatttgttattatgtcgcaattaatttatgggacatacttgtattaaaagaagtattactggttatctgaaattcaaatataactgggtatcctatattttgattcgctaagtctggcaactctacctccaaagactttccaatctacaaggagtcatgggacagaaagttaattaattacttaatttgtccattcactcagtttccaatctgggcaaggtgttctatgaggatgtatgaaggctagacatagtaattagaccaggctcctcccctcccgcagttcatagtcttttgcctatgatgtgaggcaagaagggacacactatagcgtctgtaggtagaaaatgacgccccagctgatgaccttgaaaggtggaaatgatttcatatccaaggataggagatggggagattgttccagtgaaaactgtagttaaggtggggagaaagccccgtcaggttaagcatcagtaatcaaataagagattatatgagagaggaggcacagagctaaaactttcagttaggcacatttattgaggattttaaattgtacataagagacctacactaagccattgaaggcgtttgagcatgatttactgcacaaatgtaagacagacttattggcgggggggagggggggaatgccttactgtttcttcagtttccagtcccattttcttcttggagtttcctgaggatgaaaaaatgagagcgagttaaaaacagtgaccccaggagttccccaggtagcagacccaccctaggaaaaccttgcccaactgaaaactgaatcagaaagacactctcgaggccaggtgtggtggctcacacctgtaatcccagcgctttgagaggccgaggtgggaagatcctttgacaccaggagttgaaaaccagcctggataacatagtgaggccctgtctttttattattagaaaataaagaaagcaaaaaaagagaaacactcactaaatagtttgaactttctagaacacactatgcttaccaaagccactctcaaatttagggaacagagtcgatttcctcacctaacgtcaagaaacaggaaactctcaaacttgcttttcctctagaggagaatttgtacaaatgggactttagagaactctgaaagggagaagagagatttttccatcaggcatgtgaaattattagaaccaaaatgtctaaagcacccctccaaaacatccactctaatgtgactgactcgaaaaaaattaatcactttttttgttgttgttgagacgaagtttccctcttgttgcccaggctggagtgcagtggtgcgatctcagctcactgcaacctccaactcccgagttcaagcaattctcctgcctcagcttcccaagtagttgggattacaggcgccaaccaccacgcccggctaatttttgtatttttagtagaga

SEQ ID NO: 1563198 - DNA, 4001 bp, Homo sapiens
gttttacattttttctcttttagatttgagtttacatcagaattaagcctcatacattaacattgcttttgtcatttccatgtatttttttctctatataagctttcttattggctggagggcagttggatatgtttgtgagctgactagttttgtattctatattttttctaattttaatcagtgacatcttggaagatgtggctgttagaaataggaatattgacttacagtgtgttactggatgtcgggcaactttccagacccccatggctttgctcacattatttcttctatctatcagtccagatagatgtcttcctcttcctccattcctgcaaagctaaatcctatctatttttcaaagcccagttcacatgctcccttccctgcactctcataacacctcctgtttctaatatataacgttagtgagattttttaaatgtttaggtaatcgtgtatctttctttcctactacattgagatcctcaagtacaaaaaaaactctctcatgtcatgaccttagacaccagaaaatgttaaatataataaaatgccagttcaaaaataaccattgaaaaggatgtgataagcaacctagtaattcagtcagtggggctgctagaaaccgttgtcttcatagctgaattcaactgactcaattcggactcaattgtatgtaaactgtttatttttctttcttcttttttggagacagtttcgctcttgtagcccaggctggagtgcagtggcacgatctcggctcactgcaacatccgcctcccaggttcaagcgatcctcttgcctcagtctcccgactagctgggattacaggcgcccgccaccacgcccagctaatttttgtatttttagtaaagacagggtttcgccatgatggccaggctggtctcgatctcctgacctcaggtgatccaccctcctcggcctcccaaagtgttggtattacaggtgtgtcagacactgcgcccagcctactgtaagtaaactcttttgaggccaggaactctgtcttatttcttgtgcatcaccccctccccaccacccccccgcacccggcaaaaaaaaaaaaaaattaataacctcagtatcatctaattcaatgttctgcacatattctcaatacaaagccatactattgtagataaagagtctgtgattaaaataaagatcagatcctggacaaacgctgaattgtgaaacgataagtgtttgtgcttaagataatctcaacgtctacaacgaagaaaagtgtcaaagataagatgccacagggtcggacaatggacagtaactttactggaaagggggcacaatgaacaaaactaagtggaaacaagagttctctcagtttaccttacgctcccagagcaagacaagaagccaaatatctatttttcaattattatttcatcaattatggtcattttagtaaccttagcttccaaagtataaagaggtgtcactaagcaaagaccccagtccatgtgactttcaatgccaaacacaaactttcttgtaccctcaattaattgggtaacgtaggccatggatgatcaggacattctctccaagagggtacaagaaagtgacacaggtcaggatttaatttcccctcctctatcccctgttaggggaggtaaaacataaatgtagttaatacctgaattgtgaataagtgaaactttcgagactgccccagactaacatgaccttctcaccacactcgtagtacaaactgacagcacagaagaccccctccaggagaaaggacgacgggaagccaatgtaggacttacctggtttctctatcctatggttaaacctctggagctacgcagaccgtggcagcgataaatccacgtacgcaggctccaacaaagctcacacaatcggagaagtcacagtagctgcggctgcggcggcggcagcaacaactcctccctctgcttctcttttcccaccccccgccgcggcggccagccgcctttacccctccctccctcgactacccccacttccgggtgatgcccctgccggaagcagggccgccacgggaaagagagcgactggtcacgtgaaaaggaacgcgtggtctagagccagcttctcctgccccctgctgcccccgggccgacacgcagcctcgagtgggtctttgttagggtacgagtccactatcccaccccgcccccacgacaaaagcgaaaccagaaaacccatactaaaacagtgcctttgtcatctttagtttcctaacctcaggccaagatgtaacataaaagatccttataagtcatcttccacatagttcatctttgcctagcatgaaattcacgtgcatctgttagactgtgttaactgccaagatgtaacataaaagctccttataagtcatcttccacatagttcatcttcgcccagcatgaaattcacgtgcatcagttagactgtgttaactgccaagatgtaacataaaagctccttataagtcatcttccacatagttcatcttcgcccagcatgaaattcacgtgcatctgttagactgtgttaacttgcttcccgtagactgtgtagcctaattccagatgtaagtgccagaactatgaatttatcctcttccctccattgaaaaattacatcaagaggaaaatgtttataaattcataatttttatatgtgtgttgagggggtagggacgtcacttcaccaccttcatagcgccattccaagctctgaaccactcccccatttattcattcactcgtccatcattttacacacctagaagattccggtgatgcaaaagtgttacagtctctgttaccatgagttcatttagaaatgagatgcataaaatgtaaacaatgcaataaatggtacagaaaacatttgaaaaaagggtcattttattcttgctttccaacttaacattttgaaaagcagcaaaattctaggatttttaaaactatgaacattaacagtaaaaagagggagaggctccatctcacttatttcaaagcaagatgtggccttttcatatttcctttcatgaagtatctgtcataagatgtagaacaaaactaatcacaggactatttgtattttcatctggaaccatttgaacccagttcccacagaagagtatgaagcctaataatgttgcagaaatcaaaatagtacacaaaatacaaatatcaagtaaatatttgtaaaagacttagaacagcgtccggcacaaagtaagcatatttaagtgttgaaataatttccatcctagctgttgtcaagtccctattaagccttgacaggcaacatttaaaattacccatagatctacattttaggtctgtgattaagtatttcagaattattatccccctccacactcatccacataaatataaaattagcctcaggactcatcttcccaggcattattttgtagttgtcaatgtgtgcagccttaattattaagatacaaactcagccccaaatttaaaatcttaaaaatcacatcatatgaaatgaagatagcttttaagtgggtttccaaatattagcaagttggtttgtaactatattaacattgtgttaagcatccaaaagaaattcactaaaaggcaaaaccaaaaatatatctttttcagaagcagaacattgaatctactagctatctagtatttttatgtaaatactaaagtttatcactatgagctgcaagatcctctgccaaccatgtacattcttaggcactctaatatttaacataaaaacctagagagctatatatatattttgttgttgtttggttttgagagtcttgctgtcacccaggctggagtgcagaagtgtgatcataggtccttgtaaccttaaactccggggctaaagcgatccttgcacctcagcctcccaagtagttggaactatgggcacacaccaccacacctggctagtttttatttttttgtgt

SEQ ID NO: 1563199 - DNA, 4001 bp, Homo sapiens
caagattataaagaacgacaataagcactcaacttagttatgattattactcttatcatcaagatctacaaaaatccaagactagtaagaaaaactgacccttgtgtaaaattaattattctattcagaaattctatatacgtaatttgttcattctaaagaaactgagaagatccgacttcaaactatagtttcaaatgtagactttgtgaaacttagtaaaatctagaggtcataatttaactgtaaggtacaccatccatgcatatgaacatgagtgcctggtaattacaggccaacaagttatactgggtaccacttacgtgcctaataccccacagataaagatttgttgtatttgagcctactgacaaattcagaaaccaaggccacaatcgtgtacacaactagagatctacaatctaagaactgaagcatatctttccccaaggtaaagaaaatataatctactgcttgttcatgcagaaatacagacatacgtatcataggctcattgcccaattctacattctagctaaattgctctaaaaacatatgccaatctaagagttactcaaaggcacatttcgccaacttgaaatgcaattctgacccatgctccttgtaattttattttgccactggacgccaaggatgcatctccgagtaaaaaaattacttaattcacattgtgggatgaaaattcaaatgtcaaactgaaacgccagccagccacctgggtaaaagtgtatacatttcatattgactacccaaattttcagacccgtcaagaggcaaatcagaagcacacagaaaaacagcttcaacctaataaacgtgcttgattggttaagaggaggcctgccaggcattttcccttgcaataaatcttacttcgcatcagcccacgttaacctgcccttcatccttcatggaataaataagtaaataaagatagggcctaattactcctcgaaatttgcccagaaagtggggaaacacttgaggtcccattaaggctggacatcacaaaaagtagtatactagggtcctctggaagcaaaaccctgtgttaagtcccccctcgcctagaaataaacccaaggatatccttcaggatatggagtagaaaagatacctaaatacctggaactgcaccacaacccaatcaaaaaaaggcttgtctcctggggctgcagaaaaaaaatcccgcagggcccgggtgcttcccatctccagcaacctaaacgcctctaagtcgtcctgggatctcacatcctcgcgcccgcccacccctccccctcttctcaccctccccccgcttcttccccacgcagtttctaggcccaaagattagcaaaaatgaccgggataccaaagaccgcctccgacttcgaggtctcaatcccacaggcaccaaagaataaacagaggagcccgaccaagcgtcaccgtttaggggagattgcaagaagcgccccataccctaggccgcgccccccccacctccccccaccccatccccacccccacccccgtcggagccttgcgccgataccccgaaacccttctcacctaaagagaaaacgatgcctctttcggctaagcaacacacaggcctaacccaccaagcgaacgccttcccaaacacccgactcagacggtgcctgggcccagaccgctggggcccatgagacggggttgcgttttacctcatgggctcagcggtcatgttttcgcttgaacgccttgtcggcttctgtgattgctgggcgccgatctgcgctcccccgcgcccggttacgatagaaatgcactggagtcttagtcgtcactgtagctgctgctggaacctccccacagctcaaaggccgctaccactgccaccgccgcaggagccgcggaaacaaagcgacaccgctgccgccgccattttgttgggccgaggctcaggcaggagaattggcgcgtcctccctctttctctttccgtcagccattggctacctcctccaaagcacagagtcttattggctacggaaattcaccttctttgggggcctgttgctaaggcggtcgacgtcatttgatcccctccaccttttcgcagggggtccaatttagtcccaattgacctgaaagtgctagtgacatagtttgactttattttgaaaatgctcttttggtccaacctcttttttctttgacatattaacgaagtaataacagcaacctacatttattgagagtttactatatgctcggcactacactaatcctttatccgggttatctcatttaatctttacactctctgaggtagacaaacctacattttccagatgaggaaaccaagacacaaagtcccacagtagtggagccgagattcaccagacactcttaaccactaatctgtatggccatcctatgtaagtattttctttcctatatgctaggctatcatcaagttatttgctttcctagatgttttatacataatatttggcacaccaacatgcttggaaatgtatatgtgtataatatacttatatatatgtatatgtgtgcagacgacataagaccaacttgaacgctgcataaaattctttccatattgaataaagtgtctcttagaatacacacacacacacacacacacacacacacacacacacacacacgggccatttccccaatttgatgtgatgtttagctcacaaaccaatcaatttagatctgcttccttctcattacagaggaagcttggctggatgatctgtaaatgcctttcccgcttttatgatctataatttgattttacattggtaatctctgctaatcacaaacaagtcctctaaaatctaatcgcttcgaaatttatttccaaatttattctgccatgcatgctttagttcattctatttatttttcttgaaatatgcaagagctcctgtcggggttaggtgacagggttgctgctttctactgggatagcaagaggggagccttttttgaatgaaacactttgaaaatctgataggctcaggcaactttttttttttttttttctgagacagggtctagctctgtcacccaggctggagtgcagtggcgtgacgcagttcactgcagcctcgacctcctaggctcaagcaatcctcccacctcagcctctcaagcagctgggactgcaggcgcgtgccatcaagcccagctaattatgtatttatgtattggtatagatgaggtaggtctgtctgttgcccaggctggtctcaaacatctaagctcaagccatcctccaacctcgacctcccaaagtgctggagttacaggggtgagccaccgcgcctggcctcaggcaactttttaatcaacagacgcctgtacacattgcaattatatctttcaaatgtttgagttcagttggcaattatagaaaccagacctctgtacctgctatactgattttgtcttgtacacattaaatatcatttcaacatacaatttacaggagtcatttttttctccttggtaaatgcagtgaatttgaatgatgtactccatcacaaggcagcacagaaatgtgcttgctgttcaactgacttcactatgagaaaaatagtaaatagtcaacatgttaccaggttattggcgtttcgaacaaggaattggacaaaatgcacaaagcaaggaaagaatgaagcaacaaaagcagagacacgttgaaaatgaaagtacactccacaagactgcaggagctgccagagcacaggggctcaagacccccattacagaattttctgggatttaaatactctctagaggttttccattggttacttggtgtacaccctatgtaaataaagtagtggcccgcaatcagaggctaaagtgaagttacaagggtcacaccctatgcaagcatctaattggttgtggacagcaaccaatcagaggctaaagtgaagttacaaagttacactgctatacaaacatctg

SEQ ID NO: 1563200 - DNA, 4001 bp, Homo sapiens
gggagaactgtttatccttctaaaaccgttactatgatcaacacagacaagagacacttccctgaaaggttaaattgtttcatgagaaataaaagcaaccaaaatgagccacattatctacaatagaagagactatatggaaaaagttctatggcaagagctaattcgttggtatacaaaaagatccatgaaaaatgacccaattttagacacattagatattgcaggctcaaaaatcaaaggaacattttgaaagctaatttaaatttaattaattgctgaatgtctccttggctagtagttgaacgatcattatttagtcccacatctctctcgtcattttgtttgcaaactgtctaaaagccttatttcctcatctctttgacagatgaccaaaatggatcctacagtataatcacacaggataatgttggaaagtatgactatctaaattatttttaaaggcattatttttcccctttgattttcaaattctttctcataatttctaaaatggtgtcgacagcggcctgtactgtgccttcactgatgtcatcactgagatcactctcaattgctctcgaacttgttgttggcctttcgtgtaggtatgaactgtggcccggcagatctgactgttgttgctgctgcttctgttcctgctgatgcttttcaaaatagtcttcttttattttcttcggctgttctgaagcaggagttacacatgatgtctttggaagatcttgcgatgtgtttccggaactaccttgcatgcttaactcaatagtactgcggagatgttcatcttctctattggtttcttggcggcttagttcaagggccctctgaaaatcctcctcatcttggtctgatgttccagactcatcactttcttctgatactttttcaaggactgttttatagactctatgctctttttgttttactaatttttttccattaagttttggtgtatccatctcttcgacactgatgatctgcaggagttggtcagcttcacagtctggcagatcacccttgacaacaaatacagaatatgcttgttgttgtaatcgagccaagaaatttgcaaggcatgtatctgatattaattctggacccgccaagagagaattcaagttaaaccagtgttttccaaattttctaatagtaaaccagtgttgtttataattacatataaaagatctttcatttataggatcaatgccgagcttctgatattcaggattattgaaatggatgatctctaaaccccagaacttcaaggcattgcttattacctgaatggagaagaaaccggtatcatccatgttttctgaaggctgctgtaaaaatgcaagatactcttcactggtgactcctccttctgccattctcatcctctcttcttcatctagctgatgtgcaattgaggctaattccacagggctaaaatattctccttgcaatagattgttcagacagtgctgagcacacaggaaaccttcctgtttctcatgaaagatgaaatccatgttaattgtatccgtgagtttctgtaggtatgccggaagatgttgtatgcccagctatggcagttacctgggcagtttgtggatagccatgtaacagatgttaggttttcaaaccttatgaagaccatgggtttttgcaggtattcaggtaagagatggtatgtcacaaagcactattgtgaccaaggtggttttgccagtatccagtcaaaagctgatggtaaacctaaagtgaatatgggattttggagttatcccatagatgataatggtgacttgcaccatagtagtgcccgttggaatttcagatgtcctataaaaataatgtctctctaattatgcttgtcagcatggttttagtaagtaaataaaggtgaaatttaccacagcactaaacagaagatttggcaggtaactgggagagaaataacatgggctttaaccgaatggacaccatgggattttggaactgtctggctaagttatcatgatgtcactgaccacaataatagccatagaattttgtaggttccagtcaatagatgacaataaaactcacagtggcaatgaagatgggactttgctggtatcctagttagagattatgtggacctgaaaaacatgagtgaccaaatgatcttcagacatctagaaaactgatgatgatgtcctgaactcttttcttatccatgtgtttttacaggtgttcaggtaagaaatgtatgtgcctaacaaaagtagtaaccattagattttactgttttctagttcagagacaatctttctcaaacttagtagtgacaaagatattagcaggtatccgggtaagatatcacagagttcctcaccacagtagtaactatgggatttttgcaggagtccagtgaacagacagtgtgtgaaactactatgttgaccttggacttctcttgagtgtccaagtacacttagtggttgccctaatgattatagtgagtgtatgcatggaattatcaggggtccagatggaaggacatgtatcctgaccagggttgccaccatatgttttctcagcaggtagtcaagagatgatggtgtctctaactacaacattggcctcagaaccttaagattcaggtagagttcatggttcccctaacaatactagtcaccatgggattttttgaggtgcgtatagaagatgtatccctaaccactactgctgccatatggttttgcaagctcctatcaagagataatggtgaaactcatattagtcatttttgtaggaatttcatggaatctagctaagtgattatgtggaccttaaacacagtacagaccatctgctcttcagacatcgaggtaagtgacgatgatgtcctcaacatgtgttggtatcatgtgttttgcaggtattcgggtaaaaaaaaatgatacgggctctaccaataagtattggaatccatgagctttagcttaaccagttttctagtttagagatattgtgtgtttaactttaggagtgaatgagggattttcaggtatctaggcaagtgatcataactttcttcaccacagtaatgaccttgagatttttatagatgcccagacaataaatgacggtgcctgtaccaatgtgttgaccttcaggttctgccaatatccaggtagcattaatgggtttgtaaagatggaagtgacaaaagttatttgcagatgttctgctagaaaaagttgcattcttaaacacatctgtcacaatatgttttttcaggtttcagtctaaagatcaaggtaaccctaacaacggggattaacatggagctttgctggtatccaggcaagtgatgatgtgggtcttatcacacggtagacattgtgaccttcagaagtttacataagtgatgatgatacctctaacatttgtgttaccgtgtttttttgggtttttgcagatattcaggtaagaaattatagtgttcccataattcctatttaataatacacccttgctgcttactagtgcagagataatgttttgaaatctggctatgactgagggatttgtaagtttccaagtaaattatcgtactgtttctcatctcagtattgactatggtatttttacaggtacccagtcaagagattatgacatatccatggttttgacctggatattctgcaagtatcaaggtaaagttgatggttctcctactgctagtgattctcatgagatgtgtcatggtctaaatagaaaaagacgtatctctaaccatgggctgcctttatgggttttttaggtgctgtcagtggatggtggtgaaactaacaatgatagtgaacatggacttagctaaaagagagggaaaagatggtgtgagcctttacactttggagagcttcagatttcagttatctcggtaagcgttgatggtgcctgtaatactgtggttacaagaatgttgtttttatcaagaggcattc

SEQ ID NO: 1563201 - DNA, 4001 bp, Homo sapiens
ggtccttccttttcaggcccctgggaccgctgtctcacctgggggcacctgctccctctttcctgccactcctcaggcctctgctgcagcccctcctacacccagctcagtgagctgacctgaggggcccccacagtcctggggcctgaagctctcctcatacagctggggatgtggagacccaggcaggggctgtggcttgtccagggccacacagtgtcccagcctcggggccacaggctctggccaattctccacgggtccccctcccagtggctcccaggaccagccccaggaaggcagctgagcttctcaaagcctctagaggcaagacacccaacagctcctcacgatgaagtgtccttggccagggaggagctggcggtggtgcaggactcatcttggggacccaggctgggtggggtgcgtccccgggcacagcagagcaagcttcgcagctctgaggacacgctgctgctgaaagatgcatagatccaggggttggtgcagctgttgaggctggccagcaacatgagtagcacaaagggcgcccctgtggaggtggaggatctaggttgggttcaggatggctggtggggcacaggggcatgcggccaagcccaagtggccccgtcagccctagccacggctacacccaccttccagaggtgcctccgggtcccacgcggcccacagctgcaccaggaagaagggtgcccagcacagcacatagacgaccacaatcactagcgtcatcctcacagtcttggccacagctgctgacacgtgggctccctcaccggggctgcctgtccggcgtcccctgcggcgccccccaggcctctctgatggccctggcaccagactggcatgaatctcccggaagatgagcacctggcaggcggcgatacccagggtaggtgccacgaacaccatcagggcaatccaggtgacataggtgcgacggccccagggctccgcaaagcaggcccagcagtcagtgaccccgctgccaccttccacgttgcgctgggcgaagatgaagagctggggcaggctgagaaggagcgagaaggcccaagccactagcaccggccggttccagtgagccccacttccatggcggtacgccagcatgggacggcagatggcacggtggcggtccagcgtcatggccaggatcatgtaggaggaggcatacatgcccaccatctgcagatacttcacggcccgacacagggcatctggcccacggaagcggtcggtggccttccaggccagctggggcagcacttggaacagagccacggccaggtcggccaggcacaagtggccaatgaagacgtgtatgggtgcccagtggccccgccggccccgccgagctagggccgccagcaccaggccattgctcagggccacagccacaaagactatggagagcagcgccagctccgcccgggctagcagcgggtcccgggtgtccagtggcctctcctggctgctgttgctgggcaggctgggcagagagggatgcccaggcacagctgggaaggagtcgggaagagggcctggttagagagggtgctgtgcagggggactcaggcctgcctcccgtgcccccatccggacacccacttcctggctcctagcagaggggactccaggaaagccatgttatgagggatacacaccccaggctcatgcagtccagaaggaagggcagccccagccccagccccagccccagccctggcggggaagtggggctgtgctcccctccccactcattggcagcctggagagacacacccagaggtgagggtgaaggaggtctttagaaagaggggcttccctgaatcgtcaaacccactctgcccaccggactcatggaggggcaagccttaccggaagtggtggacgccatgagcatggtggggctggggcaggtgttctgagggcctggaggtgatgtgcggactcagcctctgcctgaggagcaagttcaatggcccagggtctctggactggagcccttatagagatgccagcatggcagatgcctgttggcgtgtgtgcacgtgtcggtggcagtatggccagtcctgggcagggaagattgagagggatggtcagacagacggatgcacagaacccaggatcccccaggcagcccatgagtcccgggtttgggagtgggcaccccagacagacacgcagaactcccctgccccaaccgaggccgagagaggccaccatccgagggctggggactgggcaggggggcaggcaggcgcagccccttacctggctgggctcctgggcagctgggcggtggcgtgaaggtggctgggtgctcagatctgctctccatcggctgccctgccctggcccagcccagcctctgggagtgacctggccaggaggggacttcctccccctccccctttcccccaggcctcccctggcctcctgtttcccttcctttccccagggcctccctggtcccggcccaggactccctcctcccactgccatagcctccacgcccaccctcaccctaccacgcccccctggttggattgtctgggttggcagtgctctgggaggtcacttagttcagcattcccattttataagtggggaaactgaggccagagagcggtgggtctggcccaggactgcgctgctttttcatgggagcttcacgcccccttcccaagttggggtcctcctgctcctcgctgggcccaggcaaggaaggggtgaaaacactttcgctgggcccctcccaggcccacgcaggcccctcctcctccccagttagggcccagttggccggagacgagggacaggaaagggaggagtggggcaggggccaagccaggcttcacgaacccctgtgagatccagggacacccccaccctcttcctcctgccccacctgcaactacctgtcctaggaagaggggctggggacctccgtgtgctcacgggctccctcccaccacacacaacctcacatgatacagccacacagccacaaacacacaacacagagacgctcgctcatgttcttgaacataccatgagtatggacgcaccttccctgtacctgagccctcctcctccctcccccaacacctctctccttcccctgtccccacaccccctccagcccccatcccagtagttctctttccactccccccgcacccaggcctggcttggctcagccgaggccagcccagcccagcccagcccaaggcagctgctttcttcctgtttgtctgtcttctctgttgcctgtgaagccagagaccaaaacagcctcacggaccaggcccaagtccggcccgcggccaaggcctcctcttcctgcccagagagcctggcagcaccctggcccctcccggccctgttagggtggtgggaacacagggtgggcattttccagagacagcgcacacaccacaccacatacatacatgcacacagccacacgccacacacacatgcacccaccacacacccatacgccacaccacacacacaccacaccatgcacacatatattacacaccacacacatgcacacatcacacactcccatacgccacacacccacacatgtacccaccacacagccatacacaccacatacgcacagccaacaccacacacgcacacacccgcagcacacacaggtgcacatcacaccccgcatctttgccatgtttttgcagagccccttgggggcaggctgcagagtgctggcaccccaggcctgacgcttcagctgcatctcctcagcgcatgcacatcctcatgctgtccccaataaccgcatgctgtcactaatctaggagcatagaaaaggccttcctaatgccacccagatcagtggaataggagatggcttccctcaactggcagagaatttggggaccctggctggggaataggaaagcaaggctccagcccctgcttggcccctgcccagt

SEQ ID NO: 1563202 - DNA, 4001 bp, Homo sapiens
cttcctggcattgtttcctgccaatccccttccagtgcctgcctaaataacttgtatggaacttggaaaaccctgctaagatatcaccatgtctgtgaagcctttccttatcccgcatctgaactacttctgtaccttgtgccaaacaaataatatactttatactaatgtcctccccattagatgtgagctcctcgatggcagagaattgcatcctattcatttctctgtactgctaacgtggttcagagtagattttcaatccatgcttattaaactgatctgaactgtgcttgccttctgactgtgtcagctggcaggtgatgccaagggtgtccaaagtttcctagctgagtatggagtgctcagtagaaatgttgaatcttgaagtatatctagcatagactgagacttccctgggatacttatcttccttatggacaactctagtcatgtggtataaatgcctacccagtattttgggaactctgaggacactggggaagagatacttaccgtaatggggaaatagtccctgatgtgggtccagacacaccagttccttacccaggccgaacgcctgccacctgaggcaaaagaagaagtaggggatgatgtcagtgtgtgccatcccatacattccacggactcagggattccctagcatggctctgctagagaggtgggaaaggaggagaccctaggatggtcctgtttggccgagctcctgtggctctgagaacttggatgaggggcctgtggtatggcgagtgggactctctggctgcaggttatgatggaacattcttctttctaggtctgtgagtcttacctcgctctggggtcttccagtccaggaacaaccaggcaaagtaaagcactggtagcggccacaaggatgtaaacagcaggtagacgaacaatggctgcaagatccaaactgatgagggaccaggttagaccaaatttgtgctgccagcagaacttgaccatgcccagtcccatcaccagctctccacattacctaagcctctggtcctggccctcaacacaatccaggtcctgttcatcatccatgtctacttgtccttcaaacttttcctctatcatttaccatacagaagccctatttctctgcctgtctgtcatccctgtccacctgcttccctgtacagccactacctctgtactcctgctctctacttcccaccagttttttttcctcctgcccccatttggtcaccatctttttcctcttgtctcctgtctccctccctatccgtcatccctcgttaagccactagcccactctccctcacccctatactatctatatcttcctacacgctgcccatccagcatctgcatccttctagtatttcctatccactatgcttgtcctcttgcccattcaccattctttccaatgacactgtcttcccgcatgctaccaccaccccactcccagaatagacaactctatggttcagacacaggctatacttctttaagtctgggatgctaatgtttcctctgtcctattccccatgatcataagggagcattccctgggcctcacttttcctctctagatagtaaggattaggaagtggctgaaattaactagatctactcatatccatcatgaccctgttccaccccccgccccctcccactacatattctcactgtctcctggggctctatctcattcttctccagggcactcatggaactcaagactccttggttttactctctagtacaatcttagatgatggaaaggctcaaaatgagacttcacatggccctaaaagtcaccctagatctggccctggcttctgactctggcttcttgctatgcactcttgggtcaatactcacagatggcaaggtagctcaaaggccactgcagaagcatcagactctggaagtgactaggctgcttggaatgagccatgattctcgggagcctgagggaggcaaagatctcagaacagtgttccaaccaaaggtgccaccagcctctggaagttcacttaatagtgaatgcatataactatgaggagtttgcacctgccctcttccctcttgtccttccctgcccccccacccaccgcaggggcaggctctgaagtacaaggactgccccgtcaggtctggtccagctcatttgccctttgactctctttcctaggattattaggacatcaagatggagaaaggtgagaatgactgccatgtagtcagagtgacacagggacctagagaaggtgaaaccccctcacaggctactcagaaactatagggatttgtgacctttgggagatgactgctgggaagggagttctggggatttgtgatgtggggagcacctgggatttggcttttgttgccctgaagcagcctgctttggggctgccccacctttaactttaattataaaaatttccaaacacacaaaaagctagaagatgcaacaaatttttatcttcatgttcatcttcaacaactattaatatttttccatacttgtttcatttatctccccaccttttttttttcttggagtattttaaagcaattctaagatagtgtgtcatttcacccctaaatacatcactatgcatctacaaaaaatacagatgttttcttccatattacccttaacaaatttaataattccttaataatatctaacatccagtccatattcaaatgtctttctatagttggccaatttgaatcagaatccaaacaaggtccactggttatatttggatgttatgtgtcttatgtctcagtctcttgctctctgtctgtcattataaaatagaacccagatacagagagccacttaaaacaaatgtatgggttaatgaattattataagacaaacatcttgtaaccaccacttgatgaagaagatgaacttttctctccaccccaggatgctctccatgtgccccatttcaatcacaatccacttcctcctcccaaagtaaccattatctttgacatttagagtcatcttttccttgcatttctgtggttttcttacctaagtgtacttccctaatgactatggtttagtcttccccattttaaatattgatatgtccttgaagttttctctctctcttttttatggttttttttcttttttgaggcaggatcttactctgccacccaggctggagtgtagtggcgcaaacacagctcactgcagcctcaatctcccaggcttaagtgatcctccagcctcagcctcctgagtagttgggaccacaggtgcgcaccatcacgcctggctaattttttattttttgtagagatggggtgtcaccatgttgcccaggctggtcttgaactcatgagctcaagaaatcctcccacctcagcatcccaaagtgctgggattacaagcatgagccatcatacctggccatttttactttttaatttggaatacttttagatttatgagagagttgcaaagatagtacagagagttccctacacccttcgtgtagcttcccctttatgttaacatcttataaaacaatggtatatttatcacaactaagaaaccaatattggtgcatttatatttactaaacaccaggttttatttgtattgtatcaatttttttccacaaatgtccattttctgtcccaggatcccattggaatctcacattgcatttaatcatcatctctcctttgtctcctcctcctttgacagtgtctctgtttttattttattttattattattttttaaccacatactcagattgggttagtttctcggtctttccgtgacttccatgactttggtgcttttgaagagtttaagtcggttccccctccatccctttcctttccttatgctttagctattgaagaacccacagcatttgacctgtagaatttcccacagtttggattttgcttatctcatacttacttagggtgcttcagcatgttcctctgtatttc

SEQ ID NO: 1563203 - DNA, 4001 bp, Homo sapiens
tctctgccccacctgcccccctgccagctcacactgggacctgatccctcagtcttgcttcctccatttctcccgtgcccccaccccccatcttcaagtcctattcattctactccaatttcttgaatctcccctcttctttcctcttctctgcatcaccatcactaccggcctggtccaaattaccgccatctggattattgcaacagcctcctacctggcattgccccttccacttctatcttcctataatcagttgacttcacagagctagagtaatctctgatgccatcaccctgtgtcagtctccctcatggctccacatggctctcaaaaaaagtccaaactccttcccatggtttacaaagccctacacaatctgtcccctgcctgtttctccagtctcttccttcttccctctcttgtttgttcattcattcattcaataaatatatatcgagcaccaattctgtgcttctcaccctccacctcacttaaccactggcagctccttgaatgcattatgtgccctttgccatcctagcttttccatgtgttgcccactctctgccccaaatgctcttcctttcttcacctatttcctatttgtccttcaagagtcaactcaaattcaagagaaaaatgggcagaggtcataaatgggcagttaacagaaaaagaaatactaattgctgataaacatgaaaagatgctcaaactcatcagtaattaaggacgttcaaaatgaggcgacagctcatggtttcttgcctatcacttctgggtggaggtagtaaggactgtgaatgagttctccattcactttccctcccatgctgtggtaatccctcaagccccattttgcagcgacacaatttggtggtgcctccgtcagcctgaatatcaatgtccacagtgagcggtgactcccaccaacctatgttggacattcagcatgaacaagaaataaacatttgctgggttaagccactgagatttcagggtgaatttatcagcacggcatacctagaccatcctgattaatacaccctgaatgctcccactttgcaaatgaggaaaacaagactcagaaaggataaataccttgctaagaattacacagatagtaagtagtagaactggaatttgaaaacaggtgaggtgaggtaaggaatgcccacccttcctattcactggcgtgcctctgtgccagctctgtgcaccaaggcctatctgcattctttattcctagatagcttgcaaggtcacttaattcatttccctgactccagccagtactcacctgaaccactggaaaggcaagaatgttttccaggaccccttcccacagtgatgatttgtttcagcatttagaacacagtggccagcatagaaataactttcacaaagtgtttgtagtgtaagcgttggaagacatggatggataaattgtcgaattcctcaggatgaggtttccagagcctcggtctgccacctgacccaactatctctaattggtggtttgcttgagtccctgtgattgcagccaagcccttttccttggctagcctcagtggaactgctcctcatcttcccaaagaatgccctctacaccccaatgtagaccgagaagggctcacacctgcagcaaagtccatgtgcatagacgtgcatatacacacccctgcataggcacacacccatatgcacacacacatgcccacagggacactcacagatcccacaaataccatggccaggtgggtcaggccagaggctggtgttaccaaccttcctggttttactggaacaaccctagtttgaccattgaacatcctgcaaccctaaaatccttcagtctcaggcaagccaggatggttggtcaccctaccaaaggctgaagactcactgataagcaaggcactgaaggaccactggaaaacagcaaagacatccagggcagtcttgaggtccttcttagagggcaagagcattgtgcccagcgtcccagtggctccaggtaagcactgttcagctgcccagccctgattgctcaggagtctgtgatgtttcctctcttaatgttttcttccccagcctctggctagcctccgcccctgtaccacccctccacagaattacaggaccatataatgcctctgcttatccagttccttccagctgcccactcacctgtacttttacccacttgggtattgcctggactgagattgtgacactcctttgcgcacttggctagagaaatgtgatgaaaccctggtgtgaaagttagtgtgggcgtgcagctgacaagaggcctccagggccagtctggatggtggagagtgatgggcaggaaggagcccagggctcaaatgggacacagggcttgcatttctgtttctgaggcccaactgtctatggtctctcagtgacaatgggattggagggcagagggaaggaggtcacaggcaaggccttagaaataccttcagccttttagtcagtctgggagaactcattactcacattgaagagacatcacatgtatgtctgtgagctatcataggtactgaataaacctattattgaatgaagaaacaaatattggtgtatattattctgtgtacatgaaattttagaataggcaaaaccaatctatagtgaaacaaatcacagcagtggttacctgtgcttggggattgactaggaaggggcatgatggaaacctttaggggtaacagtgacgttctctgtcttgataggactgtgagttacacagatcaaaacctcattactcagtgagtatacacttaaaatgtgtacgtttcactgcctgtggattttacctcgaaagtaaaaaaaaaaagttgaactctcattaattctgaagtgtttaggggtgaagaatactaggctgggcatggtagctcacacctgtaatcccagcactttgggaggccaaggcaggaggatcacttgaggccaggaattagagattacagtgagctatgaccgtgccactgcactccagcctggatgacagagtgagacactgtctctaaaaaaacaaaacaaaaaagagtgctgatgtctgcaatttactttgaaatgcatgtaaaatatattgatggatggatacagggatgtactgatggataaatatgtaataaatcaaacaaagattgatttattaaatctagtaaaatatataaatattttatatttttaatattttaatattttttatattttaatatatttttatatattaatatttatatataatatattaaatatatttttatattttaatattttatattttatatttctgtacagataacataaaatattatctgtacaatctaggtggtgggtattcactgtacaattctttcaactactcggtaggtttgaatttttttataatagaattttgaaaaaagagttccctcaaggtcatactttgggaggccgaggcaggcagatcacctgaggtcgggagttcgaaaccagcctgaccaacatggagaaaccccatctctactgaaaaatacacaattagccgggcgtggtggcacatgcctgtaatcccagctactcaggaggctgaggcaggagaatcgcttgaacccaggagatggaagctgtggtgagctgagatcgcaccattgcactccagcctaggcaacgggagcaaaactctgtctcaaaaaaaaaaagtagtggctcgctcctgtaatcccagcattttgggaggccaaggtgggtggatcacatgaggccaggaattcgagaccagcctggccaatatggcgacaccccatctctactaaaaatacaaaaaattagccggacatggtggcgtgtgcctataatcccaactactctggaggatgaggcatgagaatcacttgaacccgggaggcagaggttgcagtaagctgagatcatgccactgcactccagcctgggcaacagagcaagactctgtctca

SEQ ID NO: 1563204 - DNA, 4001 bp, Homo sapiens
tccacaaatgctttgggatgcagctctaagaagagacttcagaagtgtttacatattgttcaaatcaacaagaagccctcatcatcagggctagagttgaatatgccaatcactgaaggcaatgatatttgtttgaatccggacccaacaaggtaccgatttggcattcggtagataaacgtcttaaatccagcttattctggaagctcccccttccctctccctctttcatttgcttttccagtttcctttgtgtagaaatcagattgtctgtcctctaaagcttcccagattaaagctccccggggccctctatctctgcacgtcttgtcaactgtacgaaggtgtggttttctacaagaatcctcctcagacagcactgcatactttctatggtatcacatcaaagataatttttcacgaaaaaacggcttttaaaaatacctgtggagatttggccttatttgtaatatcgtaatttaaatagggatgtgttcaggtattatacataattaaaattaatctccaattcacttttaacaggtcctctgttcattaaaagggaatatggcttcatcctccacaggctgagtaatgttcatgcagccactgcgcaataccagtgagactagttaggaggacaagagtcaccaaatcagcaacaacgtgacccagtggtgcaagtcttccgaatcccacgctaccatcccagcaccccgtggaccaagagtgggtgggagggcatcatttccagaactgtaacatagatcttcctgcctctcgggggcattctgaagaccagaaggcaggggacacaggaaaaggaactgagcaagtcatgacgaagcagaaccctgggaagggttggcaataacaaacacaacccctgccacccccaccccagacaggttctacctgttccatcgggtcccaattccagggtccaccagctgcacacaccagtcccagggctagggcacaggcaccctcctgcctaactcgcctgcttgctccataggccataccttttaggagaaatgaagggaatgcagagaagcaacacaacaaagacctccgcatagaggaaggtggcaactgcagtccactgcagactcatcctgttgctagaaggtttcccacaggaagatgtgagcttgtttcctggcagggcacaaaaggtacgggacttgtaagcgctgggcagccaagaacatccagttcagttaccctgcgaggctggggccgccactctccaccctgaccccctgcactttgcttcaaagtctctgatgcgctggcggaagcagggctccactcggcagggcctcttggccagcagcgttcacaggccccacaaacttccgttcgctggtcaattacctgccccctccagcacgtgtgtcaacacgtccagagcggcctctcccgacgatccctgccccaggaagcccgagatttccgacgcccgtttaactgaaaggcgttcttcgggaagagcagtgccagggcaccaagaggaggacgcctcggcacccatcgggcgctcccttccccgccaggcagaactcagccgcagaggcgggcgctctgcgggcccaaatccccgctaccaggcaggcccaaggccgcacctagtccaagcgctgccgacgcccccgcctcccaccgtccccacggcgcccgcggagagaaaccggcacctccctcgaggatccagcggccttccgcccggggccgcttcgcctccggtgggctggaggcccgcaagagcgactcctagagggcaggattcgggaccaagcgcaaaggcaggtctcgaccaagcacctcaaggccccatacggagaaagttctagacgcagtatcctcagaagccaggggtccttacagtagccctcgcgggccccagcgcccacccagagcgaggggcctccgacttggccccggcctggcacaccgtcccggaggcccatcccggccgctcctccaggtggggcttcaccgccccccgccccgcccccgagaccagcttctagaggcgccgcccggtttcccctcgcccctgcctctcacacgcaggtaggctgcgggccccgagattccccggcccccgggcctccccgcgccgctcgcctctctccctcgtcgatgggccggggagcctccgcggtcccggagcccagcccggcgcgcggagcccgctcaccgagtttcccacagtcaacgtgcaggccccgccgcagcaacagaactctcccacagcagccccggccccgcccctcataccgcggccggaaaccggaagcgcccgccgggcaccgcccaccagccctcgcgaggccccggaggctccgcccacctccgcttcccaccccgccccggagcggagggccggcgctccgagcgggagaggaagaggcgcctcgggctccgggcgagcagggcggggtggagcgagcacgcgggcggggcggggcggggctttgtcgggccggcgagggccgcttctctagtccgcgcggccgtcccacgtctctgtggtgcgggaggggccccgccgaggggcgagaacgggaggtgggggtgtgggcgggccccgccgaggggcgagaacagggtggggctcccgcgcccggactccgcccctcgcccctcctccgcctcctccccttcccccgactcgcccctggggaagagtgggtggggattctgggccggtggaggagtcactgtcgcttcagccaggctgcggagcggacggacgcgcctggtgccccggggaggggcgccaccgggggaggaggaggaggagaaggtggagaggaagagacgccccctctgcccgagacctctcaaggccctgacctcaggggccagggcactgacaggacaggagagccaagttcctccacttgggctgcccgaagaggccgcgaccctggagggccctgagcccaccgcaccaggggccccagcaccaccccgggggcctaaagcgacagtctcaggggccatcgcaaggtttccagttgcctagacaacaggcccagggtcagagcaacaatccttccagccacctgcctcaactgctgccccaggcaccagccccagtccctacgcggcagccagcccaggtgacatgccggtgctctccaggccccggccctggcgggggaacacgctgaagcgcacggccgtgctcctggccctcgcggcctatggagcccacaaagtctaccccttggtgcgccagtgcctggccccggccaggggtcttcaggcgcccgccggggagcccacgcaggaggcctccggggtcgcggcggccaaagctggcatgaaccgggtattcctgcagcggctcctgtggctcctgcggctgctgttcccccgggtcctgtgccgggagacggggctgctggccctgcactcggccgccttggtgagccgcaccttcctgtcggtgtatgtggcccgcctggacggaaggctggcccgctgcatcgtccgcaaggacccgcgggcttttggctggcagctgctgcagtggctcctcatcgccctccctgctaccttcgtcaacagtgccatccgttacctggagggccaactggccctgtcgttccgcagccgtctggtggcccacgcctaccgcctctacttctcccagcagacctactaccgggtcagcaacatggacgggcggcttcgcaaccctgaccagtctctgacggaggacgtggtggcctttgcggcctctgtggcccacctctactccaacctgaccaagccactcctggacgtggctgtgacttcctacaccctgcttcgggcggcccgctcccgtggagccggcacagcctggccctcggccatcgccggcctcgtggtgttcctcacggccaacgtgctgcgggccttctcgcccaagttcggggagctggtggcagaggaggcgcggcggaagggggagctgcgctacatgcactcgcgtgtggtgg

SEQ ID NO: 1563205 - DNA, 4001 bp, Homo sapiens
ggaccccagacctcacatcatttccatccacaaatgctttgggatgcagctctaagaagagacttcagaagtgtttacatattgttcaaatcaacaagaagccctcatcatcagggctagagttgaatatgccaatcactgaaggcaatgatatttgtttgaatccggacccaacaaggtaccgatttggcattcggtagataaacgtcttaaatccagcttattctggaagctcccccttccctctccctctttcatttgcttttccagtttcctttgtgtagaaatcagattgtctgtcctctaaagcttcccagattaaagctccccggggccctctatctctgcacgtcttgtcaactgtacgaaggtgtggttttctacaagaatcctcctcagacagcactgcatactttctatggtatcacatcaaagataatttttcacgaaaaaacggcttttaaaaatacctgtggagatttggccttatttgtaatatcgtaatttaaatagggatgtgttcaggtattatacataattaaaattaatctccaattcacttttaacaggtcctctgttcattaaaagggaatatggcttcatcctccacaggctgagtaatgttcatgcagccactgcgcaataccagtgagactagttaggaggacaagagtcaccaaatcagcaacaacgtgacccagtggtgcaagtcttccgaatcccacgctaccatcccagcaccccgtggaccaagagtgggtgggagggcatcatttccagaactgtaacatagatcttcctgcctctcgggggcattctgaagaccagaaggcaggggacacaggaaaaggaactgagcaagtcatgacgaagcagaaccctgggaagggttggcaataacaaacacaacccctgccacccccaccccagacaggttctacctgttccatcgggtcccaattccagggtccaccagctgcacacaccagtcccagggctagggcacaggcaccctcctgcctaactcgcctgcttgctccataggccataccttttaggagaaatgaagggaatgcagagaagcaacacaacaaagacctccgcatagaggaaggtggcaactgcagtccactgcagactcatcctgttgctagaaggtttcccacaggaagatgtgagcttgtttcctggcagggcacaaaaggtacgggacttgtaagcgctgggcagccaagaacatccagttcagttaccctgcgaggctggggccgccactctccaccctgaccccctgcactttgcttcaaagtctctgatgcgctggcggaagcagggctccactcggcagggcctcttggccagcagcgttcacaggccccacaaacttccgttcgctggtcaattacctgccccctccagcacgtgtgtcaacacgtccagagcggcctctcccgacgatccctgccccaggaagcccgagatttccgacgcccgtttaactgaaaggcgttcttcgggaagagcagtgccagggcaccaagaggaggacgcctcggcacccatcgggcgctcccttccccgccaggcagaactcagccgcagaggcgggcgctctgcgggcccaaatccccgctaccaggcaggcccaaggccgcacctagtccaagcgctgccgacgcccccgcctcccaccgtccccacggcgcccgcggagagaaaccggcacctccctcgaggatccagcggccttccgcccggggccgcttcgcctccggtgggctggaggcccgcaagagcgactcctagagggcaggattcgggaccaagcgcaaaggcaggtctcgaccaagcacctcaaggccccatacggagaaagttctagacgcagtatcctcagaagccaggggtccttacagtagccctcgcgggccccagcgcccacccagagcgaggggcctccgacttggccccggcctggcacaccgtcccggaggcccatcccggccgctcctccaggtggggcttcaccgccccccgccccgcccccgagaccagcttctagaggcgccgcccggtttcccctcgcccctgcctctcacacgcaggtaggctgcgggccccgagattccccggcccccgggcctccccgcgccgctcgcctctctccctcgtcgatgggccggggagcctccgcggtcccggagcccagcccggcgcgcggagcccgctcaccgagtttcccacagtcaacgtgcaggccccgccgcagcaacagaactctcccacagcagccccggccccgcccctcataccgcggccggaaaccggaagcgcccgccgggcaccgcccaccagccctcgcgaggccccggaggctccgcccacctccgcttcccaccccgccccggagcggagggccggcgctccgagcgggagaggaagaggcgcctcgggctccgggcgagcagggcggggtggagcgagcacgcgggcggggcggggcggggctttgtcgggccggcgagggccgcttctctagtccgcgcggccgtcccacgtctctgtggtgcgggaggggccccgccgaggggcgagaacgggaggtgggggtgtgggcgggccccgccgaggggcgagaacagggtggggctcccgcgcccggactccgcccctcgcccctcctccgcctcctccccttcccccgactcgcccctggggaagagtgggtggggattctgggccggtggaggagtcactgtcgcttcagccaggctgcggagcggacggacgcgcctggtgccccggggaggggcgccaccgggggaggaggaggaggagaaggtggagaggaagagacgccccctctgcccgagacctctcaaggccctgacctcaggggccagggcactgacaggacaggagagccaagttcctccacttgggctgcccgaagaggccgcgaccctggagggccctgagcccaccgcaccaggggccccagcaccaccccgggggcctaaagcgacagtctcaggggccatcgcaaggtttccagttgcctagacaacaggcccagggtcagagcaacaatccttccagccacctgcctcaactgctgccccaggcaccagccccagtccctacgcggcagccagcccaggtgacatgccggtgctctccaggccccggccctggcgggggaacacgctgaagcgcacggccgtgctcctggccctcgcggcctatggagcccacaaagtctaccccttggtgcgccagtgcctggccccggccaggggtcttcaggcgcccgccggggagcccacgcaggaggcctccggggtcgcggcggccaaagctggcatgaaccgggtattcctgcagcggctcctgtggctcctgcggctgctgttcccccgggtcctgtgccgggagacggggctgctggccctgcactcggccgccttggtgagccgcaccttcctgtcggtgtatgtggcccgcctggacggaaggctggcccgctgcatcgtccgcaaggacccgcgggcttttggctggcagctgctgcagtggctcctcatcgccctccctgctaccttcgtcaacagtgccatccgttacctggagggccaactggccctgtcgttccgcagccgtctggtggcccacgcctaccgcctctacttctcccagcagacctactaccgggtcagcaacatggacgggcggcttcgcaaccctgaccagtctctgacggaggacgtggtggcctttgcggcctctgtggcccacctctactccaacctgaccaagccactcctggacgtggctgtgacttcctacaccctgcttcgggcggcccgctcccgtggagccggcacagcctggccctcggccatcgccggcctcgtggtgttcctcacggccaacgtgctgcgggccttctcgcccaagttcggggagctggtggcagaggaggcgcggcggaagggggagct

SEQ ID NO: 1563206 - DNA, 4001 bp, Homo sapiens
ccagtgagactagttaggaggacaagagtcaccaaatcagcaacaacgtgacccagtggtgcaagtcttccgaatcccacgctaccatcccagcaccccgtggaccaagagtgggtgggagggcatcatttccagaactgtaacatagatcttcctgcctctcgggggcattctgaagaccagaaggcaggggacacaggaaaaggaactgagcaagtcatgacgaagcagaaccctgggaagggttggcaataacaaacacaacccctgccacccccaccccagacaggttctacctgttccatcgggtcccaattccagggtccaccagctgcacacaccagtcccagggctagggcacaggcaccctcctgcctaactcgcctgcttgctccataggccataccttttaggagaaatgaagggaatgcagagaagcaacacaacaaagacctccgcatagaggaaggtggcaactgcagtccactgcagactcatcctgttgctagaaggtttcccacaggaagatgtgagcttgtttcctggcagggcacaaaaggtacgggacttgtaagcgctgggcagccaagaacatccagttcagttaccctgcgaggctggggccgccactctccaccctgaccccctgcactttgcttcaaagtctctgatgcgctggcggaagcagggctccactcggcagggcctcttggccagcagcgttcacaggccccacaaacttccgttcgctggtcaattacctgccccctccagcacgtgtgtcaacacgtccagagcggcctctcccgacgatccctgccccaggaagcccgagatttccgacgcccgtttaactgaaaggcgttcttcgggaagagcagtgccagggcaccaagaggaggacgcctcggcacccatcgggcgctcccttccccgccaggcagaactcagccgcagaggcgggcgctctgcgggcccaaatccccgctaccaggcaggcccaaggccgcacctagtccaagcgctgccgacgcccccgcctcccaccgtccccacggcgcccgcggagagaaaccggcacctccctcgaggatccagcggccttccgcccggggccgcttcgcctccggtgggctggaggcccgcaagagcgactcctagagggcaggattcgggaccaagcgcaaaggcaggtctcgaccaagcacctcaaggccccatacggagaaagttctagacgcagtatcctcagaagccaggggtccttacagtagccctcgcgggccccagcgcccacccagagcgaggggcctccgacttggccccggcctggcacaccgtcccggaggcccatcccggccgctcctccaggtggggcttcaccgccccccgccccgcccccgagaccagcttctagaggcgccgcccggtttcccctcgcccctgcctctcacacgcaggtaggctgcgggccccgagattccccggcccccgggcctccccgcgccgctcgcctctctccctcgtcgatgggccggggagcctccgcggtcccggagcccagcccggcgcgcggagcccgctcaccgagtttcccacagtcaacgtgcaggccccgccgcagcaacagaactctcccacagcagccccggccccgcccctcataccgcggccggaaaccggaagcgcccgccgggcaccgcccaccagccctcgcgaggccccggaggctccgcccacctccgcttcccaccccgccccggagcggagggccggcgctccgagcgggagaggaagaggcgcctcgggctccgggcgagcagggcggggtggagcgagcacgcgggcggggcggggcggggctttgtcgggccggcgagggccgcttctctagtccgcgcggccgtcccacgtctctgtggtgcgggaggggccccgccgaggggcgagaacgggaggtgggggtgtgggcgggccccgccgaggggcgagaacagggtggggctcccgcgcccggactccgcccctcgcccctcctccgcctcctccccttcccccgactcgcccctggggaagagtgggtggggattctgggccggtggaggagtcactgtcgcttcagccaggctgcggagcggacggacgcgcctggtgccccggggaggggcgccaccgggggaggaggaggaggagaaggtggagaggaagagacgccccctctgcccgagacctctcaaggccctgacctcaggggccagggcactgacaggacaggagagccaagttcctccacttgggctgcccgaagaggccgcgaccctggagggccctgagcccaccgcaccaggggccccagcaccaccccgggggcctaaagcgacagtctcaggggccatcgcaaggtttccagttgcctagacaacaggcccagggtcagagcaacaatccttccagccacctgcctcaactgctgccccaggcaccagccccagtccctacgcggcagccagcccaggtgacatgccggtgctctccaggccccggccctggcgggggaacacgctgaagcgcacggccgtgctcctggccctcgcggcctatggagcccacaaagtctaccccttggtgcgccagtgcctggccccggccaggggtcttcaggcgcccgccggggagcccacgcaggaggcctccggggtcgcggcggccaaagctggcatgaaccgggtattcctgcagcggctcctgtggctcctgcggctgctgttcccccgggtcctgtgccgggagacggggctgctggccctgcactcggccgccttggtgagccgcaccttcctgtcggtgtatgtggcccgcctggacggaaggctggcccgctgcatcgtccgcaaggacccgcgggcttttggctggcagctgctgcagtggctcctcatcgccctccctgctaccttcgtcaacagtgccatccgttacctggagggccaactggccctgtcgttccgcagccgtctggtggcccacgcctaccgcctctacttctcccagcagacctactaccgggtcagcaacatggacgggcggcttcgcaaccctgaccagtctctgacggaggacgtggtggcctttgcggcctctgtggcccacctctactccaacctgaccaagccactcctggacgtggctgtgacttcctacaccctgcttcgggcggcccgctcccgtggagccggcacagcctggccctcggccatcgccggcctcgtggtgttcctcacggccaacgtgctgcgggccttctcgcccaagttcggggagctggtggcagaggaggcgcggcggaagggggagctgcgctacatgcactcgcgtgtggtggccaactcggaggagatcgccttctatgggggccatgaggtggggcaggttggggtgccgggcacggagggaagcgtgtggcagggaggcccgggggcaggcagccgtgagcggtggggacagtctggggcgggccggggctgatgccaaaggtgtgggcaggccatgggagagccgggctggggtgggcagggcctttgggcagccgtggactcaggcgcggcagtggagaggcaggaaggctgggtggggactgtcctgtgctggttgcctgcacgctcgaggccacttctgcttcctctcctcctcaaggaggttgtcctggccttagagctgcgatcctagcggtttgagcctcgagagctcctgcccgccccactcctgcagccagccaggaggagacgcctgccattcatgagcggggaccgagggacgcagcctgctgcctagcccctcctgggcccttgggccctttgaaggccggcgtccagcagagctggctggccaggcaggccggcattatgggcatgactcagcccaagcggaggttaatgagcagcgcccagcacagcagtgggacttggggtcaaggccacccccgcctgagcccacaggcctgc

SEQ ID NO: 1563207 - DNA, 4001 bp, Homo sapiens
agaaatcagattgtctgtcctctaaagcttcccagattaaagctccccggggccctctatctctgcacgtcttgtcaactgtacgaaggtgtggttttctacaagaatcctcctcagacagcactgcatactttctatggtatcacatcaaagataatttttcacgaaaaaacggcttttaaaaatacctgtggagatttggccttatttgtaatatcgtaatttaaatagggatgtgttcaggtattatacataattaaaattaatctccaattcacttttaacaggtcctctgttcattaaaagggaatatggcttcatcctccacaggctgagtaatgttcatgcagccactgcgcaataccagtgagactagttaggaggacaagagtcaccaaatcagcaacaacgtgacccagtggtgcaagtcttccgaatcccacgctaccatcccagcaccccgtggaccaagagtgggtgggagggcatcatttccagaactgtaacatagatcttcctgcctctcgggggcattctgaagaccagaaggcaggggacacaggaaaaggaactgagcaagtcatgacgaagcagaaccctgggaagggttggcaataacaaacacaacccctgccacccccaccccagacaggttctacctgttccatcgggtcccaattccagggtccaccagctgcacacaccagtcccagggctagggcacaggcaccctcctgcctaactcgcctgcttgctccataggccataccttttaggagaaatgaagggaatgcagagaagcaacacaacaaagacctccgcatagaggaaggtggcaactgcagtccactgcagactcatcctgttgctagaaggtttcccacaggaagatgtgagcttgtttcctggcagggcacaaaaggtacgggacttgtaagcgctgggcagccaagaacatccagttcagttaccctgcgaggctggggccgccactctccaccctgaccccctgcactttgcttcaaagtctctgatgcgctggcggaagcagggctccactcggcagggcctcttggccagcagcgttcacaggccccacaaacttccgttcgctggtcaattacctgccccctccagcacgtgtgtcaacacgtccagagcggcctctcccgacgatccctgccccaggaagcccgagatttccgacgcccgtttaactgaaaggcgttcttcgggaagagcagtgccagggcaccaagaggaggacgcctcggcacccatcgggcgctcccttccccgccaggcagaactcagccgcagaggcgggcgctctgcgggcccaaatccccgctaccaggcaggcccaaggccgcacctagtccaagcgctgccgacgcccccgcctcccaccgtccccacggcgcccgcggagagaaaccggcacctccctcgaggatccagcggccttccgcccggggccgcttcgcctccggtgggctggaggcccgcaagagcgactcctagagggcaggattcgggaccaagcgcaaaggcaggtctcgaccaagcacctcaaggccccatacggagaaagttctagacgcagtatcctcagaagccaggggtccttacagtagccctcgcgggccccagcgcccacccagagcgaggggcctccgacttggccccggcctggcacaccgtcccggaggcccatcccggccgctcctccaggtggggcttcaccgccccccgccccgcccccgagaccagcttctagaggcgccgcccggtttcccctcgcccctgcctctcacacgcaggtaggctgcgggccccgagattccccggcccccgggcctccccgcgccgctcgcctctctccctcgtcgatgggccggggagcctccgcggtcccggagcccagcccggcgcgcggagcccgctcaccgagtttcccacagtcaacgtgcaggccccgccgcagcaacagaactctcccacagcagccccggccccgcccctcataccgcggccggaaaccggaagcgcccgccgggcaccgcccaccagccctcgcgaggccccggaggctccgcccacctccgcttcccaccccgccccggagcggagggccggcgctccgagcgggagaggaagaggcgcctcgggctccgggcgagcagggcggggtggagcgagcacgcgggcggggcggggcggggctttgtcgggccggcgagggccgcttctctagtccgcgcggccgtcccacgtctctgtggtgcgggaggggccccgccgaggggcgagaacgggaggtgggggtgtgggcgggccccgccgaggggcgagaacagggtggggctcccgcgcccggactccgcccctcgcccctcctccgcctcctccccttcccccgactcgcccctggggaagagtgggtggggattctgggccggtggaggagtcactgtcgcttcagccaggctgcggagcggacggacgcgcctggtgccccggggaggggcgccaccgggggaggaggaggaggagaaggtggagaggaagagacgccccctctgcccgagacctctcaaggccctgacctcaggggccagggcactgacaggacaggagagccaagttcctccacttgggctgcccgaagaggccgcgaccctggagggccctgagcccaccgcaccaggggccccagcaccaccccgggggcctaaagcgacagtctcaggggccatcgcaaggtttccagttgcctagacaacaggcccagggtcagagcaacaatccttccagccacctgcctcaactgctgccccaggcaccagccccagtccctacgcggcagccagcccaggtgacatgccggtgctctccaggccccggccctggcgggggaacacgctgaagcgcacggccgtgctcctggccctcgcggcctatggagcccacaaagtctaccccttggtgcgccagtgcctggccccggccaggggtcttcaggcgcccgccggggagcccacgcaggaggcctccggggtcgcggcggccaaagctggcatgaaccgggtattcctgcagcggctcctgtggctcctgcggctgctgttcccccgggtcctgtgccgggagacggggctgctggccctgcactcggccgccttggtgagccgcaccttcctgtcggtgtatgtggcccgcctggacggaaggctggcccgctgcatcgtccgcaaggacccgcgggcttttggctggcagctgctgcagtggctcctcatcgccctccctgctaccttcgtcaacagtgccatccgttacctggagggccaactggccctgtcgttccgcagccgtctggtggcccacgcctaccgcctctacttctcccagcagacctactaccgggtcagcaacatggacgggcggcttcgcaaccctgaccagtctctgacggaggacgtggtggcctttgcggcctctgtggcccacctctactccaacctgaccaagccactcctggacgtggctgtgacttcctacaccctgcttcgggcggcccgctcccgtggagccggcacagcctggccctcggccatcgccggcctcgtggtgttcctcacggccaacgtgctgcgggccttctcgcccaagttcggggagctggtggcagaggaggcgcggcggaagggggagctgcgctacatgcactcgcgtgtggtggccaactcggaggagatcgccttctatgggggccatgaggtggggcaggttggggtgccgggcacggagggaagcgtgtggcagggaggcccgggggcaggcagccgtgagcggtggggacagtctggggcgggccggggctgatgccaaaggtgtgggcaggccatgggagagccgggctggggtgggcagggcctttgggcagccgtggactcaggcgcggcagtggagaggcaggaaggctgggtggggactgt

SEQ ID NO: 1563208 - DNA, 4001 bp, Homo sapiens
ttcgcggcccgggcccggcggccgcccagcgcccgcgcgatcctctctccttcgggttgagcaaacgtggtcgcctaattccgcccgggagacagcagctgtgcggcgagagggggagaaaaaatatcgcaacttttccaacagaaagtgtgtgcgcacacgagaggtgaaggcccaccccgattctgtgcacgtatcgacacagcatctaatcagtgtcactgccaggaatacgcttccgcggcgggcgacaccgccgccctcgccaacctgcaggagggaggggggatgcaaatggcgtctcgcgtcgtcctagactccgcgcagcacccgctaccgcgactccaagcagacgttgcagcaaactggggtgcagcgtctggggacgcgaacgcgcaggcggcccgagcggtcgcagggaagaggaactagcaccactccccgctacgagaccgttccccgcccccacctccggaagagccgcccttactcgactggggtgaggggcgggaaactttgcaagaagactgttccgcgccttccccgcgtggcacctcagaagaacgtgggtgggtttcccgtccgaggccagaccacgctaccctacttttccaggtttcggacctgaacctcgtggactacgggagggagagtacatttcgggccactgcggggggcggagggacaccaaagacaggcgtcttcaagggttctggcagatggccaagtttgtgtcctttccctcccacgctagagtagcgcacgccactttggggaagcgtgagaccgttcaccaccggccacgaggccaccaatgtcttccaggtggggccgatggtttgtctgcagcactcccttccgccttgcggtcctcgcctggctcccacagtcctggggagcccccagagctagcccgcgtcttccctcgcccgctcttccgggggaaagggaggctgtttgtgtggtgtgtagccccgctccggcttgcacccccgcgagccacctcgcagccctccccggcctcggcctcacggatcccctcccggagtagccccgcgggcccccccgccatgcgtaatggggcgcccctgggacgcaggcggggatggcggttccggtcgttccgggatttgcgtgcaagaagaaaacaaggccggcgactacaagagcggcgactccattcttggggttcagacgccctcgcagcctccgcgtcggttccgctctcgccccgggagcccgcttccgtgtccctgcccccgccccccaacgattcctcgtccggcccgtgccgcaccacgcggagctccgcgcgccctggctcccacaccggtccctccataactcgcgctcctccctcgctccgggctcggggagccgctcgctcccagcgcccagagtcagccggttccaccttcggctgcgagagccgccgccccgcgccacccccgcccggcccggcccttgtcccagcccggctcccccgccagctgcgccgccaccgccgcacgtgacccgcccccgtcgcggcttccgctgagctgcctgttccggggcacaaacaatttttgctctgacgcggggtctctcgggggccctggcgtcctctactccctgctccccaccccaccccaccccctaccttccgggtaggagaactcaaaacaactcgctgaccttcgggccgaccagctccgtcttccactgactccagcattccgttcaaacccagcagccacggcttctaagatttcactccgctctgggctgggggggagggggcgagttctccgggagggggtgtctcagatcgaaagagccacttcacgctctttctcctcctccgaggtgagtttttagactatttggaggccttggggaaacgcgagcagccgcgtgcaaaggagcccccccgccttctccccgcacatgcagccttgtctagtgtgacccgatttccagggtcagcagcagagggcctggccagcttcggaaataccaccaagcggtggactgtggcaccaggcagagctggggtggaggactgtgctaaataataatggtagctcctactcacgtggtctgtgctaagttcttcacaagccttccaactttacagagtgagaaactgaggcatagggaaaggtcagtcgtgtaaaactgggtaaagctcagttactcagctaagtaagtgacttagtgaggatttgaacccaggtctctgagttcagggtggttaaacatgctgtaagtatgttacagtgcataccttggtatccacagtacaaacctgtctacaaaacccagtgtttgcttgagagctgtatatttggcgtgtaacattgtggctggcatatagtaggcactcaataaatatttgtggaatgaatgggtgtcagaataaatgattgacagaatcattgatgacaagtgatgagagaaaacagtcctaaccattgttcttcctaagagaaataaaaacctctagctgttttttgagtgttcgcaggtaacaggaaactcttattcaaaaatatattaatctcctacccctatcccctagccaaccaccctggtagtcatttgaacttgctggggcacatagccaaagcagcttctacttggtctcggccattttttcccaaccctgttcctgttctgtaggattctgctcagggtcaggcagcctggaactgcaattgatgtgattctgaacacataagcagcagaggaggagggtacacccgccaaacgtggttcgttggcttcccttctacccgctggtgggggctcgggggaacgtggcttatatctctgtggttatttttgaattcacggaccaccctgtgcaactggcttcaaccctcaccagctgtgaggttgcatctcgaagtgtaggcagtcatctactttaaccgacagctccgcgatcccagtcagtgggaccacatctgtgatttgaagagctgccactggtgctctgtactgtcctactgcttctcgtggcccaagaaaggatgcattaaaaacacttatatttagatagctcagtagaatagatgttcataccatatagtgggagtaagtagggtaaagtttagaaaatctcccctgtccctacttcattttctaaaccttaccagttatcctgtgttactagttgggcaacctgaaatgaggccaaattccacttcatgttacctgagtgtgaactttctcctttccaatttgatccatccaatatctattgactactatccttccctccctcactccttccttttttctttccctaccctcatagttatctatttttgctcatgttcctatgattattaatggagaaatgaaaatgtatatattctccaagttacgaccctatcttgattataaggctggggtttctgccacctcttttttgggggtggggggacagagtttcgctcttgtcactgaagctggagtgcaatggcgcaatctcggctcactgcaacctctgcctcctgggttcaagcgattctcctgcctcagcctcccaagtagctgggattacaggtgcgcaccaccatacctggctaatttttgcatttttagtagaaacggtgtttcaccatgttggccaggctggtcttgaactcctgacctcaggtgatccacctgcctcggcctcccaaagtgctgggattacaggcatgagccaccgcgcccagcctctgccacctcttttacagtctggtccggagtgaccagcaagacctcatgacctcaacttgtggcaagcccaggttggaagcatctgatgattcccaaggaggtcacaggcctcaatcccacattgctgggttgtagttgagaacaaccttgccaaaactcacccctcatgccgagggggctggtgacaagtgatgctgaaccagaggtttgggatgctaatttgatttattatctgtgtacagcctggggaggagaaaaggctcataaaagtgttctaggctggtcat

SEQ ID NO: 1563209 - DNA, 4001 bp, Homo sapiens
tggggtgggccatttcctcctagtctttactcccaggccattttaaggatctttctccaaaagactacccctagaaccaaataccacactacccctcctctagcgtcttctcaaaacgaaaaaagggggggaaaacacagctaaaaccccgagctgtctagtctagacgcagcgaggctgtgcgaatacctatttgaagcgcgttggtttctttttaaggtttgtttctaaatacacataaccctcctccttccttcttcgctcttccattccccccacccccaccctccagacgccggcggcgcgcgccctggcgcgcgggcactcacagcctctagctggagatcgcggactttctggaaaagattcattaacagcaaattacgcctcgcccggccacggcctacacgctgccagactcgtccgtctccgggaccccgggaagggcccactcgagcgtgcgagcggcgggaagcccgccgggaccacgcgtgacttcggccgccctactccacacacggtgccccaaggctctctccgtaaacagcaggcgctcgtcaccgccgccgcgagcccccgagttggcggaggctctgcggcgcagccgcccgccggctccgagcgcgggccccgcggcgcctcgccctccccgccttggccgaggatcttgccccggtgcgcaagttcctcttcgcctacagcctccttgccacacgccctccgagtgggaccaacttcctccggccgcagactttcacacgcccatcagggctacccaccagactccccattgcccagcggagggcccaggtctcgcccgcccccgccctccctccacgacgctgcccccgcacaagcacattctacacccacccctgggggctcataacttaaaacctacgctgaacatcggggagggagaggagggggaaagcgggagggggatcgcagattataatcttaaaagaacatttacaaaacaaagcgtctgacctggctggcgggcgggccaagtcggaaccccttgctctgctcgatttcttagtagtttttttttttaatccacgtgattcgtgctttggggcaagccaagaaaaaacgggactcccctcccgagttgcgcggcagcggcggcaggtcgagctcggctcggcccgaggcactcgccacacaccctcgcgcacgcacacgccgacgttccacttggaggaacgaccggcccccggagaggcgagacgaggcggcggtggcggcggctgggggtttttacagttctttcccgagtcgaaaaagaaagcagacggcaacccgctgccctccccttcctgctcgcgagctaacgccgaacccagcttcccagcttccagcccacctcccccccctccgcccgactcgcggcgctcagcggcgaccgcgctcccgcgcacagacacacacaggctgcaaacttccactctgcgaactccctgctctcctcctggcccaccgggaggcgccaggcccccagccgcgccccctccctccctggtgcccacgcggggccgcttaggttggctgcattttaaataacatagctatgaaataaaaacgaaagcgagccaagcagccaaagggaagcgcgaggcaaaagcttcgcggggtacgctgcgggagggggccccgggagagggggccgactgcagccctcagcgcgcccgcccgcccacccgtccgcggtctcccgggggaaaggtgttccgggcactgacctgaaatccccggtgggggagtaggcagggagcctgcgatccggctctttgaagttttcccccaagcggactcgaggcggcgagaaggagcggggggcggttgggtgggtggagagagatatgaggggtggggggggttggcgacgttaacgagcggagaaggagccgggccggagaagcgcggcgagcagcaaagtttgcggtccccggctgcccgcagcccgctcgcggcgccgcgctcactcgactccctcgccgtctgctggcagccggctgccctcggggtcggccccgccgaggggtgggctctgggccgggtgggggcggggcggggcgggctcggggcctccgggcaggtggcgacagccccgtgcgatcctccgggctcccgcagctggactgggcttggccgagctcagcagctcccgcgctgccgccgccgcccgcgctcgggcaggagccccagcgccatgttgacggttcgccgcgagcgcccgctcgggctgggtgtgtgtgagtgtgtgtgagtgttggccaagtcgtccctgcgcggcgacagcgcggcttgggctctccgcccggcggctcgcgggctccccctccgccgccgccgcccgcctagctcccgctctcggtcgcggtctgggctcctgcgcgtctcccccgcagccgccgagctcggcccgcgttcagcgaggagcgcagctctgcctcaccttgccgctgggagcccaggctccgtctgccgccgcacgccgcgatcccaacgcgtcccccctccctggttccctcctcttcctcctccccctccctccgcccgtcctccctcccgcccgccctacctccctccctcccaacagccgcctcccctccccccgcaggcgcagcgctcgggcgacagccgcccgcccgccgccgcctccagctctcgcaagtttgagctccgccagtctccgctcaccctccgctgcggcgcctccgcggcggggtttcgggaggggtgattccccaggaaaggtttgcccgagtttccccggccgtcatcgatgcacggcccggcacgttttggcctctctggatccgaaccccggaccacttgggtggcgccccccctcctcgtcccccggcctcccctccccagctcgggccgagttggctgcgcacgcccgacccgggcgcacgtcctgggcgagccggagaccgacttgggcggcggcggcggcgagggctgccggcagagccagagccgaagggatgggggcggcgggggcggctctcccagccgcgcgccgagactcccctcgctacccagaaggccagtggaggaccgcaattaccataaagcgcctcgcactccgctcagccaaagctgtcaaaccccagcggcagcagccgctgccgccgcctcttgccaccagcgctgcgctctcccggcctcgtcccctccgagacccagcggagcgtggcctgtgtgctcccgtgctcacccccaccccagtttgccccttcctcccagaggagccctttcccatttcggtgttaaaagctacctgaaaacaccaccccaggcaacggtggccgttccgcctgaactccgcgcccgagttccccggacgtttcaattgtgtgggaattgtttggaggtgggggaaggggggagcagcccgtggaggcaccgggaggcgtgtggggggcggtcggcgagcggagatccgcctgtatttctcccggttctcgagcattttcacggtctgtacctctgatggttggaggggctgcccaggcccctcgccccggcgttgggagattatctcccgcgttttattttccttgacagggagcaacttttggcttacaccgttcgccccataaatttccactcggtaacgtcgtgctgatcggtgcttggcggcggcgtacagcctgcgcccgcagcagttcaattcaattgacacgtattgagcttctccagcgcacccggcgcggctctgggcgcggggggagggcgggggcaggcgggagggagggggaagcggagaagcgaggttccggcctccccggagcgcaaagcctcaagggcgagccgagaagccctagttggtgaagctggcgggaaggggtaggagtgggggagggggtattccggactaaccgcgcccagactgcgggcccggacttcgcggccaatggtgaccccattcggctgcccactagggtctttttatactgggaagggggtggggtgtctctttc

SEQ ID NO: 1563210 - DNA, 4001 bp, Homo sapiens
ataaaaaggtctattctgctaaccttgacctcagacaagtatatacttctccagttaggaacagaagaacaaagtagataaacacaaagacttccattccttttcccttcaaattaccaatactcccctatatgcgcacacacatttctaagatttacccaagaaacgtcagatcttgaatcccagggaaagccatattgttctgtgtcttggtgatttatctgatgtatatttgaatttaaacagtcaatggattgaaacaacaaaaaaacaccagcaagcatgaaggagcagtgccttctctaaaaatgagagaggcggccgagtgcagtggctcacacctgtaatcccagcactttgggaggccgaggtgagtggatcatgaggtcaggagttcgagaccagcctggccaacatagtaaaactccgtctctactaaaaatacaaaaattggccaggtgtggtggcatacgcctgtagccccagactctgtctcaaaataaataaatcaataaataaaaaataaaaacggccgggcaaggtggctcacacctgtaatcccagcactttgggaggccgaggcgggcggatcacgaggtcaggagattgagaccatcctggctaacatggtgaaaccccgtctctactaaaaatacaaaaaattagccgggcttggtggcggcacctgtagtcccagctactcgggaggctgaggcaggagaatggcgtgaacccgggaggcagagcttgcagtgagccgagatcgcgccactgcactccagcctgggcgacagagtgagactccacctcaaaaaaaaaaaaaaagaaaatgagagaggcactgcagccatcacacacagctctttgaccaagggttatgaaagccaaatataaattctgaaggccattttgagtgctttgggtatggggcatgatcaggcaatggcacatcttggtcaaccaaatattctggggaacagataactgaaaatacacacgtgaggcaggtgtcaccaactctcaagactatgctaggcggtctcaacttcctttgatacttcataaggatctcacttcaaatcagaattagcctcatgaggtgagaaagcgctgaccaccagaatgcccactgccagttcccagtagaaatctgaacaataaaaccatctttcttccagacctagatcaaagactgaaaataccttacacatatccttgagcaccaaactttgatgcagcaaataaaaactgcaatcgctggccaggcatgggcagtggctcacacctgtaatcccagcatttggggaggctgaggcaggcagatcacttgagctcaggggttcaagaccagcccgggccacatggcgaaacccccgtctctaaaaaactacaaaaaaaaaaaaaaattagccgggcgtggtgttgcttgcatgtggtcccagctactggtggggctgaggtgggagaatcacttgagcccaggaggcggaggttgcagtgggccaagattgtgccactgccctccagcctgcatgacaaagcgaggctctgtctcaaaaaacaaaaaaaaaattgccattgcctgagcttccccttactccacagtctgacagttgttaatgagtagacaagtgctagctggcaaaaggtcatttttttggcctcctcaccttcatctgaaaagagatagcatggcagatcaggccactcacacagccccatccccatcccaccacaggaaaattagaaacaactaagagtcttctcctccccagggtccctccccaggccctattgtatgcagctatccctctggtgacgaggtactgctcactggaggccagcagcggccaccttcctggcctcctcacctctcctcgttgatgccacacatgcgaatccggtcagaactggtccagttgtgcacgccgctgtagagcggtgctgtagagatcatgacagccactcaccaccagataggacctgctgtggccactccccctggggaaaagaattccagaaaatcaaaactcgtaacagggacagctgcttcaatcaccttttacacagcaatgtttcaataaaggtaattacagcatcagaatgttaaagcagccagcctgctatggaaaattaaggtctaaaccgggaagagggagcaccagctttctaggaatccataggtttcaggatggagatgaggacattgttaatcacctagagtgagttttaaattatcttaaaagacagatatgcttgagtagaggaaattcaatctatttcagacaaatgagatgacagtatatatttctacacacatttagcctaaccaactacaattagagagtcatacccatatatgaatggtgcactaaaacactactggtgacctttttctcgtctactctctaatccatgggtactgaagtatttgagtgacgtagccaatttacactcttcagaggaagcacatgctttttttcgtaagtccttcaaaaatactccattgactttgagttggaaataacacacgtatctaacctggtttcaagctccctccaaatcaggtgcagtactccttgcacgctgaccaccaacaagcaaacaaacagaaaacaacgttccatccagaactacgtgtttcggcagggcgcggtggctcacgcctgtaatcccaacattttgggaggccgaggcgggtggatcacctgaggtcaggagctcgagaccagcctggacaacatggtgaaaccccgtttctactaaaaataaaaaaattagcctggggtggtggtgtgcacctgtaatcccagctactcgggaggttgaggcacaagaatcgcttgaacccaagaggcagaggttgcagtgagctgagatcatgccagcgcactccagcctgggccacagagcaagactctgtctcaaaaaaaaaaaaaaaaaaaaaccacacatttctgtccttgtcccttcctgtcagtctgttgtctccatgttccaccactctcttcaccagccaatgtccctctctcgctttgacaagcagggcacagttaatttaccttctagaaaaaatgaggcaccaagaaaaacctttatccaatgagcttgccttgagacccttaagctcttgagttagcttattagctaaaatccttattcattgaagttcaactgaacagaaccctacagtgatcagaattgaatgctgttctccactttccaaagtaaatcacaataagatatagttgtacgagggatttgtttcatgtatccatttttcaattttcagagattgtccactttcaacacagtatcacaatttattgcattcctactatgagccagcaccatcctaggtactgaggattcagcaattaacgaaacagaacaaaatgcctgcccgtgtggagcttacatcccagggggatgacatggacaataaacatgttgaatacttctatgtcatagcatgttaaatagttctatgtcacggcatgttagaagatagtacaacaggccaggtgcagtggctcatgcctgtaatcccagcactttgggaggccgaggcaggtggatcacctgagttcgggagtccaagaccagcctgaccaacatggagaaaccctgtctctactaaaaacacaaaattagccaccgtggtagcacatgcctgtaatcccagatactcaggaggctaaggcaggagaattgcttgaacccaggaggcagaggttgcggcgagctgataccatgccattgcactccaacctgggcaacaagagtgaaactctgtctcaaaaaaaaaaaaaaagaagaagaagaagaagaagaaggaggaggaggaggagataatacaacacagactaaggggcaagggcacagtctaggtggggagggctactatctgaaatacggtgaacaggataggccttgctgtaaaggagacatttaaaccatcggaatgaggtaaaggagtagccacgtggatatttgggaga

SEQ ID NO: 1563211 - DNA, 4001 bp, Homo sapiens
aacattatactaccaaggcgcaaggctttcaattgccatcaactcatcagatgaggcacagctcacaatgagttctgaaaacggcttttcacgccgggaccactttgaggaacacacagcaaaacggggccaattacaacagccagaccgctccgtttgttttaagaacaaccactttctaaaccttcctgcgggactctcaaaggcagcccttcctttgccgccagaaccgtatcccatcgcccagcacttgccacaggccggacaagtgaggctcaaaaaggcacccagcccacgcctcgctttagaaagcaaggcgcagcaaagctgctggaaaaatcgcttttagtcaacctgaagccagtttgccgcactcggggagagccgggagggacgcgatccgccaccagccaaatcagggcctttcctcttaacgaccacgcggcaagggggccgggccctcgcacgcctcgacggcctcccccactccaaagggactccgatttcgcaggatctcccaacttccgcctctgttcccaacaccctacgtgtttctcttcctcctcatttacgtatttacaataaaacagcgaagctgcacagtctgtctctaaatcaaactcggttaccatcaaagcctcagactctatgtctcaaccgcaaaatgtctgacaggaaatcaactcgggaatttgtcaattctttagactcaaagctctcacccagtggggtggttcacgccagtaatcctagcactttgggagactgaggcgggagcattgcctgagcccaggagttcgagaccagtgtgggcaacatgacgaaatcccgtctcaacaaaaaatacaaaaattagccgggcgtggtggtgcacgcctgtagtctccgctcctcaggaggctgaggtgagaggaccgcttgaatccaggaagcggaggctgcagtgagccgacatggcgcccctgcactcccacctgggcaccagagcaagactctgtctgaaaacaaaacaaaacaaaacaaaaccaagcaaaaacaaaaacaaaaaacaacaacaaaaaacctctgtgaaagtctgagtcattcctcattcctcgcccccccataccccgcctcaccaaaaagagaacagctgaaaaaggataagctcgtcccagaaagtcagcatcaagtatctaataagcttcgaaatctcaaaatgtaacccacgcgggcaccccgggagaggcggcgggtaccacccaaagcaccccctcagaacacccggaatttgaggctgtgccccagccgctatgccaaaacgctgaacagggctgtgttccgcggctgcccaccagggaaaaccaataaattcaagaaaaagtgcggccgcatagatctgtatcgccggagcccggcgtcgcgagcgccgagattgtttcccagccactcgaggctccggaaagaaccgcgggccagagggcaaccaggcccagcctcttgacgcactctcggcacaagcccaagtcaccccaaccctgagccaccaagagccacggagacgccatgagcctcaggatcacctcacgtctccgggacatcttgagcccctgagacgacctgaaccctgggccatctcggtccaccacgccaaatttcccaccggcgcgctgagcaatcggcggcagatggccaatacccagaggccgccccccgacacgccccggtcaatgactagccaatcctgccgcccctgaatggccacctaagtgggtgccatccagactcttgacagaacttgaggcccaagctagcgggccagttgaggcgaggtcactttaccctgttcctgggtcctctctgacatcgtgagatggcggggtctggctctgaggcccgagacctgaggcccgagacctgaggcctacgtctgcgccgcggctctgaggtaactgcttggtaactgtgtggtaactgcgtacactcgttgtccgaggcacaatgaggcccgggcaggagcctggaccacgtctccgcggctgcgcagtagcgcttggcatgcgtgcgtgactcctgggggtcaaagggcctcgccctctcccccacttttgacctactttcttaaagagtcccttttacaaaaatatacatatgtatgtatatatatatttgtactatatatgtgtgtgtgaatatatgtagatatagatacagaagtagagatagagatagagataatgaactggaagccaacagtgtaattctgctcgtcccaaaacgcacatcataaaaaaaaagtccaatgtaagagactttctaaatcttcctgcgggactctcaaaggcagcccttcctttgccgcactcggggagagccgggagggaggcgatccgccaccagccaaatcagggcctttcctcttaacgaccacgcggcaagggggccgggccctcgcacacctcgatggcctcccccactccaaagggactccgatttcgcaggatctcccaacttccgcctctgttcccaacaccctacgtgtttctcttcctcctcgttcagaccctctagtgttttccaggttgcttcctcatatccgataccggctttgggaacaaatccgaaaacaagccaactttgaaaatgtgcccctaataaatacctagcaacccctcccctccttcctgccccctctagtagtctgcagtgtattgtttccatctttgtgtccctgtgtaccggatctttaagctcctgcttacaagtgagaagattcggtatgtggttttctgtttctgtgttaattcacttatgagaaaggcctccagctgtgtacatgctgctgcaaaggacatggttttgttctttgttatggctgcatagtattccatggtgtatatgtaccacattttctttattcagtccaccattgatgggcacctagattgattccatgtctttactattgtcttcacatctttcaaaacctctctcggtactacatctgttcgaataatacctccatcaagacactttcctatagccccctggtaagaaggatcccacagcaggtaatcttcacgtccctattagtatttaaattactttgcctgacattataaatcctcgtcaacatgcctctctcctaagttcctggaggacagcaccatgtcttatttatatttgaacaccacctccctcacaagattctaagaattaaatgttataaaatagaaagcacccagtgcctggaatttgggatccatttcttcactgtgtcagttacacaatgactcttgtgactgtgtgtctcctcatttgggggaagggtaagaatttctttacttgtgagaagcaaaggtgtatattgttaggtagaaacacagacttgttttgctatcgttccagagtgtacatatgtgtaggaggatgcatagagaaactgagggctgaaatggatacactgtgctggttaccaatgtgttacctctcacctccaacttcacccacttttgccgactctgtgaaaatggatgtgggccctttaaatatttttccctttgccagtgacacaatttaagcctttggcagtagaaggtgctaaaaggagaatgtaggaggaaagagtttttttgcctcctggttgacctgtgctctctgaggacattgatgcaaagtgtagctttctcctgcaggagagggcagatttccagtactttaaagagggcatatttgcagcaagttcgtgaagttgcaaggttgggtttccagcaaattccagagaacagatttacagcaaagtccaccagtgcagccattcagtgagtcttagacactgtgtctcaaccctaagggtagggcctgtttcttatacctgtaatttgtaaagaatattttagagttttcttattagctaatctctcattactccagtcctcttttatatttaatatatttttctttttttttttctgagacagggtctggctctgtcatccaggctggagtacagtgactcaatc

SEQ ID NO: 1563212 - DNA, 4001 bp, Homo sapiens
tggttttctgttcctgcattagtttgctaaggataatagcctccagctctatccatattcccacaacagacatgatttctttatttttatggctgcataatattccatgatgtatatgtatatttactttatccagtctctcactgatggacatttatgttgattccatgtctttgcttttgtgagtagtgctgatcagcaagtatttattaagtgactctactgccttcaaaggttatttaaaaatgtttccaatttttcttaaattacagaaaatataaaaaatacattaacccatctcatagaatgagtccctatattaatcctttggtatatttaatttcagtacttttcttttcatgtattaagtacaatcaatataaatttttaacaaaaaaagaatatagagattgctttttaaaggtgctttattaacttcactataatgagcatctttccatgcaataggtaaaattcttctgctaacaaaaatcttacagactggttcaaaaacacaatattcaattagaagctggtaataggagacccacgtaaacaagtgacaggtaaaggtttacaacaagggcacatcatgaacatgtaaattcgaaagcaggggtctgtttccgtaataactttagggaaaccatcaggattcagggcataaggcaaaactcatcatgatggtcatggtgaggggggtcagtgctgactgcccgcagactatgactcaactgcttttccctcagcttttccatcagctgtctcacctcctccccaatcctttccatattctcttctctcatccttgcctgtggttctccaagcctatgcatcatatcccatctatactgcaggatgggctgcctaacgcggaaccgcctacgatttcctctaggcacacagtattcaccagcatccaaagggagggccaagggctcccctttattagcaacttgctccttttcttcattttcttggttggcattttccatgctgagactgtttactgctcgtttctctttggactccattactcctaggagacaaaaggagagagaaggggctgaacagctggtgaacgcttcagtaccgaggacagaggcacggctactcatttttcaggattccgcgtcatggctatcaacatgttttgttttgtttaatttcacgtttcccaccagagaggtttcgtgcgcccactagggggcccccattcgagcccgcccccccccccacctctcgtgtcttcccctacctgcccccaaacccaccattttccctacagatccatccctagatctcggcaggcaccaaaatggaggacgggagatgggggagttgggaggggacctcagactggactctgcacccgcccccaccaccgtccctcgcactgacctgggcctatccttgtagtctcctccttctcccgattctcgccacgaggtgcgccgccgggacacttggccccgcagacctgcagaagggctggggtgtggggagggggggctgctgcagcggaacgctagctccttctccgcctagggccctcctcactgccagcgccccgcgtctcccgccccccgctcccaccctcggccgcctcgccccccgtggtgttcaccgttttcctgcaaggactcgggaatggttttccatcgctcttggttgctctgctgcccctggagccccagccgccactgcttccccaccccaggggaccactatgttcccaagaatgttggggtgtggagaaagctggcggggatcccctgcgctgttctgcgctcgtcgggggggtcggtgagcctctgctggcctagccagggcgcgcgggccccggggcccttacctggtccgctttcccccgggccggatgccagcccgccgagcgcagggcagcggggagctggtagcgagacacgagtgacgactgcaccgaaggctgcgtagctctgcagctcccggtcacgtgagggccgtgcgtcaccgccaagctcaccctccttctcaccaacccccacgggccggcggccagttaactggtactcccccctttggaacacacagacacccccctcctcccgtctgtgcgcggtgccccagtgcgcacagccccgtcactcatctccgtcctctccaatctgagggcccacaagtggcatcatcgctttgcggttggagtttacccatcttcggttatttgggagggtctgtacccttcctttcccccaccccaaacccccttcctctggccttggccttttcttctttcctcttctcactggctgtgtatatgcttcctaataatttctctttatttcctttttaaaaatcagcatccctcaaaaaattgaaaataatcaaattttatttttgaaagaaacacttcaacctgggaaagtaatatatatatatagtttatgttcatctatagcacacagaaaacattttctctaggctccacaccatcatttttagagcattctcacttgtttgaaaattttatgaaaaaaaggagagaaaattttcctgaacacagttggtgttttcaaaataatctgtgaagtaaatcttcaggaaacagttctgttgtcagatcttggccattttatgtaaataatctacgtttttatccttctgggacaaatttcaagttttattaataaacatttctattttattctattataataaacattcattaaatatgaaaaaacatttgctgacaactaatgccacctgctaaaattagtggctatcactgttgatggtttgaagacttaagcaaaaggaagagctgtgaggccaaggcaggttgagtgacgcagagatagagtatccctgccctgacaagaggttgggaaggtgctggtcttccactgttatattcgagagcttcttaattcctatgttcagactcctaattctgttgcttactccaaaaatatagatggacaggtgaccaaggtggtgaccttaatatatcactttggctccttccttctatttcttccccaaattcccacctaatgactcacttctcagcatagttgggaggtctcttcccattctggaaaccagaatagggcttttctacagctctgtggtgagagattccaagaaaagcctagaagtaattgaggaggtgggaggagtggggagcagttctcaaacctgcctgctctcttctctttttcacccaccccggggaaaagtctctttgggacatttttgctatctctcacctggcttttgtagtgcagcataccgagaccctcaccctgactgtctcacctccaggtcacccagaagagcttagtcttgctgcagggtcactatctgccagtccatacccactctgatacctcttcatttatgctagggcctggggaacactctccactgaccattcttactacacttggctttctcaactcagaagcctgtggaagcccttaatactactatttcttctttttcttcttcttctttcttccttcttccttcttctctcttctctcttcttcttcttcttcttctttttcttcttttcttcctctgtctctctccctctctctctcggtctctctctctctcatcacttcttctcaccttagacatgtttattttcctttgttttctaccttagtactcaccccttgaccaacccagaaatgtggctattatccttgaatcactctacattgtccctcatattcaaataataaccaaatctggttaagtctcaatttatatatgtgtgtgtgtgtgtgtgtgtgtgtgtgtgtgtgtgtgtgtgtgtgtatatatatattttttttttagatggagactcactgtgtcagccaggctggagtgcagtggcgtgatcttggttcactacaacctctgcctcccaggttcaagggatattccttcctcagcctccagagtagctgggactacagatgcacaccaccatgcccagctaatttttatttttatttttagtagag

SEQ ID NO: 1563213 - DNA, 4001 bp, Homo sapiens
tccatacaacaagcctgggaggtgattgtcttcatcttactgataaatattattatcttcaaagagatgtgtctcttacatttctaaaaagagaacccagaggcaagctaaaattgagattctgtcacaagtgtttagtaagtgctcacatcgcttttataaggtggtcacattgctttttatcagtaatacgtgttccattttgaaaaataagaaattatgggtaagcaagaataaactccctcttaattctaccacagagataaacactatttactatatatatgtgtgtgtgtgtatatatatatatatatatatatatatatatatatatatatatgactgtttaggtgcatgtttaagatttaaagtaaaaaagaatgcagagaatgctttttaaaactgttttattaacttcacaatatataatgagcatctttccatgcaataggtaaaactctcctgctgacagaaacttacaaactgggtcaaaaacaacattcatttagaagctggtaataggagacccacaagaaataggtaacatcaaaacgtttacgacaaaggtacaccacaaatgtgtaagtttaggaagcaggggtctccctattaacttcagggaaaccatcaggattcagggcataaggcaaaactcatcgtgatggtcatggtgagggggatcagtgctgactgcccgcaaactatgactcaactgcttttccctcagcttttccatcagctgtctcacctcctccccaatcctttccatattctcctctctcatccttgcctgtggctctccaagcctatgcattatgtcccatctatactgcaggatgggctgcctaacgcggaaccgcctacggtttcctctaggcacacagtattcactaacattcaaaggtagggccaagggctcccctttattagcaacttgctccttttcatctttttcatcattttcctggttgacattttccacgatgagattgtttaacgctcgttcctctttggactccattactcctaggagacagagagaaaatggactcaattcttggtgaactgatcagcaccgaggacagaggcccgactacccacctttcaaaattcagagccctggatttcaaaggccttttttaaatttcattttttttccaccagagaggccccatgtaccctcgggggggcgaggggagccagtctgtgcccttctctcccgcaaagcccaccatcttctctgcagatccatctccaggcctctgcaggcaccaaaatggaggacgaagaaggggtgggggtgggggattgctaagtgtgggggtgaaggcacggattggggtctcagactgggctttcctcatgttctgaccccctccccaccaccgtccctcgcactgacctgggcctatccttgcagtctcctcctcccgattctcgacgtgaggtgcgtcgccgcaacacttggccccgcaaacctgcagacggccggggtgggaagagtgggggctgctgcagcggaacgctagagaggacccgccgccacccggccccttccccacgccgggcccgggccctcctagccgctctcgccccccgcctcagccgcccagccccccaagctgaccaccattttctgcatcaagaagggcggagcaggggtgttggaaaagcttgcgctggtgacggaggcaggtgcttccgaaaggtcgtagcctcaggatcgccggctcccgcggggccgggcacccctccgctcacacaaggctcgcggtcccgcggcggggccccggggctgcatcgtggaccggctgcgtctccgcgctgctgcccggggatggggcatccgcaggccggggctgctcccccacaccaaccccagggaccccctccgggtcccttacctgctccccctccgcttcctactttcggggccgtacctggcccgcacgtcctcagggacaccgggaacaggtaccactgccgagaagggagcgagcgacggcggttctgacgccacaacgaggtaagactcagtgttggccgatcacgtgtggctgttgtcatcgccagaggctccgcccccgtcccacgccccctcctgcagcccggagtcaggtggtgctttcgggcccgcccccatcctcaccgggagtcccttttaacatccccagcctgggctctgccactcttccttctctgtatattcttgagacttcccctgcttgcccaggaaggacggaaggtatcttctcagggagctgttggccattcccacttctctggggacttgcctctctctgcccttggctcccaggattcacctccttctgcctgtctacctccttctgtcctcctaccaatattctccgttttctctccactaaaatgagtggaagaggtgtatcaggaaaggagcacaagagagtaggcttttctcattcttaataccttttctgtattatttcttttgtaaaacacaaaaaattaatatacttctttaaaaaggaaaaaaagttatttttacttgaaagacgggattaaagttgggcaaaatgtcccaaccacctgtcctgttaagtcattatataaatatagactctacacgcagctgcttttttagaacttggaaaaggacagggcagctgatggctccccttttgaggggcccctggacacatgaggcccttctatgaaatgagctagtgagttgtagtgctacagaaccttgttgggttttcataactaaaaggaaaaaaaaggcctttttcacaaatttctggttcaaacgataagtatgtctttatttaaagatcaagtaatcatgtatttaggaaatccagagacatctacggtaaacctactataggagtaagaattgattttaagaaggttgcagctacaagataaatattacaaacgtactcataaatttatttgaaaatgcaaaggacctagaatagacaaataatttttttaaaatatcctacaaatcttgagagttacattatattatttcaagacttaaggtgtaataataaagttagtgtagtagtaaacatagacctgtagatcaatagaacagaatagactccagaaatagacccatacgtatgttgttaattagtttttgacaaagatatcaaagtaattctatatggaaagtatagtcttttaaactaatggtgctgaaataacagaattcttaaaggaaaaaaaggagccttgccttttatttatactatacacaaattaattcaaaatggatcctaggcctaaatgtaaaagctcaaattagaaaacttctagaataaaacatacagaaaaactttacaatctttgagaaaacaattccttaggacacaaaaagaacagatcacaaaagaaaaaaataagaaattggatttatccaaattaaaaacttctaccatttaaaacacatggttaagaaaatgaagtgagaagctgggagtaaatattcacagtatttgtatctgacaatggttttgaattcagagcatatataaagaacttcgaaaacataaaataagaaggcaaataatgcagtaaaaatgatcaaaagatctgaataaacatttcacaaaactacacacacaaattaccaatgagctcatgaaaagatgttcaacctcattaactatcagggaaatgtaaaataaagccaggatgaaaaatcactgcacacccattataattgctgaacttaaagtctgacagtcccaagcacttttgaaaatactaaacagcagaaactctcactgattgttggtgagaagttcaaccactctgagacttggtggcagtttcttgaaaagttagacttaccatatgtcctagaaattccacttttcggaattttcccaacagaatttaaaacatattttctcaaaaatatttgcataggaatgttcatagaaatttcctttatgatagtcccaaagttgataaaaactaaatgtccaacaagtgaagtgataaac

SEQ ID NO: 1563214 - DNA, 4001 bp, Homo sapiens
tcttcaaagagatgtgtctcttacatttctaaaaagagaacccagaggcaagctaaaattgagattctgtcacaagtgtttagtaagtgctcacatcgcttttataaggtggtcacattgctttttatcagtaatacgtgttccattttgaaaaataagaaattatgggtaagcaagaataaactccctcttaattctaccacagagataaacactatttactatatatatgtgtgtgtgtgtatatatatatatatatatatatatatatatatatatatatatgactgtttaggtgcatgtttaagatttaaagtaaaaaagaatgcagagaatgctttttaaaactgttttattaacttcacaatatataatgagcatctttccatgcaataggtaaaactctcctgctgacagaaacttacaaactgggtcaaaaacaacattcatttagaagctggtaataggagacccacaagaaataggtaacatcaaaacgtttacgacaaaggtacaccacaaatgtgtaagtttaggaagcaggggtctccctattaacttcagggaaaccatcaggattcagggcataaggcaaaactcatcgtgatggtcatggtgagggggatcagtgctgactgcccgcaaactatgactcaactgcttttccctcagcttttccatcagctgtctcacctcctccccaatcctttccatattctcctctctcatccttgcctgtggctctccaagcctatgcattatgtcccatctatactgcaggatgggctgcctaacgcggaaccgcctacggtttcctctaggcacacagtattcactaacattcaaaggtagggccaagggctcccctttattagcaacttgctccttttcatctttttcatcattttcctggttgacattttccacgatgagattgtttaacgctcgttcctctttggactccattactcctaggagacagagagaaaatggactcaattcttggtgaactgatcagcaccgaggacagaggcccgactacccacctttcaaaattcagagccctggatttcaaaggccttttttaaatttcattttttttccaccagagaggccccatgtaccctcgggggggcgaggggagccagtctgtgcccttctctcccgcaaagcccaccatcttctctgcagatccatctccaggcctctgcaggcaccaaaatggaggacgaagaaggggtgggggtgggggattgctaagtgtgggggtgaaggcacggattggggtctcagactgggctttcctcatgttctgaccccctccccaccaccgtccctcgcactgacctgggcctatccttgcagtctcctcctcccgattctcgacgtgaggtgcgtcgccgcaacacttggccccgcaaacctgcagacggccggggtgggaagagtgggggctgctgcagcggaacgctagagaggacccgccgccacccggccccttccccacgccgggcccgggccctcctagccgctctcgccccccgcctcagccgcccagccccccaagctgaccaccattttctgcatcaagaagggcggagcaggggtgttggaaaagcttgcgctggtgacggaggcaggtgcttccgaaaggtcgtagcctcaggatcgccggctcccgcggggccgggcacccctccgctcacacaaggctcgcggtcccgcggcggggccccggggctgcatcgtggaccggctgcgtctccgcgctgctgcccggggatggggcatccgcaggccggggctgctcccccacaccaaccccagggaccccctccgggtcccttacctgctccccctccgcttcctactttcggggccgtacctggcccgcacgtcctcagggacaccgggaacaggtaccactgccgagaagggagcgagcgacggcggttctgacgccacaacgaggtaagactcagtgttggccgatcacgtgtggctgttgtcatcgccagaggctccgcccccgtcccacgccccctcctgcagcccggagtcaggtggtgctttcgggcccgcccccatcctcaccgggagtcccttttaacatccccagcctgggctctgccactcttccttctctgtatattcttgagacttcccctgcttgcccaggaaggacggaaggtatcttctcagggagctgttggccattcccacttctctggggacttgcctctctctgcccttggctcccaggattcacctccttctgcctgtctacctccttctgtcctcctaccaatattctccgttttctctccactaaaatgagtggaagaggtgtatcaggaaaggagcacaagagagtaggcttttctcattcttaataccttttctgtattatttcttttgtaaaacacaaaaaattaatatacttctttaaaaaggaaaaaaagttatttttacttgaaagacgggattaaagttgggcaaaatgtcccaaccacctgtcctgttaagtcattatataaatatagactctacacgcagctgcttttttagaacttggaaaaggacagggcagctgatggctccccttttgaggggcccctggacacatgaggcccttctatgaaatgagctagtgagttgtagtgctacagaaccttgttgggttttcataactaaaaggaaaaaaaaggcctttttcacaaatttctggttcaaacgataagtatgtctttatttaaagatcaagtaatcatgtatttaggaaatccagagacatctacggtaaacctactataggagtaagaattgattttaagaaggttgcagctacaagataaatattacaaacgtactcataaatttatttgaaaatgcaaaggacctagaatagacaaataatttttttaaaatatcctacaaatcttgagagttacattatattatttcaagacttaaggtgtaataataaagttagtgtagtagtaaacatagacctgtagatcaatagaacagaatagactccagaaatagacccatacgtatgttgttaattagtttttgacaaagatatcaaagtaattctatatggaaagtatagtcttttaaactaatggtgctgaaataacagaattcttaaaggaaaaaaaggagccttgccttttatttatactatacacaaattaattcaaaatggatcctaggcctaaatgtaaaagctcaaattagaaaacttctagaataaaacatacagaaaaactttacaatctttgagaaaacaattccttaggacacaaaaagaacagatcacaaaagaaaaaaataagaaattggatttatccaaattaaaaacttctaccatttaaaacacatggttaagaaaatgaagtgagaagctgggagtaaatattcacagtatttgtatctgacaatggttttgaattcagagcatatataaagaacttcgaaaacataaaataagaaggcaaataatgcagtaaaaatgatcaaaagatctgaataaacatttcacaaaactacacacacaaattaccaatgagctcatgaaaagatgttcaacctcattaactatcagggaaatgtaaaataaagccaggatgaaaaatcactgcacacccattataattgctgaacttaaagtctgacagtcccaagcacttttgaaaatactaaacagcagaaactctcactgattgttggtgagaagttcaaccactctgagacttggtggcagtttcttgaaaagttagacttaccatatgtcctagaaattccacttttcggaattttcccaacagaatttaaaacatattttctcaaaaatatttgcataggaatgttcatagaaatttcctttatgatagtcccaaagttgataaaaactaaatgtccaacaagtgaagtgataaacaaattgtgatgtattcatacattttaacgctgctaagcaataaaaaagtgacaag

SEQ ID NO: 1563215 - DNA, 4001 bp, Homo sapiens
agaacccagaggcaagctaaaattgagattctgtcacaagtgtttagtaagtgctcacatcgcttttataaggtggtcacattgctttttatcagtaatacgtgttccattttgaaaaataagaaattatgggtaagcaagaataaactccctcttaattctaccacagagataaacactatttactatatatatgtgtgtgtgtgtatatatatatatatatatatatatatatatatatatatatatgactgtttaggtgcatgtttaagatttaaagtaaaaaagaatgcagagaatgctttttaaaactgttttattaacttcacaatatataatgagcatctttccatgcaataggtaaaactctcctgctgacagaaacttacaaactgggtcaaaaacaacattcatttagaagctggtaataggagacccacaagaaataggtaacatcaaaacgtttacgacaaaggtacaccacaaatgtgtaagtttaggaagcaggggtctccctattaacttcagggaaaccatcaggattcagggcataaggcaaaactcatcgtgatggtcatggtgagggggatcagtgctgactgcccgcaaactatgactcaactgcttttccctcagcttttccatcagctgtctcacctcctccccaatcctttccatattctcctctctcatccttgcctgtggctctccaagcctatgcattatgtcccatctatactgcaggatgggctgcctaacgcggaaccgcctacggtttcctctaggcacacagtattcactaacattcaaaggtagggccaagggctcccctttattagcaacttgctccttttcatctttttcatcattttcctggttgacattttccacgatgagattgtttaacgctcgttcctctttggactccattactcctaggagacagagagaaaatggactcaattcttggtgaactgatcagcaccgaggacagaggcccgactacccacctttcaaaattcagagccctggatttcaaaggccttttttaaatttcattttttttccaccagagaggccccatgtaccctcgggggggcgaggggagccagtctgtgcccttctctcccgcaaagcccaccatcttctctgcagatccatctccaggcctctgcaggcaccaaaatggaggacgaagaaggggtgggggtgggggattgctaagtgtgggggtgaaggcacggattggggtctcagactgggctttcctcatgttctgaccccctccccaccaccgtccctcgcactgacctgggcctatccttgcagtctcctcctcccgattctcgacgtgaggtgcgtcgccgcaacacttggccccgcaaacctgcagacggccggggtgggaagagtgggggctgctgcagcggaacgctagagaggacccgccgccacccggccccttccccacgccgggcccgggccctcctagccgctctcgccccccgcctcagccgcccagccccccaagctgaccaccattttctgcatcaagaagggcggagcaggggtgttggaaaagcttgcgctggtgacggaggcaggtgcttccgaaaggtcgtagcctcaggatcgccggctcccgcggggccgggcacccctccgctcacacaaggctcgcggtcccgcggcggggccccggggctgcatcgtggaccggctgcgtctccgcgctgctgcccggggatggggcatccgcaggccggggctgctcccccacaccaaccccagggaccccctccgggtcccttacctgctccccctccgcttcctactttcggggccgtacctggcccgcacgtcctcagggacaccgggaacaggtaccactgccgagaagggagcgagcgacggcggttctgacgccacaacgaggtaagactcagtgttggccgatcacgtgtggctgttgtcatcgccagaggctccgcccccgtcccacgccccctcctgcagcccggagtcaggtggtgctttcgggcccgcccccatcctcaccgggagtcccttttaacatccccagcctgggctctgccactcttccttctctgtatattcttgagacttcccctgcttgcccaggaaggacggaaggtatcttctcagggagctgttggccattcccacttctctggggacttgcctctctctgcccttggctcccaggattcacctccttctgcctgtctacctccttctgtcctcctaccaatattctccgttttctctccactaaaatgagtggaagaggtgtatcaggaaaggagcacaagagagtaggcttttctcattcttaataccttttctgtattatttcttttgtaaaacacaaaaaattaatatacttctttaaaaaggaaaaaaagttatttttacttgaaagacgggattaaagttgggcaaaatgtcccaaccacctgtcctgttaagtcattatataaatatagactctacacgcagctgcttttttagaacttggaaaaggacagggcagctgatggctccccttttgaggggcccctggacacatgaggcccttctatgaaatgagctagtgagttgtagtgctacagaaccttgttgggttttcataactaaaaggaaaaaaaaggcctttttcacaaatttctggttcaaacgataagtatgtctttatttaaagatcaagtaatcatgtatttaggaaatccagagacatctacggtaaacctactataggagtaagaattgattttaagaaggttgcagctacaagataaatattacaaacgtactcataaatttatttgaaaatgcaaaggacctagaatagacaaataatttttttaaaatatcctacaaatcttgagagttacattatattatttcaagacttaaggtgtaataataaagttagtgtagtagtaaacatagacctgtagatcaatagaacagaatagactccagaaatagacccatacgtatgttgttaattagtttttgacaaagatatcaaagtaattctatatggaaagtatagtcttttaaactaatggtgctgaaataacagaattcttaaaggaaaaaaaggagccttgccttttatttatactatacacaaattaattcaaaatggatcctaggcctaaatgtaaaagctcaaattagaaaacttctagaataaaacatacagaaaaactttacaatctttgagaaaacaattccttaggacacaaaaagaacagatcacaaaagaaaaaaataagaaattggatttatccaaattaaaaacttctaccatttaaaacacatggttaagaaaatgaagtgagaagctgggagtaaatattcacagtatttgtatctgacaatggttttgaattcagagcatatataaagaacttcgaaaacataaaataagaaggcaaataatgcagtaaaaatgatcaaaagatctgaataaacatttcacaaaactacacacacaaattaccaatgagctcatgaaaagatgttcaacctcattaactatcagggaaatgtaaaataaagccaggatgaaaaatcactgcacacccattataattgctgaacttaaagtctgacagtcccaagcacttttgaaaatactaaacagcagaaactctcactgattgttggtgagaagttcaaccactctgagacttggtggcagtttcttgaaaagttagacttaccatatgtcctagaaattccacttttcggaattttcccaacagaatttaaaacatattttctcaaaaatatttgcataggaatgttcatagaaatttcctttatgatagtcccaaagttgataaaaactaaatgtccaacaagtgaagtgataaacaaattgtgatgtattcatacattttaacgctgctaagcaataaaaaagtgacaagctactgatacaaacaataacatggatgaatctcaaa

SEQ ID NO: 1563216 - DNA, 4001 bp, Homo sapiens
ttggtacacatcagaattacttaagagagtttgttaaaaatggagattctggagccccactctgtgagtctggacgataggtcctacatttttaaatgcccctgcctgcccccaaggtgtttttatacagatggtagactcactctgaaaaacactagaacatacattcttaaaatatcaaacattgaattctgggtatgatcattcttttttggtcagggacaagaaaaaaactgtcaaagacaactgagattttgagtccaggtagccggaggaggaaaagtaatacttacaaaaataaggactggaatgaaaaaggaagatgatggaatacagactgctttttgaactgctttatgcatttcatattatgaaaagagtatttttcctaaaataggtgaattgccatgctgaccgtaacttttaggctgagacaaaacaatattcaattagaattctaatttccattagaaactggtaagtgtaaaccccaaaaggcttacagaaaaagtaaatcacaaaaatacaagcttgtaaagcagtgttcacattaacctcagcgaaaacttttaggattcaaggtatgaggcaaaagtcataatggttgtcaggttcaggagtttggaagcgcatatagtgcctcatctgctgttccctagtctttctcttgatttccatcatctgccctacaaacctttctacatcatctctcgcttcattgtgctcaatatgcctattaggtatggcccatcgaaaattagggacaagtcgcctaactcgcccccgcctgatatttcctccaggcttctggccttcaccccctcccaaatggcgggattcttcttcattctgcgtgggggcctgctcccctccttcgttttcttgttgggcattttccccgttgagattgtttgccgctagttcctctttggactccattactcctaggagacaagagagagaaaatgggctgaattcttggtggactgataagcactgaggacagaggccctactaggcaccttttaaaattcagagccctggacttgactttatactctaacatttcatttttttccacctgagaagccagtatgccctgtggggtgccctcaatccgagcccctcccttccgcaaagcccaccattttccctgtagatccatctccaggcttccgcaggcagcaaaatggaggacgaggatggcgtgtgggaaggggagggttgcatggggtagaggggggcgagggtgaaggcatggattagggtctcagactgggctttcctcacgttccggcccccgcctcaccaccgaccctcgcaccgacctgggcctatccttgcagtctcctcctccggattcttgacgcgaggtgcgccgccgcgacacttagccccgcagacctgcagactgccggggtgggggaagtgggggctgctgcagcagaacgctagctaggaactaccgccatccggcccctcccccgccccgccccgaggccctggccctggccctggccctggccctcctcgccaccctcgccccccgcctcagccgccccgccccgcaagctgaccaccattttctgcaccaagaagtgcggggcaggggtgtcggaaaagcttgcgctgatggcgtaggcaggtgtttccgaagggtcgtagccccaggaccgccggctccctccgggccgggcacctctccgctcaaggaaggctcgcgggcccgccgcggggcccgggggctgcatcgcggaccgattgcttctccgcacggctcccccggggtgggcatccgcaggccggagccactccctcacaccaaccccagggaccccccgccgggttccttacctgctccccctccgcttcctaatttcggggccgcccctggcccacacgtcctcagggccaccgggagcaggtaccaccgccgagaatggaacgagccacgacggctctgacgccagagcgagacaacactcagtgttggccggtcacgtggggctgttgtcatcgccaacggctccgcccccgtcccacgccccctcctgcagcccggagtcaggcggggctttcgggtcagcccctatcctcatccggagtctcttttagtatctccagactggccggcccttccactctcctgtctttgtgtattcttgggacttcctctgcctccccaagagggaagctgtcttctcagggagctgttggccattcccacttctgtggggacttgcctctccctgtcctgggctcccaggattttccccacatctcccaaccaggacgcgggcgcagaatttaaaggggtgcaaaattcctcagcagtcaagaaaaataacattttaatgcaacattttaaaaaacaattattgcaagaaaatttatgatgagcaagatgtcaaaaatttaaataaagagagcatcagtcccgcccaccccaatggcaaactgtggtacttgttaccaatgctcatccttttctccacaccagaacgtttggggggggacaggaaatgagtcaaggacagtggattttttttctaattcttcttaatacctttctgttctgttcctttttttggggggtggggcagagtctcgctctgtcgcccaggctggagtgcagtggcgcgatctcggctcactgcaagctccgcctcccgggctcacgccattctcctgcctcagcctcccgagtagctgggactacaggcgcccgccaccacgcccggctaattttttgtatttttagtagagacggggtttcaccgtgttagccaggatggtctggatttcctgacctcgtgatccgcccgcctcggcctcccaaagtgctgggattacaggcgtgagcgcccggccccttttttgtttaagaaacagtctttatagtttaactttatcttaactttaatggaaaatttcgaacatttggaaaaatggaatagtataatgcaaaccccatgtactagtcctcactcagattccacagttaacaactcatggccaatcttatttcgtctttatcttacccgcttcccaaccttaaaattatttctgaagcaaattctagacataatatcactttaggcataaatatttcaaagtatgtatctacaagataagggttttcttctttttagcatataaccacaatactgttgtcacatttaataattcacaattccttaatatcattttatgtctaatctgtgttcaaatacccaattgtattatagttttttttaacagtttgtttgaatcaagatacaaataagatatgcgcattttgattggttgccaaatttcctaaatttcttttaatctgtgggttttcattttttaattttttctttaattattgatgaaatagtcatttgttctgtattttcctacagtctggatctcagtggtgtcattaacacattatctctttactctgtggttcctataagatggtaactaattctagaaaagcatcctggaatttgggttcaatttcaattcaagtttgtccaagggaaagcaaagactctttctgttttcctctttttgggattttagctgaaatatttctataaagagacccttcctattttaggtcgggctccctagaagcagaacttggaacagagatccttatgaatgtagtttcttgtaatgctctctcaggttaaaggaagtaaaggcagcaggacagggctggggagcagggcagtgatgaagaatggggtttaactagagattaagtttagttaatcgcacctgaaaactctgaagcacacacaagtcatcccacgttgacagtaagtcactggctttttgtagctcagcgtcagtcacagatcaaagtctgtaggtggagcagagcatagtctctggagcaaggtggctcccatttggcagagaacaattccctggagaagaggtaaaatgtgagttgtatggctcaggcctgtaatcccagcaatttggggggctgaggtaggagg

SEQ ID NO: 1563217 - DNA, 4001 bp, Homo sapiens
tccctaattttcctccttagctctctcatctcctccatgaaccgttccatatcatctccatctccatctatcatatcaatgttatcgacaagcctattgggcacatcctctccaaaacccggggcaggtggagcccaaacccctttaacatttcctccaggctcctggtattcaccacctcctaaagcgggggcttcattctgcactggggccttctccacaactttgttttccttggggacattttccatgttgagtttttttcctgttttttttttttttttcttcctagaagataaaaagcaagaagagggaatgaatgcttgataggattcagagctctgtttggcaaaggttttcccacctgagaaactttatgaaccctgtagggggcgccccagacccagcgctgccccaaagcccatcattttccctgaaaatcccttccccaggccactcctaccgccaaaatgcaagacgacttagcggagggggacgatcatagagagaccagacttcacctccctgggatcctaataagctctccaggagcgccccagatctcgcccctctactcccttcttccctcatcagatacaggctgtcattttatgaagactctcctaagtttctcctgcactcaactcgggcaggaagggctgtgagtcacccagattctgctctgatccttgatacccctacaccagagggccccaggcaacctcctaccttcagggatcagaggcagtctttctctcttagccttgaaatcggctgcacaaacgcacttaaagacctgcagacaaatgtgacaattaccaggactgatcttttaatcaaaggaccggtaatgggagttgatttagggttctcctagtattagcaccttctgtttctcctccatcctgtctcacggcttcttttcccaccctgtgacaggctatcccaccttccagaaataggcatcaaagatgattatttccaaaacgttttaacctcttctttaggcgcccatctctactgtttcctcttacctgtcatctagttaccctttctgcaacgcaggcaacttgcctggcgggggagttagaagagcttgctgaatgaatacgtagtttattcacaaagaatttcaatctagatatccatcaggccctctctccacccgatccccactcccatgcccaccattttatgcatcaagatggacgatgagtgaagaggtatgtgggcattgaaaactaggacctgctgcggtctctgcgctttgtcattctcactccaggatctacaggtagcgcccacgcttacaccgaccgacctgctgagaccaaaaacagtttctcgctcctcgcctctgtccctcagtcagaagctcgcccgctcaactgccgcaatagggacctgctttccagacctaatctctgtccccctcctctgcagcaattcctctcctcggcccccgcagcctatcatttccagctctaaatgggtagagggtgaagaaaagatacctagaaggcaggcctaaaaccttggcagggtccgccctccccaacccttggttgccggctgtacctccctcccgcggacctgcaggaagcaggctgtttcctttcagtctcctccaccggctggactccatcagacattgcccgatggccggcctcctaggagatctcaaatggtacccattctcaatccagccccctcgggagatcctctccccaaccgctccatttctcgcactaaacgggtgtgtatctggaaagggtgtgtatccagtcctagacccgctctggtctttgccctctgctgctcacacaccggtcagcgccacctacctgccagggctcaggggtcagcttctaccactttccacctttcctgggcagctggctcgcctgccttcagggcaacagcgagccgtcacacggccagcgacaactaccagactgcaactaggaggagggactaatccacgcattggctctgggtctcctaagggtcacgtcactgtgagctcagatttccaattaccattcacacccgcagtgcggcaggagggtgggggcgggactgtgggcggggccacctttctcttcattcgtgctttctccaccactaccacaggctactatccacccctctatttttttatttagcgatccccacgaccaaacgggtcataatattttgtatttggcttgctctggtttctgctggagcttttaaaaaatcgcttcttcctcttctatacacctaaacgcacacttctctccccttcacgtccagcaagtaaagccctaacagtcttgtagggcttggtcccagattggaacccggagaaggggtggggagcgagaggctaggaagtctggaaaataggcaggaagtggtattcaaatttttttttcacttcaactactttcctttttgtttgtttatttgggaagggggttccttttatttttcatcagcatgcattcattttgttgttgtttttataactagacaatacaattattttcagttgaaaaaacaggattcgagttgtaaaaacatggcaatctgtttctcctgctgaatcatattataaatataaaccttccagaaagcattcccctgcctcctttaaggactttgaaataaggccgggagcggtggctcgtgcctgtgatcctagcactttgggaggccgaggtgggtggatcacggggtcagtagttcaagaccagcctggccaagatggtgaaaccccgtctctactaaaaatacaaaaagtagctgggcgtggtggcaggcgcctgtaatcccagctactcgggaggctgaggcaggagaattgcttgaacctgggcggcagaggttgtagtgagccgaggtagcaccattgcacaccaagcctgggcgatagagtgagactctgtcaagaaagaaagaaggaaagaaagaaagaaggaaagaaagaaagaaagagaaagaaaggaagaagaaaagaaaagaaaagaggaaggaaagaaggaaagaagtgattttctcgtgaaggatctctacatgtccttccgtgaaatgatgcattgagtctaatagagcctctctggtggattttcatgtcttgagaacctgtgacaaactgatgatctcctctaaattgtattagtgtaaccacaatttacaataacacctagccctgatgattcaggacaataatttggggaagctaccctgacagatgaaaatgtattgtgatggacacatagaggggaacaacactggggcctacaggagggtggaggatgggaggagggagaggatcagtttacctatataacaaagctgcacatgtattcctgaacttaaaataaaagtttaaaaagtattgtgaaattacaatgttaagataatagtgtaccagaataaatttagaacaaatgaaccagaaaagaaattcaattatcaaacccaaatatggaaaaaatgctagtaaatgcattgaaatattttgaatcagtggggaaaggttagattgaagaaattgtatcgggataattgactattttcaaaaacaatgaagtgccttatcattctcatacacttaaaaatagacactaaatgtttgcataaaagacattaaaccattaaaaatagaacttagcatgttattttttatataatagaatggaaaagttgttttaaatacagcaccagatcctgacaagaccaaaaggcaactggctcaaatctgctggggaccctccaagtctcagaaatgatttagagtgctcctcagaattatcctaactagtgatgagaagttggggtatttttctacagacttggccctctattggtggatgtcacgctgaggatgttaaaatctctggcacttttaagttgtcctacacctgggctgagcaagttcccaaggtaccagaaaaagccctcagcaaaattagaaaacacaggtaaggtagaaggataatatcagttttatcccc

SEQ ID NO: 1563218 - DNA, 4001 bp, Homo sapiens
agaaaaacttacagactaggtcaaaatgcaatctccaatcagaaaattgcagaagaatgccaaaaggttcacattaaaggtacaccaggaaaaatgcgaatttagaaagcagggattttatgattattaacctcaagattcaaggcataaggcaaaactcatcatgatgatcatggtgaggagggtcccctataagaatgcgcagactgtacctcaactgaagttccctaattttcctccttagctctctcatctcctccatgaaccgttccatatcatctccatctccatctatcatatcaatgttatcgacaagcctattgggcacatcctctccaaaacccggggcaggtggagcccaaacccctttaacatttcctccaggctcctggtattcaccacctcctaaagcgggggcttcattctgcactggggccttctccacaactttgttttccttggggacattttccatgttgagtttttttcctgttttttttttttttttcttcctagaagataaaaagcaagaagagggaatgaatgcttgataggattcagagctctgtttggcaaaggttttcccacctgagaaactttatgaaccctgtagggggcgccccagacccagcgctgccccaaagcccatcattttccctgaaaatcccttccccaggccactcctaccgccaaaatgcaagacgacttagcggagggggacgatcatagagagaccagacttcacctccctgggatcctaataagctctccaggagcgccccagatctcgcccctctactcccttcttccctcatcagatacaggctgtcattttatgaagactctcctaagtttctcctgcactcaactcgggcaggaagggctgtgagtcacccagattctgctctgatccttgatacccctacaccagagggccccaggcaacctcctaccttcagggatcagaggcagtctttctctcttagccttgaaatcggctgcacaaacgcacttaaagacctgcagacaaatgtgacaattaccaggactgatcttttaatcaaaggaccggtaatgggagttgatttagggttctcctagtattagcaccttctgtttctcctccatcctgtctcacggcttcttttcccaccctgtgacaggctatcccaccttccagaaataggcatcaaagatgattatttccaaaacgttttaacctcttctttaggcgcccatctctactgtttcctcttacctgtcatctagttaccctttctgcaacgcaggcaacttgcctggcgggggagttagaagagcttgctgaatgaatacgtagtttattcacaaagaatttcaatctagatatccatcaggccctctctccacccgatccccactcccatgcccaccattttatgcatcaagatggacgatgagtgaagaggtatgtgggcattgaaaactaggacctgctgcggtctctgcgctttgtcattctcactccaggatctacaggtagcgcccacgcttacaccgaccgacctgctgagaccaaaaacagtttctcgctcctcgcctctgtccctcagtcagaagctcgcccgctcaactgccgcaatagggacctgctttccagacctaatctctgtccccctcctctgcagcaattcctctcctcggcccccgcagcctatcatttccagctctaaatgggtagagggtgaagaaaagatacctagaaggcaggcctaaaaccttggcagggtccgccctccccaacccttggttgccggctgtacctccctcccgcggacctgcaggaagcaggctgtttcctttcagtctcctccaccggctggactccatcagacattgcccgatggccggcctcctaggagatctcaaatggtacccattctcaatccagccccctcgggagatcctctccccaaccgctccatttctcgcactaaacgggtgtgtatctggaaagggtgtgtatccagtcctagacccgctctggtctttgccctctgctgctcacacaccggtcagcgccacctacctgccagggctcaggggtcagcttctaccactttccacctttcctgggcagctggctcgcctgccttcagggcaacagcgagccgtcacacggccagcgacaactaccagactgcaactaggaggagggactaatccacgcattggctctgggtctcctaagggtcacgtcactgtgagctcagatttccaattaccattcacacccgcagtgcggcaggagggtgggggcgggactgtgggcggggccacctttctcttcattcgtgctttctccaccactaccacaggctactatccacccctctatttttttatttagcgatccccacgaccaaacgggtcataatattttgtatttggcttgctctggtttctgctggagcttttaaaaaatcgcttcttcctcttctatacacctaaacgcacacttctctccccttcacgtccagcaagtaaagccctaacagtcttgtagggcttggtcccagattggaacccggagaaggggtggggagcgagaggctaggaagtctggaaaataggcaggaagtggtattcaaatttttttttcacttcaactactttcctttttgtttgtttatttgggaagggggttccttttatttttcatcagcatgcattcattttgttgttgtttttataactagacaatacaattattttcagttgaaaaaacaggattcgagttgtaaaaacatggcaatctgtttctcctgctgaatcatattataaatataaaccttccagaaagcattcccctgcctcctttaaggactttgaaataaggccgggagcggtggctcgtgcctgtgatcctagcactttgggaggccgaggtgggtggatcacggggtcagtagttcaagaccagcctggccaagatggtgaaaccccgtctctactaaaaatacaaaaagtagctgggcgtggtggcaggcgcctgtaatcccagctactcgggaggctgaggcaggagaattgcttgaacctgggcggcagaggttgtagtgagccgaggtagcaccattgcacaccaagcctgggcgatagagtgagactctgtcaagaaagaaagaaggaaagaaagaaagaaggaaagaaagaaagaaagagaaagaaaggaagaagaaaagaaaagaaaagaggaaggaaagaaggaaagaagtgattttctcgtgaaggatctctacatgtccttccgtgaaatgatgcattgagtctaatagagcctctctggtggattttcatgtcttgagaacctgtgacaaactgatgatctcctctaaattgtattagtgtaaccacaatttacaataacacctagccctgatgattcaggacaataatttggggaagctaccctgacagatgaaaatgtattgtgatggacacatagaggggaacaacactggggcctacaggagggtggaggatgggaggagggagaggatcagtttacctatataacaaagctgcacatgtattcctgaacttaaaataaaagtttaaaaagtattgtgaaattacaatgttaagataatagtgtaccagaataaatttagaacaaatgaaccagaaaagaaattcaattatcaaacccaaatatggaaaaaatgctagtaaatgcattgaaatattttgaatcagtggggaaaggttagattgaagaaattgtatcgggataattgactattttcaaaaacaatgaagtgccttatcattctcatacacttaaaaatagacactaaatgtttgcataaaagacattaaaccattaaaaatagaacttagcatgttattttttatataatagaatggaaaagttgttttaaatacagcaccagatcctgacaagaccaaaaggcaactggctcaaatctgctggggaccctccaagtctcagaaatgat

SEQ ID NO: 1563219 - DNA, 4001 bp, Homo sapiens
gcaaggactcagaagcccttgctgaaggctctgagtgctaactgtcaagtgtgaactcattacaaacccctcctctggggacttggcgctgtcactggaagggacacgctatagctttgtttgagtgactctggaatgttgctaaagacaggaaactcattcttgccttggaaacaccccccttcctttcccagactccccatctatgcgttggtagggttaatgcccactgccgtacgggtccttggggcttgaaggtgggccagggaggccagggctgccacccacagctggccagcttgccatgggagccctctctgctccctggctcgcaacctgctcccaccgcccagccctggtggcttggaggcagccctgcatcttcctttcaatatacccacacgggcttgccctcaaaggctcaccatgctggcccacagtggccatacatgggcatgctccgcaccaagacatccatgctcatacaccagctctcctggggtgcggctggcaccggcggctgggtgtcaccaggaggtgctcacccgcacccctgggcgctggtccccgggagcctttctggcacgggggcaggggggctgagcatctccagcttgtctcagttccaattagttgctatagggcagagagctggcaggccagggaggggcgagggcccagaaacaggaccccctgaggatgggacctgagcagtctggcagccaggacagcaggagagaggcctgcccaccaagacagaccactggagactgatgtaccctgtgccctgcagatccctgggccccctgctctgctcagcaggcgctcaggcacccagccccgcccatggagcagtgagggggcgctcccctccgtgggccttccagggcactctctcgctccctctcctgggtcccttggcaggcccctctgggaccccaagccaggtccgccctggggagcatggcacagttgcctgattttctctccttcccctccacacccattctgagtcccagtccaagggggtcctggaaacagacagggctgagccacccaggcacccccagtcagggcccttgcagccagggctcccaggacccagacttctcacagaggatgtagaggcagagcattaacctgggggtgagcgagcgaggaacatctgggcagggtgcctggggtgtgcctgggaaactaagtctttcagcccatgccaaggactggcctcaggcagtgcagcggaggactgctcctgggtgctgagctcggtgggcgctgggcggtcctccccgatccgacccaacccgggccaggcgccaagccctggagcaaggaggcgcctgggcagagcgaggctgagggagtggagcatgcgcctgggacttgcaatgatgaaacagggccattggcaaagctggggtaccagtcacccagccacgctctagggtggtagccaagaagacggaccccgagcgggaggcagagagacaagaggtggatgaagcagagcaaggtcagaagggagagggagaggaaggggtgagggaaaggtgcctggagggcggcgagacgaggcagaagcctgacagggaccaagggggccgcagggtggcgatgaaggggcgtggatcagcagcctacagagagcaccggggaaatctgtggacaccctcgcggcactggggacagcaggaccagggcttgggacagcggaggcagcagagccaggggcatctctgggttgctgaggaggcagcttgaagccagccctacctggagaggggaggcgccaggcgcaggctgactagttggcgggctggggtggtgggccgtccgcacgtctatctgtccggtgtgtccggcggaccgaaagcagctactcactcctgggcagtttgtggagagagggagacagaggcggcgggcgggaggctaaaggctgggcaggcgggccgacggggaggggacagcggggagagggcggggagggaggaaaggagggagggggctggtggggcggagagggcgggcgagcaggagggggcaggcttcccggcccccctggcagcttcaaagggagcaattttcttgtagacggctggactagctgagcccccgccccctcgcccccaccacctccccccccctcccccgcctggggcagacagcaaaggaacggacacactcgcactcactcaaacaaggacccagagagtcaaactttccactgcccagatggggacactgaggtgctggctggcatctcgccaggcagaggaaagagagatggaagaaagacgagggggaggcggccttgggctgctaggcccatgagtggcccctggaatttggtcctgagcctgccaggaacctgcttgggcctaagcaaggaggtggtttctccaggatcagagaggtagctgttgtggatttctggaaggacttcatgtaggctcctggcgccctgtgccctcccttccactccagactttcttcccttaaaaagagggcccgatccggctggtggtggcaggacggggcagggggctccccagcttgcctgccctgaactgattcagagacgaaggatccagcgagtcagtcttcttgctcaatccctgcaggtcccctcggacatgagaaccactctgtgggtggccacttcctctgggctcagccctgtgctggtcacttacgggggctaaccgggttaccccaccaagactcagccgcttcctgagggcccaaatgagtccagttcctccagtggctagagcccaggtccttagtacgacactgcccccctgtcccgtagtgtccccttcttccctcagcaagagcagctcctgagacacaggggtaagagtttagatggagtgagaaacagatctgcaatagaactgggggccaagagtgcggaagaccaaaagagaaaattgcatattgagagaaaaagctcgaaggggcagagagggagagaggggtggctagagagaggcggcatccaatggagagaggacaacgtcgagggctgagggtcttcaacccctggcagtgccatcactcaaccggggggtggggtctgggaggtcccaggccagggaggatgctcccaggggagctctacctgggggcatggcagggcacagacccccttcctgttcaccagcggcagcccagggcctggctaggacctgggacgcatggcaccttgaccaaactgtggtacctgcctgcaagaagcttctagactgggccagggagaagagagacgtgggaaaccaggggccaggctggtaaccctggttctctcttgatttcatggttggaatgaggagattggagaccacatatgccctttccagacaaaggagatggcttgtctttcggcaggtttgtgtgttttaccttttgcccagcctcagcgtccgactcttggcagcctggtctcatctctgtcccaccctctttccctcccccactgccaactcattcgtggagaaatatgtcggtagagagcgggacaggcagcgaagcctgactagcagtctgggtggagagagaagcatttggaaacattccgctcagtgacagcagccagtcgcaaaaggccgcagagcctctggttccattcatttgaaatgtccacactaggctcatctgtggggacagaaagcggatttgtgggcagtgggtgctagaggggtggtacctaaaggtatgggttttctttttgaggtgatgaaaatgttctacaatcgactgagtgatggttgcacagttctgtgaatagaccatataaaagcccttgccttgtacgtgctcaatgcgcaaatcgtgtggtaagcacagccactctcagtaaagccgtttcagaaaaaaggagaaacccactcaaggcatgcctgctgcccgaggtgctggtacccagtaccttcctgcactgcttggggactgagaacccaggagctgtcactcagggcctcagcctccaggag

SEQ ID NO: 1563220 - DNA, 4001 bp, Homo sapiens
caagttcttgacactaagacccttggaatctctggagtgataggtgtctttttttatgttccgagatgactggtgggtgcactagatagcttcaagatatggatggtcaccagaaagaccaaggcatgattagagggttggaactttcagcctcaccccttgacctccaaggagaagagaggggctgaagattgagctaatcaccaatggtcaatgatttcatcaatcacgcctatgtaatgaaacctctataaaaatcccaaatgtctgagaggttccaggttggtgaactcattcatattctgggaaggtggtgtaccccaaatccacatggatggcagcttctgcatttgggacccttctggaccttgccatatgtacctcttcatctggcttttgatttatatcctttataatgaaccagtaataggaagtagtgtttccctgagttctgtgggcccttatagcaaattattgaacctgaggagggggttgtgggaacttccaactagtagctaagtcagacagaagtgtgggtgacatggagatccattacttgtgactgttgtctgaagtgagggagggcagtcttatgggaatgagcccttaaccagagaggtctgcactaactctgggtagtatcagaattgaattaaattgtagaatacctagctgatgtcctcaaagaataagagaattgcttggtgtgaaaaatccacacattctgtgccagaagtattgtgggtagaggaaccattttctttcacttggtacccagtgggtgcatggggtagggggaaaggaggatactcgatgtgaaagaggacaaggacttaccatggggctgctacctaggatgggaccaaagaaacacatcctaaggaatgagcagagatcacaacacaagagagcaaagggtatgcagagggaaacttaggagactatccatgaagcagtttctgtaggtggtccccagaaagaccctcctctgaggcccaagacagcagggagagagagctcacacggagtagcaacccactttgtgtccctcaatgggaatgagatcctgctgcatggggctgagatccaggaatccccttgggggtcgagaagcttggagtatcctaatgagaaatcctaggtgaagggcccacagcatctaggtttcctcccctcgagtctatgtctcctcctccttttcctagaactgccgggattgaggttcattcctctcttgcatccccagccagctggagccttggagcaaaaggcagatgtatgtgttctcttctgccctcctccaccctccgccagttttgagctggtatcagccatccccactgcctgaatactgccagtaagaagacagagagtagaatgagtgcggacgcatagctcacggttcccatccccacccctgcctttcctgatccagcaccacaggtgttcacgaattgtcacttcaccatttccccgctctgggctcccctgaagccaactccatccatatgcccacctcccccacccacacatacaaacacagggcactgggctgggagccttgggatgaggggtcaagggtgttcaaaaggcaggagggagcaggcggatctgaggcattacctgcacccgcatctagtctcagtcaccacctctcagggatgccatctgccgtccttgcacccacctcctccaacagcaaccgctgctcctctccacgaacgcgtcgggcaggtagactctctgcttcttgagctcctggacaaaagacagacgggctaagacgctcccggttggctgacggattgtttcctttaccaacaaatgctgtagttccagtcgcctgagaaattagttttcaggctgatgcagcatggaaagacacctacctaccttaacatcccgccgttcctcccacgttctgctctgcggagcacaggtgtcgtccgcctctcaggtcttttctggatgcaagaaaacactcctctcggcaggcctaatgcagagcctggtcacatgacccaccgtcagccccacgtgactgcgcagtcagcttgttcgccgcagtcctgtaccatggatgacagtcttctgcctctggggtgcttgctagaagatcctgaagctccttggccagacagctggaaggaaggctggcctttgctctggaggaccactcggctggcgaggaacattcgatgaggatttgggaaatgaagtgatttttaatattttgtatacgactcaagcgacatactaaaacacacacagatctgtcttgaaaaatgctggtaagcaaaacaaacattcaaactccaatttgcaccaccaggataatccctgttaaaacttatggcttgcgatgggaggcaaaactgccacttccatattaccttaccaaactaggatcaggtggggaaaaaaagcatgttgcactgtcagaaaaattataccaaacttagataaagtcaccttcagttactggatgtcatttcagggcagtgcaggatgtctattgatttacctatttttcaactctgtagacactgatgttaacatgtagatattttattcaataaatatgtaaatgatttatgtccagtgcaatagaaaaccttaaatgttacaatttattgccctgtaagatattaacccgttttatatttaacctggcagtgttattctaacatttattaatttcctatgtgtttatgaaattcaatgttttgtttatatcttcatattgtgtatattgtatatacacatatacccttcaactgttttcttaatcctagcagttgttgattgtgttgaaaaatctttcacatattctttttacatttacatgaattgtaattttacctttgaaaatttagaacattctcagacaaataaatgttatgtctaaaaataataaaacattggatatttctcgtacgtctgaatttcctctccaaaccaacatatagccctgtcttccaattctcctgactgaaggtattgtgtggtcattttttaaattatcgtggcaaaatacacataacataaaatttaacattttaaccattttaaagtatacaacccagtacattatcaatgttgtacaaccatcaccactatctagctccagaactttgttgtcacctcaaaaggaaatgttatgttttttacggtaataattatgtgaaaaaggtgccatttttgtaccatgaacagactaatattaaacttaacacccttggtaattttttttttttttgagacggagttctgctctgtcacccaggctgtagtgcagtggtgcgacctcagctgactgcaacttctgccccccaggctcaagcgactctcctgcctcagcctccccagtagctgggattacaggcgcacaccaccatgcctggctaagtttttgtatttttactagagacagcatttcgctatgttggccaggctggtctcgaactcctgacctcaagtgatccacccacctcagcctcccaaagtgctgggattacaagcgtgagccaccgcgcctggcccacccttgattattttattttattttattttttttgagacaaggtctcactcacatcacccatgctggagtgcagtggtgtgactatgactgactgcagcctcaacttcctaggctcaagtgattctcctacctcagcctcctgagtagctaggacaagtgcgtgccaccatgctgggctaattttttttatttttagtagagacaaggcatcaatatgttgcccaggctggccttgaactcttgagctcaagcaatccttccgcttcggcctcccaaagggctgggattacaggtgtgagccactgtgcctggccaattttaatttttatcttgaaaacgttttataaaaagctagtctttctgatagctcattcatttacaacttttctaaatgatattatctctaatcattttttaacacttatagtttattcatttatataattctgtcctttcc

SEQ ID NO: 1563221 - DNA, 4001 bp, Homo sapiens
ggtctaacccacttggcaacagcctttccataaccccaatcaacgggggtgctcacacataaacctaccttgaatccaaatgaatagtttttgttctttcttaattaacttccaagtgaacagctacatacagatctctacaggaacctagaaagaaacagacctaaggatagaaaggaaggcagaggaaagaaaacagaagagactaagatgatctaatgcctataacaaggattataacatatgcttttgaatattcaaggctatgttaaatgtctcccacctgtctgctcttcctcaatgattccctaatcaccccaagacctgcagcctgattacacctcctgccaactttgaagtcagtcattttcccaatagaagttacagctcctttcctgaaccaaaaaaaatgaggtgcagaaataggtagtggaacataggcaattgtacttacaaggcaggcagggaacataatggagactgttattttaataccatctgtgcatgtccttccccttccccatgcatacctagatcctactttattcaccacctatgtcagcctgcttatacagcaggagttctcaggagatgctatccttcccaccaaagaagagtcacgccctacaaaaagaaggcggagcaactagcaaaaaataaccccaagagactatgttaacaatggtagaaaaatagcaggttaatggacagattcccagaattcggattctaacacctcctttttgagaatcagaaactaagtaaataaagtctcccaactctcatagctcctcagatatccaccatcagaaatgccatgaattcttctgtgggactatttctgcaccaaaatgagagggtctgtgaggagtggctggagatggagttttggtttccagaaccataaactgaagaagcagattgacttcaaatgttctaaattgacccttcaaaaagattacccctctactcggaacccacattctcacacatcattacattacttaaagtggatcagcatgttgagaaaacagatcctgaacaagaaaggtggaaaaatactaccctgttatttacatggaccactgttgtgaaattcgactaagtccacaccctatttgcttgcacaaaactggatgtggggatctaaatatgtaaggcaataaaacagtgcggtattataaaaggcggttaaacatttcattttagtgtcttcataattcacccactcaaagttccacttttggagaacccaacagacctatcacgcagacaggagactttaacaaccacctggagcctgtgggaagggacagcacccaagacacggggtcccacaggcccctttccggaatcagggccccgagtagcgaacgcggcccacctctcgtgggctgggcacagagctgggacgccggctccccccggccttcccgggagccccccacaatggctcccgctccgccatttctcccgcaggagctcccccacagccctttccgggcacagacaccgtcgagggcggggcgccggcgcctgcaaagctggcttggaggcggtcagcgcggttctcctccagacgatctgacggtgcctctcaagccagcccctcagcccttggcctggctcggcctgcaccggtcaccgcctccccatcgccaggggtctcgagcactgcgcacctctctccggcgaccggctccgaccggatcgtctcctccttgccaggatgtcagggtcggcggggcaggctgccagccggtccaccctggcggaccaccccaagctcacgcacccccacttgccttcagaggcccagggcccaggtcgtcgacctccccctcctctcctcagctctcctctggcggctcctcacttcgattctcaccgctttccccgctatcagaatggcaaagacgcgtcccgccccccacgcctctgcaccaaactgggcaggggctgcgcaggatgctgcaagaaccgctctctccgcgagggtgtcgggaaggggggcggagggatacggcgcgaaagtgctcgacgcccccctctcaggcccaccttagttccgacccagaggtgggcggggccatgacgagccccagcctgggcctgcgggttggcaccaggctgcctcaggaggacccccgcggaccctaacgtggcgaccaccaccaccacatttctggcgttgctataatatagggacgggcgggcggctggggacccaggcaggggacaggatcaggaggttgggaagagccgcgctggagggagcagcggatggataccaaaccgccccttggtgtgtctgcacccccgccccaactccccaaccagggactgctgggtgtctgccccttccctctccccagccctctcactctccttcctggaagctaatgggagagggggtgtcagcagtgcagtctgggaggggtgaggcgatttcaggccaaacaagcctgggcctctagggtggtcctcttgtgcgtttctttcccagcttcatggagccacgcaggggaggaaggtacacctgctcttaagtgaattctggggcagggggctcccatcaaggcctcaccactgcccctcttctaacagaaggtagacctagacctctaaccctaggaaaccaaccactggtctgtaccagactcatttctttctgccacgccgctttttctcatttcaaatggtggctcaggttggcattgcgccgtccccacagttgaccccaaaagagggcctttccctgtcaggactcgcaggaggtcgtaacagtcctctctctttgatggcaccaggtagggatggtcttggcgcctctccactgttctgggaggagaggggaccactattcgcgcacttcctcgaggcagatcccagattccagctgcgctcctcaactcctccttttctcccagccttgcaccctgcctaatgcatgcatgtgcttttttcttctgaatatatatatatttttttactctcccttccaagcgatggggagtttgacttgttagactggaagtttcctgaatgaaagtacccttttggtattgttccccactgtattctcagcacattgtagacggtatagtcagtcaagggttgaaggaggtgaggggctactgaatcatgacaattccatggtaccctctgtggtttgcagatcaatgctaattcataggtgtgtctttgctgcctgtaaccccagggcttagcccagagtatgccacccacagctgctttctgtatggtttttcagtgttggaaggagcaagagaggaagacagagattgtgaagcaattcctaaaagtaccaatacctgcattttaaaatatagagcacaaagaggcagaaaaatatgatcattttcctggtcatttgtattccctttgtggatgcctcaatcagacacaccaatatatgtgacttaggagatactagtcatactaagagaaacaggagtttcaattgcatgtcacactactttttgatgaatcactctaggttatgattcttaacatttgtgtgttcttattggctttgtcctttaagcttaatagtattaaaactttaacacattgtcttaaatacgaaggacataggcctgcagattctgatgtgagagttttatttctctagtataatgctttaagtaaatatatgcaagaatattaaaatgcataatttcttttaatagcaattaattgtaaataatgtaaatgaaaccacctttgcaaaaattataacaatgagaaaattatggcagtgaaggagatctgatctggctaacacctgtcttgcctttggccttcaagctgcccttaattattcctgggcttataagctaactttgggagacatttactttacagtttaaatgataatagccattccccaaaacttaaccaaatgcctttgtaaagctaataatgaaaccaccaggctaggaggatggagcaggctgagtcctgctaaggtgtagaca

SEQ ID NO: 1563222 - DNA, 4001 bp, Homo sapiens
tatcttgatcacatctgtatgcctagtactcagtaggtgccaacatttggcacctaatatttgttcaatgaatctctacccacaccattttctctttcctaaatcagaatgcacttatctgcctcaatgcatgacctctttgctccttctgcaaggtcagtttcaagtactacctcctccatgaggccttccaacagtctcttcacttcaagaaatgagccatttcttctcataggtcctgggagccctactgtttgtcctttccaaagcacttggcatactgtaacattattatgtaattatctatccattccactatactgggaacttctagaggtcggaaaagtatttgcttctatatacccaacccaaacacactgcctggcactcaattaaaatccagtggggagtcagaacagcaagatgattaacacacaggctttgggcctgagagcctgggtttgatacctggctctagcaattactggttgtatgacatgggtaagtgactctgatcctcagtttcttcacctatcaagtaggcatgttaatactacctaatctggtagttgtgaggattaagataatgtttataaaacattttgtgcaatgcctggcacacagtaatctcacagtaagggttaggtacgagaatatttattgttttgcttggggaggggattaagtcctgtcccttttcatctcagactagtgaaggctacagattgatctcactaggttcccaagaattccttgaagttgatgactgtctgcattctctagagagtcctacacttcaatagcccactgttgtcctgcaacaatgtctgatgcaaatgttaaaagcaaaatcaagcatgatggggacaaaaaaaagttccaaaatacacttagtcccagaatcccaaagtagcaatatggcccaagtagaaaaactattgggggtacaaggatattggaatactgcatttaaagacttaagaagttaccgacagactttagaatcagacagacttcagctgcaatcccatctctgcgacccactatctgtgtaccatttgcaagttacttaacctctccgtgccttagttttaaaattaggctaattgcatcaagacagttaagatagtagctttcattaagaaatacagtagcacatgttcacagagccaggtatacagaccctcagatgtaagcttatttatgtcctttctgaggccttataagtttccccaactcagcaagctgtactctaagagcaaaacgccacttaaatagccctccacaagaatatagctggatatgtctctacagttttcagaactatcacaagcaataaaagtttctgtgaaagataggtgatggcacatcactcagttgtcctggggcctgggaaagatttctcagtaggcaccaaggcaatctgttcttaagttgatgccctaaagggaagtaggcttggcgctggcttctccaaagcttgccatcctttgaaaaccaagcctaaagaaacaacctgcccacaaggcaacaaagcctgacagtaaacccaccaattcccttttctctacactcctctccacttctctcccttccagggcagtatgggggcataacaactcacctctgtgaggccttgccacattggtcaagggcttcaccagcctcaccatggtggccccaatggtgcggttctctctagggtgcccatgcgagtcagctgaacgccggtacaactccagcatgtaccgcagtgaatgccctaggagccggggcttccttggctgttcgccaggggattcttctagcagctcctcaatcaggggcaaagtaggggcctcagccagaagggcaatagaggactgccctccttctgccatttgggccctgtgttccatgaaaagcacgagttcacaaagaaaaagaattctaagaatactgaggaggaccatcttgaaaggcttagtgttcaacaacaggccccaacacaagcccaagggacgtcactctgaccatttcctttcatgcagataactgcatcctggctccacaaccaaggatggggcaagaaaaagaaaggcaggcaggccctatgttgctttctctaagaggatctcctggaccaaagttgcctcataacttggcctctttgcatcaaaagaaacagaaacagaaggtgggacaaggcagcatgcccctcccgctctcccgggctgagaacaagatagtacctattgagaggctcaggtaacttaaaaggagaggtccatttcaggacccacttccttaacttatccactagaatgaaaaaaagcagcctgatcctacttgcccctacagccttaaaagtagtcccttaatccatccttaaagggccagaggcctcctgttcccatcctacttccatgcctctaatgcagcatttctcaaaatattgtctgctaataatctgcagtgaaactatctggggtgattattaagaatgtagactcctgggtctgaaccaggattctctgggatggcgtccagaaatctggctctttaccagtgctccaagaagttcctatgaaaacctaaaatgtggaaactactgagtatggctgctggagcttgaagaagatgccgtaacagtggttctcaatcttggctgtagattggaatcatctgggaagctttaactattatgaatgcctgggtaccattctgatgtaatgggcctgggttgtaactagtgcatcaggatttttttaagttcacaagtgattttaatgtgcagccacgtttaaggactctgacttataattttctggtttaccttggaaggtgttgagatccttattgggcttcattagagaagcctgaggaaggggaagagtaatctatgggagctaacctagcccagatggttaatgtgaagcagcagggctcggccagttttaaggctgcctcagaccattattctgcagaaagatagtaggtatagtcctggccgtaccgaagtagaaacatatggggatctggagagaaactggggaagcaggtcaagacctggctctaggagatgatgagtcaggcttgatttgtgggaggcctttaccttacaccaggagtatctatggacagacattactgtggaacaggcgtggacttggtaatcaggcagatctgtgtttgagttgcaattctgtccctagctgtaatttaacctttccaaggcaaatttctagctgtaatttaacccttccaagacaaatttcttcacttccctacaccttagttttctcatctgtagaatggagataacacgttttacctcacaggttgttgtgaggaagcaaggaaataatctatgttaattgcacaaagcctaattagacacaagacatagggttacatgttcaaatttatttgtgctcttcctctgtttttttttctaacatgaccttgggccctggcatgtagtgtaaaacaaaaggcataggtttacgggtcctctacatctggactcaaatttcagctcaaaaactcattagctgggttactttaagcaacatttctcccagacttagtttcttcatctatactgctggctccttcagagagctgttgtgagggttgtattgtataatatacaagtaagggatataaacagatgattcacaataggcaaaatttagatggtcaaatgtatgaaaagatgtactggaaatcagaaaaacgcaactgaaaacaacattaagatactattcaacacccagtattgatagcacattaaatggatcgatagcacattaaaagtctggcactattaagttcaggtgaggatatggaacataggtataatatatagaatatctatatagatattctatatagagagattctatatagagagatatggaacatctcacactgctgttgagagtgtgatttggtataataattttggagagcaatctggcattatctctgttaaggttgaagatatacaattcagcaat

SEQ ID NO: 1563223 - DNA, 4001 bp, Homo sapiens
taagatacttcctgcaatacatcatggtgcacaaggaaaggcataaagcccaagttatgcctgagagggagattggggtggggggtgggcaatggagagtcacttcctattaccccgtaatagtcaaaatccaatgacaacataatctattccttgagtctggacacaaacacatatattccagtggttaataatcttgtttgattatcttgaaatgtgtttcaaatcacctaccatgtggttaatatactcaggaaaatcaagatttaacttctgcaaagcatcttcattttggctcagtcttatgacagtatttcagtgtttttactatagtagaattctcaactgtacaggaatagtcttatttctagcattgttttaaggcactattgccatttaaggctgggtaattctttgttgtgaggactgtcctgtgcactgcaggatggttagctgcattcttggcctctactcactagatgtctttaacacttactgttcctatcccccagttggaacaacccaaaatatctccagtcttttcccaatgtcacctggggagcaaaaatgccctcagttgagaaccactgttctaaagttataatttgccttagtaaagttaactaatgttttaaaatcctttatcttgaattcattatactttcattaagaaaaggtcatgtgataagtggatagaagaggatcttcacagtgtaagttaagaaacctgatattctttcattatgatcaagtactttgtggagacttaggaaaaataataaatagtataaaaataatggaacacatgatgtctcaccattttgtcatattcatagtaggaaaggtttgttttggtcaaaacaaaaagccgttctttgtaattatttggtgacattttcttcttttgctgtgatcttttgagaagaagttcttctagaatagattttgtatccatattatcatcctaaacaaaataaataattaaaatgagtatttgcagcatctaggtaagttctctttaaccttcatatcttttcctcaacgatttcctattaagggataatataaatgctgattttaataaatgagactgatgtaggattatagaataaattacacaatagctacagtttttctgctgcctttgctttgggttttataaatatgttgatttttaaaaagcactttatacttttgactcctcccactgtggataataaattcatcatctttgccccattctccagaccaccttatcaaaatgctccttactttttaaacattctatatgtgttggttgaattgaattggatataataaaacttcagaaaatttaactccagacagctcacaatttatgaagtaacggcctgtaatttgaccaaattacccaaaccactatgagacactgacattattgtaaataacacctgcagcccctgatcatggccagatctttaacataaattacacaggtataattttcaatatctatgagaatttaaaatcaaagtaaatgcctaagataagataaaatgaggaaaatgtatgagggtgcactaacagatgctatcaaaagagatttaaaagaactgaaaaaatgagtacatttacaaagtaaaaagactcttcctttttatcccaaaatcatgtaaaacattaaaacttaaggtatttctgaaaaataaatgcattaattttctaattctactaagacagttacttcaaccctcagtctaatatcaggtctgatcatgaaaagtagcaatgttgagcagtaggccagagaaacaaactttcttatgttcttctttgctttgtgaaattgcatcgttatttgaattcacatgcccaatagttaaaatctttctttattgataatctgaaggctttactcaccttagactcgctagagccgaagtatacatgtgggtccttaactttgactctcaagctctaagcaaaaagttactgctttgaggcaccatcactcatattccctctggctatgccagggtcatgcattaaaaagaagatatttgcatcccactcatcagtcttgatcaggaagcacccacacaggcattgctctgtctgcatggaggcgggcgccaagcgaacccatccaatcactagagggcacttctcactggcctgggagtatgatggacccactatggcagaagagtgaaatgaaagggagactaagaaatacagcctggcattgaattaaccatggttggctccagccagctttcctcctaacatagaccacacaactctcaaagtggaattaagaaaaccagcttttattatttactatgtagaacaaaagattatttattaattcctaaaatgtcctccaagggcattatttgatttttagacagaagtagtggaaatcttatccattcaatataataaagtcttggttactttttccctgggatattgttttagctatttaaaaaggataattctttcacaaaagtataatgggtttcttctgagtacaatgggtactatttgccatggtcactggtttctttgcccagtgatcaaagacagggcagagatcagggtagagtagagcctatggaggtaagagtagcatgccttccttttatctttgcttccattgcaaactctgcatatccacctgcccagataagcttattttctacatccaaagtctgtggccggaagagaatttgctcggagacttatggaaacaatgagggtctactttttttgagtgaaagcctcctttggggaggcaatatcacattggacatggttgtagggtacttttgccttttatatttccgtattttactaatgaagcagaaggagaaaactgtgaaaactcttgtcaattttttatatccacagctgaaacatcattcctcaaagcagagtgctaattaaatagatctgattagttgaatagaaaatttactttttaatttttttagatgctgaattgatttgtgacattaacaacactgtattaaaaatgtaaaaatcccaatgtccaaggtgctattcagtctttcccagtactatgtgctggtatacatatttttctgtctatagaactttcacacctaggcagggcacagtgtctcatgcctgtaaccccagcatattgcacattaggaggctgaggagggagaatcgcttgaggtcagaagtttgagaccagcctgggaaacatagtgagatcctgtctctagaaaatttttttgacaaattagcagacatggtggcatgcacctgtagtcccagctactagggaggctgaggcaggaggatcacgccactgcactccagcctgggcgatagagtgagaccctgtcttccaaaaaaaattaataataataaagaaagaagaagaaaagaaaaataaaacttttatgtgcatcacactaaaggtgagaatttttggaattttatataaaaaattaataagatgagtcacagagaccactgacaaattcacaaagttgcctctgtgtattgaaaggaagaacattgagtaaaaaggaaggtattgagccctcaagcaccttctccagtaaacctccaagggtttacaagcgttgttgcatctgatgaaatataacttgtgaaatttcaacataattgttcatttcaaaatcctgccctttatacattttttgctttcattttaagattcatatgcaatatatgtttattctataaagccaagagatacagacagggaaaagaaaaacacagcacatctctagatgtttttcttttcaaatatttatgtacatatgcttattttctcaaagatgggttcacatactgtgcacttgagtccgtaatatgttgttctcgtgtaacaaacacctgaagccacacgtttttgaggtacccatccaagaggaacagtccttcaaagctccactccctaagctgggctactgaggcttcctaacagtcttgaaggaccccaccttgatgactcaagc

SEQ ID NO: 1563224 - DNA, 4001 bp, Homo sapiens
caagaacaaaaagtttgactgaggatcaagtaaagtggttcaaaaagtcttaggatgctggccaaagacaaatactggcttcacagaacctgacagatccttatttcacatgatgttatgcaggagagggaaagttaaagttgatcttggcatgatatggacagaaatcttttaacattgacagtcaaattctcagcatcttggagcatcataccttaattgatccaaaataagtgtataaaaaccagacactttgggaagatcattttctcacaaagaaggcaagaatcttaatgctagtctttttggagctaagttttgctttaggtgtgagattaatcttcagtgccccatagagcttttctaagtcttttcttcttttcagtaacctctttctttctgctccctctcctctgcttagggcactctctctgggcaacttccttaggagaaaagcaaaaagtaataaatccatgagctagcatctcatgctgaattaaacatgtaacactgctttcatgatgccggttagtgcaagtgaaagcaccgagctgggttcgaatccctgctctgtctctatggaatctgtcatgttacttaacccagctaaacctcagcttccccatctgtaaaggcagtgaaacaataaccacttcgaagggttacaagtagtcaagagaaaatggcagcctaatgcccaacaccctagtagatattctaaaagcttatgtcccttctgatcactccataggcaaagttttaaaaaggaccataaaaagttaaaaaactaaagacagtgaaataataatgatccttaatgataaaattttacttctcatccctctgtccccagctcctgggtataggagaaaatgggaggcaggaagacctcctcatgtattgccatgtcaacaaacaccagtccatacatagtaggtttgtcgcagactttccatcctgagacgagttaccataaaatgaggttgaaccatacccttattgactgtgtatttgtgccaccatatttcctacaaataaatacttggatgtgactcaaagtgtggtccgtgcacttgcatcatccgggcgatcattagacatgcagactctcagttcccacccgagacctcgcgcagccaaatcttcattttagcaagatccccaggtgatccacgtgcacaggaaagcttgagaagcacttacatggaccacaaagttgcactccttttcaaatccaatgaaatcattgtggcccacaaaatctttcaaaattatatggatatgagtacaactgcatggttcacctccctcccacctgtctatctccatctaaaatacacaaagcacttgatttagggagacctcaggaacctaagagcaaatatttgtagctaaagtaacatcataaaaacacagttaaagaaggtataaggaacatttctatgtctctttggaagcagttatgaggccaatatgaaaggctatggaaaggcaatacctaaagaagcggatggagaaaattagcagagaatacacacaaagctaggtagaactggtggtgatacataaacaacctgagagcttccctaactgagattttgagcaaggagtgaatttacagtgaaattatagcagtttcagccgttggcctccaaattacctggtcccatctaaagtcccagagaaagccctggcaatttcatattaaaaatgttgtactatttttcttaaagtgagcttcccaaagtttgtaacttcaggccccacaacaccgggaaccaaacctattttccgcatagtatgcgacactgagtagccacctgccgcttaaacgcaccgtctcagcttgttccgtgcttgcctgggtccgccgcggtgcttggtctgctgttgcaggaacacggccccggctgtcctgtttccagaagcaaattgtttcacattttcctggctgccgggtcagaaatggctacattactcagtgcccccaacacgtttattgtcctacagagccttacacaatcccacaggaaaccacgctcaacacttagccaacacttgttgatctgattgaacgcaacaaaaacggagacaaaagcatacttcataaagtttccaattttgataactatagctcccacttttcccaggcagctctcgggtacatgtgataaccctgcctttgtttgtagagctctatgctggaaaggacaagaaaatatctcggcaaaacccgactgctgacgctgacttctctcacatgagccaggaaaccattaggtaatgcaaagtgcacagagaatatgcaatgaaaacttcaactcaacatttggacaaaggaaggccagagaatatgtaagaacagttcatatgatggaaaaggagcttatttatatagtttaagttattaagaaatccagaaatggaaaatagattgtttttgctaaggtatggtacacctagatcgcaatgaaaaagtgtgtcacttgacatcattatgacagactcacaacttttggcttcccccattccactattttctctggtgcataccggctggccatctgtaataaatctaaggacatattttatgtcctgctatggatagccaagaaaagtaatcatccttttggcatgcattgacacactgtgtttacttataaattgttgcttactgtaacttatttgtaagtatctatgatgtgaagaagtcttgggttggcagaagagagtgaagctactggctttcaaagaggtattcttttgagtgtacatggaattagcatcatttctattaattcgttcagtcaagtcttatttgagaacctgccatgtgctgagcattccgttaggggttggagacacaagagcaaacagaagagaggcagcccacatcttcaaggggcttatgtgtctgtgtggggggggggggaaccacaaatagtggtttaattacagtagagtatgggaaaaataacttgcagaaatattttttaatatttcagtttggaaactagaattttgggaagggaaaggagtccttcagaagaattcaaaagagtgtaacttacattctaatagcaaattaaagtcactgatggattccaaatagctctccattctttaggaatatagtaggtagtcattcaaaaaattaagggtgaagcagggcaagagtggcacaacaacctggctaaataaattaattctacactctgctagttaatttccttttccacatggcgatttgtatttacttcacaacttatatatggtaatatggcaaaagttcgattctagaataaaaagtaaacttagggtaggggaaggaggagttggtgatatggtttggctgtgtcctcacccaaatctcatcttgaattgtagttcccataatccccacatgttgtgggagggacctagtgggaggtaattgaatcacgggagtggatgtttttaccgtgctgtcctcatgacagtgaataagtctcaccagatctgatggttttataaagggcagttcccctgcacacgcactcttgcttgccaccaggtaagacatgcctttgttcctctttcaccttccaccatgattgtgaggcctccccagtcatatggaactgtgagtccattaaacctcttttcctttataaattacccagtcttgagtatttcttcatagcagtatgaaaatggactaatacagtcggtataactgtggaaacacctgggcacaatctcttgggatttccatcccttcttgggggcataaaacacccaaggacagctgggaggagtggtttcctctaaggcaaaatgtcacagatttatttactttattctattcattcacttcctctgctacttctcctgtttctttggctctgtattttccatgagtttagttacatcctaacttttggcaatctgctattacgataatatgacttcatttactcaaattatactctgcattgtcatctttactcagttagaatttt

SEQ ID NO: 1563225 - DNA, 4001 bp, Homo sapiens
ctgtgcgcatttcagttccagtatatgcaaatttggagtcactcctactgggaataaattagaaaaaaaaaaaggaagtggggtttggaatataaaaaggaattaaagcaaaataacaggattaactgtttttgcaatgaaatcttagcagagaccaaagaagaggagggaaactgaattgaggctagagctgcactctatctgttagaagcaatctgggacacatgcacaagtggctgagtgtataaagttataatggacaaagctaaattcctggaatcctgggaactaaggaggtgggcttgagaagtatactatggtatgatttgaagtttaaattaaaatgttaccgaaaggtttcaccacgtcaagtattgaagctactggggatctctgagatcactgaggtccatcaggaggaaaggcaatgtcactgtcaatttacgtgaaggaatggatcaatggggaaatgcctctaaacgtatatgctctctgtcactaagaaaattactgatatctcactggcatttaaggggagacagaacatgaaatacactgagcaaggccaggtgtggtggctcacgcctgaaattccagcacttggggaggtcgaggtgggcagactgcttgagccaggagttcgagaccagcctggccaacatggtgaaaccccgtctgtacaaaaaaaaaagacagccgggtgtggtggcgggcacctgtaatctcagctattcgggagtctgaagtatgagaatcgcttgaacctgggaggcggaggttgcagtgagcagagatcgcgccactgcactccagcctgggcgacagagtgaggctctgtctcacccctaaaacgcaacaattatgataatgcttattaagatgtttatcccatatctcaactgaataggaggtaaggcagaaaccaaagttcaaggttgtatcattaagggagccccggagtgataatggtaattaatttaagacacgatccggacacaatactgccaaagtcgccataattttaggttaacaatgacttagagattataagatatgagtaaacaaatacagtcttaccttgtatcatcgttcaactagagtgggaaaaagcaaaaaacattattgatcacattacgtttgtttgacatatatggatgcagattatatgacaattaggtcatgtgttcacgcacatggtatgaaagactggagaattactttagactgtaaacagctaaactgtatttcctcatcctcttcggcccctcctcaacacaatgcagcggaaacttttgcttccttcaagccccgcaccttctgttaggctcttcgatacccttcaaatgctttggttgatatctctgctccctagacagaagactcgaggcgaggcaaggggctctaactgtggtcagctgctgcgtcgtaatacccggacatcctcattatactccagtgtctttctgacctgccttgcagttttggtcaaccgggcgaaaagcgcagatctaaagagaagccccaggctacaggagaaagggcaaggctcccggggcctgtacagaccgccgggggctcgcaggagactaaacaagtgtcaggcggccagaagaaacggggctccccgcgacagagctatgtaaagggtgtccaaggacctaaatcgaggatgcctgtggcctccgcagccctgggagctgccggcacccaccccggggacacactgggactgctcagcagggttccatccaggctaacagacctactcacctcccctatgcacagccccattacttcctccttctctgtgctcagagcgtggttgagacaaacgaggaaagcgtcagactcgagatgaaccgcctgcaccgcctgcaccacctgcaccgccatcttggcccgacccttctcacgtccgcctcgggcccacttggtcctgaccaaccgggtgctgcggcgcagcctccccagcgcccagcgctgtgcgctccgcccaggcctggccttcggcgcgcgggttcctagggggcggggcttagggagcgggcggggctgtgggggcggggctgtgggggcgaggagggggcagcgggcgcgcggctggcgcgcgggggcgggccttggggcacgggggcggggcccgcccagcagcacctgggaaacgcccgcgcggtttggggcaggcgtggccgtcggggcggagggcggtggccggccgcggtccgggcgtcaggccgggcggcgggggcggcagggaggcggcgctctggggccgcaggcggacgtactctgtgagcggcgcccgggcgcctgggcaggcgcctcccgagtaccggcgcccattttgcccgcccgctaaggagacccgtgcgcggcctacacgcttgggggacagccctttaagacgacatctccgcgaacgccggcctcttgagccagggggacgctcttttgaaagtcagtcccaaaacagttaaggttttattttattttgttttatttccaagtcacagcccccgaatctcgtacaactctccctggaccacttccggttgccggcccgcgcctcataacttcggttcgagtgacctcggcccgggatgcccctcggctcaccccgggctcacgtcgcgatcctggcttgagtggcccagggtgggagacctggaagttttagcctagctgttctcaaggcggattaattagcccaagaaacattatattcatgtgagtaaccttttgcagaaacagtgttatactgtatctgaaaaagtatcactcttaagcttggctgctgctactttctacaaaggcttttaggtagctatttgttggatacagggaaggggaaatggagaacttcagtttttattcaagttcggatgtatcacattaggtatccagaatgcaagtttcctcgggtctccttgtctcgatgatatcagacagtaaaaatatatgtaaaagtaatttttatttcgaggtatgtcaaacgtgccaaggataaaagtacagatcttccaactcacaagtctaggaatcacacgtggattttgaaagcgattctaaatcaaagcacaatatatgccgtgccgcctccacagcccgtccgtgttcgtgtctttgatttggttttctactttgtgtagttttgaagccaggcaggtatggcagtactggaaagggaacattcccaaggtgctacttgaagtgttgatgctttgctcttttctcccaagtcagttccaacccaagtctccccacacatagggtccccatccagtgcaacgatctgtaatgtgcacgccagcagcctccgtttttacctaacgatctgtaaggatcacatggcacatctttctataattaatttgatcatgatgaaggttggaaaattttcgtgtgcagttacattggacctgtctaaattttctcttgtttcaattttatatcatatgttattttcagttactgtttgtggctagtatgccccgtcctcatggagcaggaacggctgttcttattattatgacattaacatttggtgatgggatatagtgcctttaggcactttcaagaagaaaaataccttttgtttgttatcggcggtagtcaatctcatattccagaatgaggttcactaacttttctaatgctcatggctgccttttacagctccaggcatttaactggagtagaacaaaattattaacatttatggcaagcttattatatgctagatactaagcatttatatgcctggtacatgtaaactgccccatttggagtcaagctcaacaacttccccactgtgtgaccttgagcaagttacctaacttctctgtgcctttcttttcctcacctttaagtggggatgataataattctgcccacctcatagcgccctatgaagattgtgaaaattaaatgagtcaatatatgtaaacatataggaaatgctaaataaagactatcatgattaatatgttctttaattctca

SEQ ID NO: 1563226 - DNA, 4001 bp, Homo sapiens
tacatcccaatatttttatttatgctaatctccttttccattattcactcctatgagatattccagatttgcaattttataattttatgtatagactctctatttaggacaaataaacatttatcagcatgactttatgtgtgactgagagtaattcaccacctgtgtattaccttaagtgtaatacacttaaggtacctaaaagacttcttttgtataagtgactgatgttaaactgaattaattttcctttcttcatgagtgaacagttatcaaccttcctagaagagaattccaagggtttatgtggtaaagaggagaggattaatttcttccccgtttgtaagtgttaattcgttgcccaacctgatcagtggacagatttagggcgaggcaaagttgcaatcagaagtcctgtgccggtacagagatacctcctcattcaaacaaatccaccttaaaatctacagtcattaagccagtctgccctcaaatagaatataagaccagtcaaagcaaaaatcatcaaaagacacagggaaaggttttcctcctctcagattctagaatctgaagaagttattccttctggtactgccaaacatcgattacttacaggaatcttgcaggctttgtaaagcatcatttttaacatttggagcctcaaattttttcatgtttttacagttattctacaataggaacacagaaaaacagagtacttggactgaaaatatcctaacacagaatctgaacaccctgactgcaagaggatctcacacgctctctccacagagctctaaaagtcaaccaagattaatttatttctctggaaatgataatgtcactgaatgcctacagagaaaacaagtagaattacgtgatgacattacactaagttaccagggagttgaaaacctcaccgtttttctgccattagctaatttgatgaatttcaaataaattagatgcctgtgtctttttaccactcttccaatatacagttatacatatgtggtcaatttcacacctatcctggttttcatgttgactatattgcaccactaggctgcactaatgtataaagcatgaatttttttcctttacacctggaacaatttgctttacttaataaactggagaaaaataaaaaccccgttcagtatacttccgagcaaacaataagaataaattatccataaagcatgcaatttcaacttctcctccgtgctaacacagaaattttaacattcttacactaacttttattttaaatgccaccagattttccaatctcacatccacgttacagagtgtgagaaaagcagaatagtagccagtaaatgctaagtacaagctttcctttctttttgcccaatttcacatcctggcaaatataatggagaaaagaaactcacctgtcagcgctgagaattgttaatgtgaacactgacacaccaacagaagtgagccggatgaaagagagcaccttacaaccaattcttccgaacagccatccttctgcaaggtagtgagttgcatccactggcacacaagttagcagaagtaaaagatctccaaaagccaggctggtgatgaaaatatttggaactgtttgcatggatttggtcttgaaaaagactttgatgagaatagcatttccaaggatgcccactgaaatgatcacagcataagtaatatagatggcacacaatgcttctattcctggagagttgtccccgctccatcctttatttgtgttatcgttagaaaccacagagcttgatgattctgtgtcatttgtgattgaaattaaagtctgattaggtgagtgaggctgcctttgagccatttcttctgaagactgtgtctttaatatttcttcttctcagttcaaatgcagttgattgtcacgtccaatgcctacgtctagtaacgagatggtattaggagaacagaacagaacagaatgggaagaaaatccaagacatccagatactcctttgcttcagttctgtgtgtctcccagcatgcttggctaaatgcttacccatctggcactgaagagtaggaggtggagttttattggcgtgtcctgtcataaggagagggagggggctggggaaatgctctgcagttgcttattcttccctgttggggaatcttgggaccaactagaccctattaaatcgtcttatttattattagaatcaccctgttttcatatctacccaggatggtctatataggttttgtcaattttttttaagaaaaaaaccatttatccccctgcaatcacatggtagtctagtgcattttgttttacatgataaataagtgtaggtgtcccctgaagcacaaccttgaacccactcctcaaaatttaatatcagagagatggtgaagcaacagatcatttacacttcgacagggtttatgtcacctccaaggagtgatcattcaggtcacttgggcttaatacctagctctgtcacgtggtaaaccccaactttgcagttatccaggctgtgctgtacactatcaaaacaacctttttaattttttttttttttttgagatggagtctcactctgtcacccaggctggagtgcagtggctcgatcttggctcactgcaacctccacctcctgggttcaagcaattctcctgcctcagtctcccgagtagctgggattacaggcgcccgccaccatgcctggctaatttttgtatttttagtagagacagggtttcaccatgttggccaggctggtcttgaactcctgacctcaggcaatccgcctgcctcagcctcccaaagtgctgggattacaggcatgagccaccacacccagccaaaacaaccttttaagagatgaaaaatccaggcacagcaccagttgctttgtctctaaatgtcctaataaaaccactttttactgtttgactgtctgttttaatgccatgttttcttttaaggggctgtttaggatttttctctctagaaatggttaaagggaacctaacctgccttattccaaaacaaaacaatacagaacatcactgctcaagctcctgacacaaaagaacttttaagaatgaaaatcatcatttgcagatgaagaaatgaaataggtgactccagggatgatgggcatgtagatgatgtttacatcaactgaaagaagtacacatttaaggcaaccacctcagtaccagccagagaagctactttttacagaaaacataaccatgtgctttatatgtatgtgtttgtggtgggggcactgtttgggagcaggaagctagcagttggagtgtagttactaattgaagctgctaagaaatattctctgaaattatcaaatgcaatgcataatctctcagctagaaaccatgtagtgaggtgttcataaatataaccatattagaaagtagtctggggagcgaagtgaaaaagagcaaagtatttggctagctaatgaacagggggaacaacaaaggttgttctttatacttagtaggggcaatcagttcttcagagaaagtgaagtggatgaattgaatcaattacctccttaatttcatgaagggtggaagacagatgtggtttaagtcccccaaaccacacctatcccccaccctttataagttattgccacagcttgaatcactcagctaaataactgcctttgatgggaatgggggtgcgggggagtgtttgcataaacccaagttcctaagctttcagatatatacactctagtaatttcatacactgggctggttctttaagattgtctctacagaaaagggctccttaaagggttcacatcttgttctcagcaaactaatgataaaatctccctgggactcctgtgtatcatttaccaaggagcaaaccatgtcttccaattcacaccacagccgatctccacatggcactgttttgtaagttctgtaatgcttgcatgtgatttctgagattatctgaattccca

SEQ ID NO: 1563227 - DNA, 4001 bp, Homo sapiens
ccttcactaaagtatattccatttttaaatatgtccattgttgtctccttgtaaacccaaaatcgtgtttcaccaattctcaaaaagtgataactcagtttctatttagtgaaaacgggtctatgcaaatgcgacttaactgataattgaatgagcttataaaatcggagatacgtaacgattatgcttttactcagtagaccattacctaaccggcaaaatttgaaattggcttgacgctccttattatttttaattatgtcgtttttcctaatccctggtccgtcaattcccctccagagccccttcctcccacgcctcccccctgcccccccgccccccccaaaaaagaccaagcctggccttagttcccgtatttcaggccaggaccaaccagaaaccagttttcttccactaatccggaactccgggctgttaccaacgctgtcattggccagcgtcagaccttagtacgtgccccaagataaccccttggtttctctcccttttccgcctacaatgggccttccccaatgtttgtaacatattcataatccacaacacggcacctctgataatcaactcacattcttcaaagttttcgggtggaaacaagcagggccaaggggagggcaaggtaccctttttccgactagcagggatgggggaaggggcagtcgttctttggctctgcaccgagctctagaacctcgtcggctgagaggtggggggcgggttgggggtacaaggtggggagggagtggtgaaagagttaggttaagttgaaatgaaaactttactcaccagatcctcgaagcttcttcggtgctctttcccctcccaatctaagcggcgcggaatcagctgggggccggacgaaaagaaagggggaagcggaggcaaatgatgaaggaaaagcctccgctccccatcaactggacccaacctgtgtcccagtcctcaacactttaccgtctttatttctctcggcctgatagctattggctcagagctagacaagtatatgggggggggggggaaggggggtcgagaaggaaatcctgaaaaactgcctcccacaagcataaagcggggacgagttaagaccccagcgttgtctgccccttttgagggaagaagccaattcaccccggtgacaacagctacgggtacccagatcgaagcctctatcccagcccgtcttccgcccctgacttgccctccccttcctccagtctcacctcaaccctccccacccttcccgaaggggctccgtacctgatgctcctcgagctcctgcactagcacctgagcaaaagggaaacacagatatgaggagcagctcgggccatcaacccattcctccctccacacttaaagcccagccgctgaccgtttgactagtcaaggccggcctttccctcaccctcaacggaactgctcgtcccgctgcctcgatttccccactgggaccattcaccacgactcccagatctctttcttccccttacctgagcggatttgttgcagggtccagactgcaagaacctagcgatcaggtaatacagctctggggaagaggggggaaaagaggttcagagggaggtagagaagagaaatagaagctttttcaaaagaaactgacagccttcgcgctaagcccccattcccttagcacccccccaccccccgacacagctacccaccggcttcgatctgggtaggtgctgccgccatccttttcccgagggggtttgggggcttcgctccggaggggctggcgggggcgggtgggggcgctgcctctattgtggtgaagcccccatgcccgggagtcccgccgcttccgccgcactcctcgtcctagtttcgctctctctcgaattcatcgcatcacgtttcgacccatagatattctagcccaagagctgaggaggcggaggaggaaggagaggagagggagagggagagagagagtgagtgagtgagagagagagagagaagagagagagagagagaggaaaaagagagagagagagagagagagagagagagagagagagagagagacgcggggggtgggggggcggagagagagagagagagagagatagacggagcgagaagagggaggagccgaagtggcgaagaggtgggcgggggcaaagggggtggagagaggggagggtaaaaatggtgatagggttttgcagcgctcatagttccccgctagaggcactaatacagcagctgagcctagactctcccggagcccgatggttgcttagctacagctctgggaaggagggggaggtgctaactgacggccgacgctctggcagccgccttggaactctgtggtggcattcgcgtctgcgagctccggagtgactttcccttcctgtgaaggcaatccggccctttccggtggaggacccttccccctgggttgatcttgaggaacttaagagacggtgttttgactcgactcctttcccctttttcctcccggtaccaaagcggttttgtttgctgtttatactctaccccgtggaaaggcggctagctggctaaagggttttatgcctgggggaggatgagtcgctatttggtcgtgacttgtttctgtttaaaattattattatttaccaaatgaaaatgttgtacttaccagtccaaagtgcggggcttatattgttagaagaccacttaaaatgctcctggattctgacaaatattgcatgagaaatttgcaatcagccgtgaagcatgtttccccttctgaaagtttaacacgtgccgtatctacggctgggatctaacacatcccattcctacagggtaatttcctattgtgttttcaaatactactaaagtactttaaccaagagttttcaataatctttatgtattattgcctatctctatgcaaggtatcaatagttttctacaggttcgggactacactgtttaatatataaccccaacccttggtaccgcactgaccttcagtatttggttgctgaaatcttcaatgatgaaaggggttggtatgataattgacacagattagtaaaccgggtccttttcttccctactttcccgtaacatcctgtccccaccccactccctcacctaaacctgatgagaccagaaatgcattttaagttgcatgtattatttacattgaaatattacaatttgaaggttcatctaaatttaaggctatattcttgggaattgggtttcctcactcagctctgccactgaccacagtgggccttgaatttctaagttgacataaacttagcctaggttgattagctctcacttgtaatttttttttttcctcagaaagcaataaccacaggaggtaattgtgaagtgataggcttatctttggttgttattgccatggaacttgacaaaacaaatatgaataattgatacaacaaaatgatataaaaagatacatgagacctagacaactcattgcaagtagtttagcaaaataccagactgaataattttatagttgaagtataatgtacaggttgagtattctttatccaaagtgcttgggaccagaaatgttttggattttggactttttcagattttggaatatttgcatatacataatgagatatttcagctataggacccaagtctaaatttgaatttcatttgttccatttataccttatacacatagactgaagataattttatataatattttcaataactttgtgcacgaaacaaagtcttgactgccttttgactgtgatcctccacttgaggtcagatgtggaattttccatttgtggcatcatgttgacactcaaaaattttggattttggagcattttgaattttggatttttagattagggatgtttgacctgtatgtaacagttaacacttaacaagccattatcatgtcctcagcacttttacgtgcttacctcatttaatctttacaatgaccctaggagata

SEQ ID NO: 1563228 - DNA, 4001 bp, Homo sapiens
tcatagtgataatttaaaattgcaccaatcccccataactggatggaaagttacattagttcgcaccataaggagtttacaaagaattccagggtgggtgcggtggctcacgcctgtaatcctagcactttgggaggcccaagcaggcagatcacctgaggttgggagttcgagaccagcctgaccaacatggagaaaccccgtctctactagaaatacaaaattagctgggcgtggtggcacatgcctgtaatcccagctacttgggaggctgaggcaggagaattgtttgaacccgggaggcggaggttgcggtgagctgagatcccgagatcgtgccattgcactccagcctgggcagcaagagtgaaactccgtgtcaaaaaaaaaaaaaaaaaattccaaacaaaaatatcaatagccatacgcaatggaaatttggacttcaacacaagcaagcagtttaaatagtttgaatataaaaggagtcagaatagacaggacaagccctaagggacactgtttgggtataatgctttaggttgccatgagtatttgcattttgtggcttatttggaaagtgacattattttatcaaataactgaggctccagagaggctggagtctgggcaacttatccaaggatgtcttgattggggtcaccaatcacttttattctaaatgtcatattatttgctctaggtaggccctctgggggacattggcaggtctgaggcagagtaaaaattatagcaaatactgagatccagcacttactattgccaggccctgttttaaaagctttacatgtatttgcacatttactgctcacaaccaccttatggggaaggtgctaggcaggcagggaggaggaaatggaaagggaaaggaaaagggaaaagagcgggggaagaaaggagcaagaaaaagtcaatgcaattcggcaattatttgttaagtgctaactgtatgtcagggtctggtaatcaacagaacagaggagggtataatgaagaggggatataggtagagaaaagaggatgagtgggaagaggaggaggttggagaggaggaaaggaaaggagaaataatgaagacaagagaaaagcaagccatgcacatggagggcaatggtaagaggagaaacctttgccacaacctcaagggttggccgcactgtctgggctgaggcagaggctgctttctcctggcccagtcttttacccattgttaccacgaggttggcacagcttccacacagtcctttaataagccagctctgaccctggcgacatttggcctggtacagctcaaggcaggtagcctacaccctggcctagccaggcctttccctagctcacaaaggtcaacttcataacgtggagcgtgagcttttaccatgttctcagagaatctgcctcttagtatttctttttctaaaggcttcattgacccatgtatccctattgagtcttcaagcactatttgacagaagggcttgtttttatctgactgctccctgcaatattacttttccactaagtttgccagaggtacccctttctaacatttgctacctgttcggatggtcacctcatgtcacatttttctcttcctgttccgcccaccctcagcccttgtcggaaaggaccctttcggcctctctaatcaccagaagggactgccagggccttgtgctgatgacactcccaccctccgtcagcctcctccactagctgataaatggcaccagccatgctgtctctctggtttttaggggtcccaagcaaggtacattgctgctgctgcccagcccctgccataccccagacccacctcagtcctgacttaatgcaggtagcttcccagatgcattgagatgccaggacttggaaggtgggactcgatcgcagcagacactggccctggagacatattcttacagtccagagaggaaggacagtctgagcaaaccccaccctttcacagccactcagttccctttttttgcttcctgacctaaaccaatgtctttttttcttctcagcagcatgctatctggttccctgctgccgtccctattccaccccctcaactgtccccgcccttcatttgcttgggacctctgacactactatcttgagtctatctttgaaagaacctttctcaacatgactggggccactgagactctagatggggctggcctgagcagacaggtcatcaagctatcctcccagaggtaaagggacaacatacctaaagtactatgaagacagtcagcacagggagaggggcttacaggaaagaggagagatgctgggggctggcagacacagagcaaagagactggccaggaagagcgtttttcgagtctcctgtcctccggggcagaggagtctcagggacacacagttgaacttgatagtgaagggaccccaaaggacaaaacaagacagaggtagagacaagacttccccgtgctgagtcattttctaagaaagcatttttcccctacagataaaaatgtcggaatataagcccacagaaatacttgtgcccttccccattttctgtggatgttgactttctccatttaagatttggcctcagggattaactctcaatgtccacctttctcttgagtcctgtaaaccggtaaagcagactaggtatgtcacttgaagcctggaggttttctcaggggccccctacattatgctccaactgcaatgattcccccagggattctcctaggaaatgcagccagtattgaatgcagaccatgatggtggagcccctgctgactgatctgcctgcccaccttgacacctcgggcactgccatatttccttgccccaaggcactgtatcctaatgtagaaacagatcacaggtcccactacaatttcatccgaagttttaagtcaacaggaccttatttttttttctttattttgtctaaaaaacaaacaaacaagcaaacaaaaaaaatggggtatatgtgcagaaggtgcaagtttgttacataggtatatgtgtgacatggtgatttgctgcacctattgacccatcctctaagatccctcccctcacccccaagccccaacaggccctgggaccttttttttttttttttttttttgagacagggtcttgctctgaagcccaggttggagtgcagtggcgtgatcatggctcactgcagcctccacctcctgggctcaagtgatcctctcacctcagtcaccctagtacctgggactataggcacacatcactgtgctgggctaatttttctactttttgtagagatggggtttcactatgttgcccaggctggtctcaaactcctgggctcaagcgatactcctgccttggcctcccaaaatgcagggattacaggagtgagccacctctcccagccatcaacaggactttaaataaaaacatttaaagtatttgtagactgatgatagagtggttgatactcacatttgcacaagacagatggacagcatgtgttgtatgattgccttactttattgacaacgtctatcctttcgctagtcacccccaatagctgttccactcacctgcctgagggttggccacaggcattcatcttccctcctcttttcttcagttttttttttttttgagacggagtcttgccctgtcgcccaggctggagtgcagtggcatgatctcggctcactgcaagctccacctcccgggttcacgccattgtcctgcctcagtctcctgagtagttgggactacaggtgcctgccaccacgcctggctaattttttgtatttttagtagagacggggtttcaccatgttagccaggatggtctcgatctcctgacctcgtgatccacccgcctcagcttcccaaagtgctgggattacatgcgtgagccaccgtgcccaggctcttttcttcagtcttatgccacttgttgtcacatgccctgtcctttctcaagatccatc

SEQ ID NO: 1563229 - DNA, 4001 bp, Homo sapiens
agccaaggtgacattgaggcttccttatggaagtaaaatatctagacagaggaaggtaacatgccacttactctgcaaagccagaccacacctagagtcctgcattcagttctgagtgcctcgtcttaggggaaattaatgagcaggagcatgtccaaaacagagaacagctcaagcgatcctcccacctcggtgtcagcattggtgtacaaactttcacttataggatgtataagctctggggatctaatgtgcaatatagtgaccatagttaataatactgtattattgaaatttgataagagagcagattttaagtgtcctcaccacccccatggtaactatggatggtgatggatgatagatgtgttaatcaatttgactgtggtaatcattacacagtgtatacacatatcaaatcatcatgttgtacaccttgaatataaacaatttttgtcaattaaatatttttaagtaaacaaaaacaagcaaaacccccacaaagccacataacaccagatatgatagaaagaactaaggttgattaaatgaagaggggccatgttcacggtcttcatatttccatgttactaacataaacccctaaaggccagtgagattgcttaagaatctggaaagaaaaagaaaatgctggaagtttggcaaagaaattttcaggaaatgtagcaggtagtggtaatatatttattatctcattcccagagaccacccaacaaaaaagggggtgatcagagtgtcagctcaggtcccacgcgtgttcctggagggttgtgcaagcaagataccccagactctcacggttcttcagcccctattccactgccacctcctcctgtgtctcagcccaattctgtctcctcaccatcctctacactgcagatgcccctgcttcctttgtatgatgtagtggttaagtgcaaggctatagtgttagactacctaggatcaaattccagctccacaaaaaaataacaacctgtgtgacttcaggtaagtaaacttaacatctcttgtgcctcagtttcctcacctgttaaatactaatactggtatatacctcctggggttgctgtcaggattaaaaggggtagtatgtaaggtggttaggagaatgcctggcatatagtaagtgcgccataatttttttagctattataattaccaggccacaacagcaatattttataatgttaaaggaacgcgggctctagagtcagtctacttgggtttgtatcctagattcactaaataccgttgacattgggcaaatcgtttaacatcctacagcctcaatttcttaatctgtaaaatgagaataatagtaccacctgtctcctagaattattgtgagaattgtatgacacaatctatttaaaatgtttagcaccctgaagtctttctatgctggactctcttgagacctagtatatgccttctgccaggtttgcaaggaagggaagagccgctaggtactttctacttctaggcttgatgattgctattacaggagccaaacaatttcattgtcacttttcagaacctagagctgctgacttactccctcaacagaagggtgctgctttaatgccaatcattgttccttttcttcaaagtacttagttcataattgcacatttataagcctattagattactgtacctctcccccggaacagtgcctgccacataatgggcatccaataaccatttgttgaatggaccaactggccatgtgatagatgaactggaacaattggctccctccaggtcttcattgaattagcagtttgctgcgaaaggtgttcccagtgaccttgaggtggaacaggaatggaacgtggaggtggaggaccccttcattcgaccctagtcctggcttccctcggggacggggaggccagaggatctgggaaaaacactgctcccttcactgaacgccactacgtagcagagtccaccaaaagagataaagtgacgaaacgttgaaagctgcggggcgggaggaagtcggggtgagtggaccaccctttaggcggagtccttccttaagctcccgcccgcggctccgaactgagtcctctcagccgcccgagggcgctgcgctgagccttacactctatgattgctcctaccgactcccatgaggaagtgcgatcgggaacctcctatatacttccgtttgcctcgcggtttctttctttccgcgccgatagcgctcacgcaagcatggtaggacttgctggtgggggccgagtaacatccagcttaatctttcccccccttcgtcgcccgtgctatgccgggatgggtccaggctcctgtgtggactcgatatatcagagcaacccaatcttgccgggatcaaccctaaagggaccgggctacggggccaggaattgaagtgatgggttcaaagaggtagagttagccgggggtggagttaatgaggtctcttccctctttggggctcgacggagggaggaagctctgcttgaagcacatggggctggcccaccctgtagtcagaggtagcaagtaatgaggagtcctcctggagtgcctcagctttagctgggtaaggtagggcgttgtgccattgtggtcaaataacattgcacgttctgaactgtttctttactaggttaacgtccctaaaacccgccggactttctgtaagaagtgtggcaagcaccaaccccataaagtgacacagtacaagaagggcaaggattctctgtacgcccagggtaagatggattccgcataatttggtgttaatgtgacatttgtgttgtagaataacatacgagtccgggtctctctccctccacgcctggcttgagcgttaatatttctgctgcgaaattaagataaaacctgtaagacttacttgctgatcttcagtattttataacaaataccaattcgttttcccaggaaagcggcgttatgacaggaagcagagtggctatggtgggcaaactaagccgattttccggaaaaaggtgagtggtagttactatttgacgtttcccagttaattgccgtaaggatatgcacttgtctctagtccacacacttcatgatataggtatagcgttagtttagcgaagttttcactgcactgatatatctagtaggtgatggagctgggaatgcaactcatgtctgactagtccacaatactgcactatttcagtgtttacgattttttatcctttcccttctgaagaggcaaaaaattgaggaatgtgccctgctttcctaagaactgaagtgtgagtacactggtaaatcctttcatttgccttgttccttatctgtcaatatgtctgaatcctcgcttgttggttgcactaagaattgttctgttgtttctcatcacagaaatctgcagtcaactacctgttctcgtgaagtcttaaaactcttatagaatagccatttaggcctttctgctagcctcctgaattctgtattctcaggctgagcgagtttctgtttactctcaaaccttaggtgatttggctaactcttaaagtaattagcacgatgattggaacggagcattctctccaacacagcatttcttttggcactttgcttcttgtgcagtttagctccagaaagtattaaggaatgactttagtgctcatttggatgcagtaagtggtttgatctcagggtggcaaaaagaatgctttttttataccttttcacattcggataacttgtttagaagacagaggttctaactaggttttggcctattaagaactgcaaactagcagcagcagaactctggctaaaggggcaagcttattaggaaattgagtatttaaaagttgagctaccatatgatccaacaatcccactgctgggtatatacccagaagaaaatcggtatatcaaagagatatctgcactcctatgtttgttgtagcactgtttataatagctaagatttagaagcaacctta

SEQ ID NO: 1563230 - DNA, 4001 bp, Homo sapiens
agtctcttgaacttgggaagcggaggctgtagtgagctgtgatctcaccacggcactccagccagggcatcagagtgagactctgtctcagaaaaaataaataaataaaagaaattaaaagctgacattaaataaacttgttgaaaaaaattgtatgttaaccatttattctagtaaaggctgaattttccaatcttccctccatcttcagaaaaaagcaatctattgagctacttagacttcccagttttctcttatggttgaaaggagccttagaaaactacccaatgtcagtcacttctctcattttacagagaggaaatggaagtccacagaggttaaataactgactcagtcacacagttagacagtggtataagtggactagaaaccacatttctcaatatcagtttaatggtttttttccattacagaagaataattgccatagtgcttctaccacattagagtttaataaatgggttactgaatatccttgttttcatacaaatgggaaaaaagtgggatctgttgaccataactgatattttgcacccaacagcaccatattgctacaaggaaaccactcctgtggttttctgctagaggaaatggaattttgacttctaccagaaagacaaggtgtggaatagcttggcagatgtaatttctgagcggtgggtggggcaagaggcaggaagactttcctgtgtcactcacagaacttggtcaataaacacagttccaagaagagaagtgacagaaaacaagctcggcataatattagaattgtcggctgtgtgcggtggctcacgcctgtaatcccagcactttgggaggccgaggcaggtggatcacctgaggtagggagttcaagaccagcctggccaacatggtgagaccctgtctcgactaaaaatacaaaaattagccgggcatggtggcatatgactgtaatcccagctactcaggaggctgaggcaggagaattgcttgaacccgggaggcggaggttgcaggcagtgagccaagatcgcaccacagcactccggcctgggcaacaagagcgagactctgtttcaaaaaaaaaaaagaaagaaagaaagaaaaaagaaaaagaattgtcaggtgcactctaagattaatttatataggatttttgtatttcatgtcacgcagttttcattatttctggccaatacataattcacatgtttctttgctcaattatggcatatgtgtcagaattcttcctgatggtgatcctactcctggctgcaaaaatagtgatcaaaactcagtaagtctacacattttaaataaaataatttgcaaaaattattctaaggagattttttccccatcacagaggcaaaaaatataacactagggatgcatatgataggatactttgtgcagaaggaaacaaaactgcacacgagcacaaatgaaacagaaactaccccaatggtttttagatgaacctttttgggtgaaggtagttggggtgaagtacggaaaacgaagacgaaatagggaagagaagtgagagggaggacatggtaacctcgatatccctctgagggaccaagagagcgcccccaggaagaagactctcggtctcctgtgctgacaatcctcccgctgcacctgcccaagcatcccgcgtggagcatgctgggagagggctggggcccaggcctcccccaagagagggaggggagtcagggtgcgcttggggtgggggtcgaggccccgccactcacccgcgtctagaacggcttggggacaggaaagcgcagccgcgcacgggtttcctctcacgttggcgcaccactccgttacgctcctgaccaggctgttctagctgcaggcggtgttctctcgttggtctcgctaaaggtggggagcgccaggaaacgagcgccgcgaaggcgggggtagtggggcggggtaaaggagccggcggctgggcggagccgtccgtttgcccgcccgcgcaggcgtcggaagggccggcgcgcccgctgcgcgcacactgcgtgccctttctccccgccccctgccgagttcagagacttgctataggcctgcgtgacccggacgctctcctttacccaacgggcgtccagagaagaggccgtgcgtacgactcgctgacacctcccatttcaccttcctggcatggaaattgcgagagcgagagattcttgctcccggtgtcgctttttatcagacctcttgatggtttctctgatgtacccctgcgtccttgaaccctcatattgcccacccccccagtactcctgggctgagaccaaaacgcaagccactgaaatagtcacgtaattatgacaccaacggtttcctattattactggaatgagatctgaagccccactgcctggaatccaatcctgtcttcaccacaccttttgatatcccaggaaagttatttcacctcgctgtgcctcagttccctcatttgtaaagtacagaaaatgtcacagtagtgcctatttcatagaaaattagatgagatagtgcatatgactcccttagcaaaatttcaagcctagagtaagcatttactaaaaagtactggctgttattattcaccccagtatttctagtacttaaccacagtgccagcacgcagtggacagtaaatattagtggaattaatgaatattagaactacagctgaggaaccaggcctaaaaaggataaggaaatttcaaaagtccacacagcaagttaatggcagaggtgggactggaatccaggtctcttttttttttttttttgagacggagtttcactcttgttgcccaggctggagtgcaatggcacgatctcggctcactgcaacctctgcctcccgggttcaagcgattcttctacctcagcctccctagcagctgggattacagacgcccgccaccacgcccggctaatttttgtattattagtagagacggggttggccaggctggtcttgaattcctgacctcaggtgatccacccgcctcggcctcccaaagtgctgggattacaggcttgagccactgcgcacggcccccaggtcttctaattaagagtgcagagctctctttccacgaaatatttgatgtgtctcttttttttttttttttttttgagaccgagtttcgttctttttgcccaggctggagtgcaatggcgggatctcggttcactgcagcctctgcctcccgggttcaagtgattctcctgcctcagcctccctagtggctaggattacaggtgtgcgccaccacgtctggttattattatttttttttttagtagagacggggtttcgccgtgttggccaggctggtctcgaactcctgacctcaggtgttccacccgcctcggccttccacagtgctgggattacaggtgtgagccaccgatctgtcttttaaaattcatttttggccaggcgcagtggctcacgcctgtaatcccaaaactgtgggaggccgaggcaggtggatcacctgaggtcaggagatcaagaccatcctggctaacacggtgaaaccctgtctctactaaaaatacaaaaaattagccgggcgcggtggcatgcgcctgtagtcccagctactcgggaggctgaggcaggagaatgccgtgaacccgggaggcggagcttgcagtgagccgagatagcgccactgcagtctggcctgggcgaaagagcgagactccgaggcgggcggatcacgaggtcaggagatcgagaccatcctggctaacacagtgaaaccccgtctctactaaaaatacaaaaaattagccgggcgaggtggcgggcgcctgtagtcccagctactcgggaggctgaggcaggagaatggcgtgaaccccggggcagagcctgcagtgagcccagatagcgccactgcactccagcctgggcgacagaacgagactccatctcaaaaaaaaaaaataaaataaaataaaataaa

SEQ ID NO: 1563231 - DNA, 4001 bp, Homo sapiens
ccatacattactgtatttcagggagaatctgtccgtacataagtttgtccataaagatgggtccctgggctcgatggactacaggggagctttctgtgttatatactctttgccatcactgatgatttatgtatatccttggattttgctaacctgccccttagctgttttccagacttagaaatgcgtggaaacaaagattttgaaagccctcaatgagtcattcataaatcttgtatttattaaatgacaagcagcttgaactctgcctgattaagccattcatatgtaggcaaaacagacagaaaaaaaagaatgtactctgactaaaggttacaattacattggaaaaaaattccttcattttcaacagatggacccttcctttgatcaccacctgatttcaaaaggcaacaagcctttttgcaattccctgaaatctaaattagagattatgctgcgatatcttgactgagaaagctcagcttccccctctcacccacttcttccctgggagcatgatcccaatgtgtggtagccaaaggtttcagaatatgtttctaataactgctctttgtgctgcaattaattgcccagtgccaccaatcagatgaaatgcattttcccctttccgtcaaatttcccaaatattcatattcattcattcactcacaattcactcaacctttactgcgttccaattgtgagtggttgcagctttttgcctggctccagggagaagagggcaggtgtgtacaggcacagagaacggtgcccttgctgcttttggcatttcagtgaattccaaccctgatgctgaggttaaaaaaaaaaaaaaacctcagtaaaaaatattcctagaaagctttacggttttccacttccaacatacccaagaagagtggccactcctgagagatgtgcagggacaattcaagggtatgctctggggcagcttctctcaccacagaaatagcactacttgtctccatactctagcaagacttttaaacagcagagtgatggccagattatcagtaaaggaagaatgggaagcagaaagcaacgcggttttcagtggctaggagagaacaagttcttttcaaactaagttgtacacatcaactccccttatctctcaaactttcccagcgaaaatacacaggagggaagggcactgacatcaatattaaccaattgccacaagcctcggggcagaagcatttaacattgaatgccacaagaatcacgaaaaccaacaaggtttgtatttggaggttcctctccttcagctttagggctgagcacaaaacaaaaaggccagaagaaagaactgcagggtgaagaaagctcagatttgcccgcatggcacagttgtgatgctgataccctgtcttgggggtgagtggctgtgagtctctccacagcccctagcatagtgggtggtgcggatacaatgcagatctgagggagttccagtttactgagcctcggtttctggaaccgcaacctcagatttgtcgcccttacccccgtctctagctatttcacagaaggctggactttctggagttatttggattcaaccaaccttggcaaccctacctaccaaggaactgctctcccgcgcccccacccccttttctctggaacagctgttatcgcgtcctgtgcaaagaaccttaaaggatgacagccgtttggtaactcccatagtggaggaagagggctggggtgggggagttcgacaccccattaggccccactcagtactcccgggcgccctgccgggacccagacaatactcgcaggatcaacagctctcctagctccggaacccggtgcgccagagcggagagtcgtgggaagaatcacggccctgtctggatcggcctgtccctggtcgccccccactcctctcggccacccgtccttacctgagcgtctctccagatcacgaacctagccgctcgctcgcctacggggatccgcagcctgcacgtccggccatcgaagctacgccccctcgtgccctgttacgccccacataccagggccacgcccctcaatggaggccacgcccccacctggcagatccacgccccactacgtccgtacttattgccccggtcacgcccaaccaaactgtgccagtctctgccctccaccctggccacacccctttagctacagccacgcccctctcgcccgggccacgcccccattcacccctgctccctcctagccccgcctctgcgctccccctgggctcttccctctagcctgggccacgcctctgagccctgctctggccccgcccccgccggaccaatcctccctcctcctgctcgccgctggccgcattagtggattgaaactagacctggggcttcagagccttatctaaaaagtgactttccctcggttcctcccatctccaaacaccacgactttatgtgctgggaacaggtgactcagtagggaaacaaacactgaacgtgtcctttcccgctagttttcatgtccaatttacccgagtttctttgagccagtttttatgtcctctgaactcgaactgtggacccgtgttccttccagcccaattttcatatcctctaaagcagaactgtggatgtgttccttctagcctcttagccgaccttaaatactaggcagatgagtggaaaaaacagaattcctctacttcctgatgtctccttcagatgggctttcctaagcacccagtgccccgttgctgctgagggcgtgtgaagacatcacccccactttgtgctttgagattactctgctatccttcttccctcaatttacaactctgggtccacgtgaaaaatatgaagaagctataaccagctttcttcccctgtgtacataaatctctgactcattcatgcaaatttcatttattgagtacatgctcccctgacaaacaagacaagcctcaagaagcttacagtctgaagttgccccaacttgggtttggatgagaaaattggggaagatgtggcaaaaggttaataggtggaaaaggagttggtaatctcaggtcattagtaggaatatttgggggtagtaaacataggaagccacttttatagtatttagtacatttctttacacaataaattatcaaaaaatcttcactgaatatctactcttccacatgtatagaaatatataatttcccccctttgtagaagtaaaatttgctacttatattgcttcatatgccaacaataaagattttactatcacacagttcttttttcttctcctcccttgcatttctggcttgaagacagtgagaatattcaaaatgttgggctagaaggaacacagagaaaagaacaactttcaacagaacactttcattatgctcgccctgaccctgagaactctgcctcatttataaaatgtttcaactgtcagtcattttttgcctgaaaaatgaattcacagaaattggtccaaatacagtctatataaattactgagtttatttttatacaagtagttctacttcaccttcttccacaaatgatttgaggcagcgtcctaaaatatagacattagtagatttaaaaataggggaaggaaccagtgaaaggagagcttaatggaaggagaatgatgtggccaatgataagattaacatttaagtttgcactccatcagatccagaacagttgtcagaagtaggccagaaatttgaccctaactaagctgttgaatagccatagaaaagaggaaatagcaatcatttttaggtttttactgttcataagataaaaactggctttttttcttttcccttttttttttttttttttttgagacagagttttgcacttgttgcccaggctggagtgcaatggcgcgatctcagctcactgcaaccttcggccctcaggttcaagcgattctcctgcctcagcctcctgagtagctggaattacaggcatgcaccatcatgcccggct

SEQ ID NO: 1563232 - DNA, 4001 bp, Homo sapiens
cctcccacccagtgctgacccttgacgcccaaggtgacaggtcctggcattctcgacccctgccctgacaaggccttgactttgtccctcctggaaaccttaaccatccccaactcttgctgtgattcagtccttgactcttgaaccctggtgacctttgcctttctgaacctgccccccaacccagttcttgactcttgaccttgatgatctcagccctcctctgttccagccctgacccaattctttactcctggtaccctgatgacccttacccctgggccctgcccctgccttccaggatgcttccactccacgatgctgatgcaggaccgtcgcagaggattggccagggtgaggcagaagagtgcccgaggtgaccgctgggcactggccactgccactgtcttgtgcttgctgtgctggtttcttcgcttaggggtccctaggcctgatgccccactgctttcaccttccacagctgggggcccggggcacagcccccattcgggaccagggcctgccccattggctggactgggctctggggtggtgtctatatggagaaactgtgtcagggagggacagggtattggggcaattgtggctgcttcctacctgatcctgtccctctgtttgaaggaaggagagaagagcatggaaaattagggagaactgggagtagctgggttaaggactgggaagtaagagtgttcgaattaagattagagtgagagtttataggggagtgaaggtgagattacatttccaagtgaagtagggtttggtgtttaagttgggggtagagtttaaattgccatggggtgggcgaatttaaggttaaatttgagtggtgggttttgggttagggtggggatgggtttagacataggtaggagtggagttttgtctaagggttaggactgggtattttgaattggaattagaattaggatacaggttagggtcgaagttgagttttgagtgggacttgaattttgcattggggttttcagctaaggccactcccagttcccatggtctcgtttcagcctcagagggcggtagattggcctggttaagattcccagctttggatgaaacaagctgcctgagtttaaatcctgactttaccacttggtagctatgtgttgccttgggcaaattatgtaatctctttgagcctcagtttccttatctgtataataaggatgataataacagtacctaaaatatagcggtgttatgaggattaaatgagttcagaatcaaaagaatgcctggcacatagagttattcccattttgcagatgagaaaattgagaagaaaaagttaagtgacttgctgaagtggctgaatggggagtcacactcagtctaactctagagccctcatggcttactaccaccatcaagtatgtcttctctctctttctctcttttgtttttgtttttttttttaaagggtctgtgcactttctggaaagtcagagactgcaatcactaacagtattgacatcccggggttgaggttgaggttaggtcactttaggtctgtatctggggtggggtttagactctaacaggggtttgccttctggctggtagagtttgtgttaggtttcaggtgggcgtttggataggggtcagagccaggattgaggttgggtttcctttgggaactaaggctgtggatgaggctgagaggccatggggggtggtgtctgggtcaggctgagcgttagggctctggtggcagagaggctgtttggggctggctgggatggggaacagggtgatgtggttcttgtcccctagaggctctctgggggtggggtctgggtgggcaatgggtgggtcagaggggctctaccttgctccaagggtctgcagggatggaaggattctctcacctttcccgccttcagattccgacatctttctttcgagattgaagggccatctgcacacaacccccctctcttcccccagctttggagggattaaggccgcagggcggggcaataacagtgttgtatgggagggtggcggtgggggtgcaaatgggacgtttgtgggccagagcctggcaacagatgaaatatttaccaaatatatacctgcagcaaacagtcaaactaaaataagaaaaacgatgtcattttccagtagtatatggaattcgaagtatgtaggaaaaacctaatatatgtgcaatatctctatggaaaaaagatcaaatattatcaattattattatttttagagacagggtcttgctctgtcacccaggctggagtgcagtggcgtgatcatagctcacagtagcgttgaattcctgtgctcaagtgatcctctgacctcagcctctgtagctgggactgcaggtgtgcactaccatgcccaactattttttttttaaattttgggttgcttcgaactttatttgagaacaacagaagataaacctatcaaaagaacacacaggtgggtgcgggggcacggctagtggcggcggccggggtgggcatccgggctaaggcttttacttggctgcagactggtcggatttcgcagctcctaggcccccaagctgggcccgtgactccaaggtgatctcgttggactgcgtggctagcttgggcatgggggcctccacggtcagtgtgccctcaggggacagggaggaggagaccttggtggggtccacaccggggggcagcgtgtatttccgggtgaagcatcgggagatgtagccatgctcgtcctgccgctcctcgtgcttgctggtgatctccaccatgccatccttggtcttgaccgtcagctcgtcggaggcgaagtagttgatgtccagggatacgcgccagcggtccgctgtgggccgattctccgagaccccgccgctgagctgccggctgagcgcgtagctgtaggcgggcgcggccaccgcggggctctcgaccgcggcgggggcaggggacgcacgtagcggggccagcagctggtgcccaaccactgcgaccagcccgaaggcctggtcaaagaggcgactgtgcgggtaccagtcgcggaaggggtcccagctggggtcccgcaggagcgagaaggggacgcggcgctcggtcatgctggctggctctgctggggacgtctgcttggacaagtgtcaattttttttttttttttaagagatggtgtattgctgtattgcccatgccggtctcaaactcctgacctcaagcgatcctcccgccttggcctccaaaactgctgggattgcaggtgcgcgtcggctgttcaagaaatggttacatagatttcttttgctttatttatttatttagagacggagtctcgctctgttgcccaggctggagtgtaatggcgcaatctcagctcactgccaccttcgcttccccagttcaagtgattctcctgcctaagcctcccgagtagctgggactacaggcatgtgccaccatgcctggctaatttttctcattttagtagagagggggtttcaccatgttggccaggctggtctcgaactcctgacctcaggtgatccacccgactcggcctcccaaagtgctgggattacaggcgtgagccactgcacccagccggttacatagatatttgctgtgtaattattctttggagtgtacaaatgtgtatcatattaaagcatttattgaatgcatggacactagtaactataacttacatagtgctttcttatcttatgtgtcaggcacatagtacaacgtgctttatataaattaattctgttttaatcctaaaaagcaggtactgtcaatagtcccattttacagatgaggagactaagacacagggaagtagtcgctttgtgttaaaattctgcccttaatgtgtacacttttatagcctagaagatgaatgccgccttaaacgaatgagtcaggaagcccctttctgtccggcccctccactccccaccacacgggttgttcctt

SEQ ID NO: 1563233 - DNA, 4001 bp, Homo sapiens
gtctttaggggaaactaatgaaatttgatcatgtgctttaaataagacatgcaccaacatttaaaagactaatataaaaattgcccctccaccattctctacacctccctatttcacccctccttttttggctgacttgcccttttggccgaataagcccatcctatatgtctacttttccagcctttcaagaatcaaattctgattttatagaatgttatgttggaaagtctgttagaaatcacttagtacaacttctttcttttgttgtaaggtaaaggcacttgcccagggttatgtagttagtgacagagcccacactaaaactgggacctcccaacgtttttttttaaaccacaatttgttgtaaggtggggaggagggcaaacatgcagacacaatatgtcaagcaagacgttgcttttaaaaattcatattgtactcttctcacaagaatgcacttagaagttttgtttttgaattgcaagctgtcagaaggtgagatgatttcaaatcaaggctaatcaaagaaacactgttttggggtcacaaagggactttttctgcttttaatttaggaactgaaaactcccaaggatatggaaagcctgctttttaacctattcctgaccatgtaagtgtttagactttttccctagactgctagggagtctaaggacaaataaagaacgctatttgaatacaaagtattcacacacacccaggcacacacgtgcacataagcatgctcacacacacacacaaacttccagaggaataaaagagttaattagcagtccacaaataatttttttgtttattacttcagactgtaaagtgttcttactttcacaataaagattagcaaatgaggcattagctgaatttcaatacaccaataatacaaaccaggatgttttatcctgaagccagaagtaattgttaggacagcagaatttgctgagttttcctatgtgcttttcagcaaacttacagttccaaatcctcagaaccaattgtttccattacaatgcaccgctcctttttcccgtcccccacccaaagccagttctgatcaagtggtccagtgaagaccctagaacagtgtacttggcctgggagtggaggatggagccccatcttgaaatcaaagtttaaaccaaagctggaatcagaggggaacaaagccaggccagaggctgaaaatggaatagccaagatcaacctgtcaccagggcaggaagaccactggctgtgcagacagggagttaagatagacttggccaccacttcctcctgtacaacactgcacagcctgctcaccctcctaccagagttcacaggccttttgcacacagtgtggctccaagattttgctcgcatttcaataattttcccacagctgtgggtcagcagaagctagaaggaggccctgaaaggagccacgcttctccccctcaacaccatcccctgtgatttttcctcacttaccaggtattttgggtagcagaaggcaaacacatacacatgcacgcgtgtgtgcacacacacaaaaaactgaccagatatccccagaaaagtttcattgccagacaaccacaatcatcaccccacacacccctcaaaataaccaaccaaaaattccattatttttgaagttctcaaactgctattaacgggcacatatttgatccagacaagccataaaatatagctgtggagtttggttaactacaaagttgaagtttcttcatctttcttagacgctaagttatccaggaaataaaactccagggtaagtttgcgaattccctctctactcacctgagttatcccaggagccctgctgctgctgctgctgctgctgctgctgctgctgccgttgccgctgctgctgttagccaggtaaccccactaaaagtctgttcagtcagtgtggctgaacaaagattctggctttcttaacctgaaaactatttgggctgtaccaagctctgctcacagggggaggtgcctcgcagcaacttcaggaggctttgccccgcccagcagtcagaaactgatcctgagtcatgaggaaaatgtggaaagtgcctctaccagatgtgcagacgggatgcccactccagacccacccaccagcaaactgaaaaactcaggaagccacgtttgaaagctctttcggtttcaaggagaaataagactttcagcgaggattctgatagatttcttacttttctgtcccagggttaatatcacagacatgcacattactagagagaggacatgcagagaaaaatggtgaagtgttggcaaagttaatatgggctaggctgcagacatggccctggtcagacatggccctggtaggcagatctgtgatagtgatgaggacttcaggaagtgactgggagtgaaagagcagctaatggggtgcaatgaagaaaaggtcacttcgtgaaacaacaggtaacatttggtcaaagacagagagaagggattgttaagaggaaagtgaatggagtttattccacagcagctataagaaccctaatttctagcaaccaggctatgaagattctgcacagctgtgttaggtgagaggagagaaaataattgtttttgctctgaaaggccaagcaagatccctataaatactatactgcatcacagtcaaagtcctggtcccttcaacctgagacattcatttggacacaattccaggaacatgattctcaagttgttttgtttgtttcattttcacaaactgtaaagatgctcatcatctcattcctcagctttcctgaccagtgtactgttaacccttgaacctgaaattacttccttctacccctcctcctgcaccaaccctcctgctggctagttgaagatgtaagagataaggggggttggggataacaagtgagcaacatagagctcaacaaggacaggaagcatgttctctctccactcactgggcccataccaatgttttcataaaacagttctgagcatttctataactctggtctctgagatctccttcttggcatttccctacaactccctctgtaccttctatgccaagatggaaattcagctagaggtagggcacaaggaaacaggggtccagggcaattaggcctctaaatattggcaaccattcagctagacagtgagatagtcctcaagcaaatatccctggtatggaattttggttttaaaatcaacggaggatgttttgtctgggctcatattctttagccatcttttccaccttcatacttgtaaatctagcagggaatcacagaacctgggaattggaaggaaccttagaagccatgtttatcctcttgctcagtgcagaaatatccttctgacagtctgagaaactcatccctatgcaaaacagcttattccatatttgatcatttcctaattgttaaaagggtcttccttaggttgaggaaaaaatagcttcacacaaacaatttctaattcctctttcacatgacagccctttaaaatatctagcatgtcacgccaagtcattcatcctctgggctaaatatcctcagttctttcaaaccatgcctcataggacatggtttacagactttttgccactctagttgtcttttgagcataaatctactcagtgtgcagcccgtagcttaatcaaaatcctctgttgtttcttgcatgaactactactatgtgcctgattctaggtttgtacaattgacttttaattttacctggatgctgggctttgtattcattctcaaaaaccattgccttgtttattttaatctatctccttaagatctttctttatcttgagcctcatatacaaaatcatattctccatagtaatgtttctcaatctttttttatcattatcacggtcctaaagagcctttttagatatttttcccaatgtctctccgtgaaattttaataccacagatatgctgtctatctgtttatttgctgtctat

SEQ ID NO: 1563234 - DNA, 4001 bp, Homo sapiens
tctagaactgtgctattcacatgtggctactgggcacctgaaacgtggctggtccgactgggaaactgaattttgaattgtatttaattttaattaattaaaatttaaatttagaaaaaggtacttgattcggttattggaaaacttttatgtatattgggaacaacttgggtatgtgaatatacttttgcaaacgcaaattttatgaaacctaaatacagattaagtatttctgattttcatcagaaatgtagcttagtgtcagaattgagatgtgctattagtgtaaaatacacattgggatttcaaagacttagcataaaagatgtaaaatatttcattaatattttttcatattgattacatgttgaaatgttaagtttggatctacagggttaaataaaatattttattaaaattaattgcacctgtatgtttttattaaatgtggctactagaaaattttaaattacaaatgtggctcataatatatcttttggacagtgctgttctagaacacttccacaagcactttaacaggacacatttggatactttccttttaagtctggctggtcatgtaacaatagggcaaggagtaacatgtcctcacatcaattgggtctgagtaaagtgtgtagcaagctctacccacaatttcaccatgtgaggcaacactgtaatacctcaatatggaaagaaaaggaaacaaattagcactcaaattgaaattgagtactgcagacaacttaaaagagatagggccaactgctttaaggtcttggtttcatttcccaactgtggaccttaaaatagacaataaagcaccgcttccaaaaaaaaaaaaaaaaaaaaaaagaggtaagatatttcaatgttagctctagcgatccttattaagcaaaaatttgctcttaaatcttatctcctcaacttctaaagccgcagaatacacgctgtgttaggaaatcaacttcagattgccagcatttccttcacaagcaaattagcaggattgtgcacttggagtactgtttgacaagaatgaaaaggaaactattcaaaatagatttaaggaatggacaattagatgaggaactgcagatttaattctcaatcagcactgtgattaatctgattccctgcttttccccagcgtaattatacaacacagatgaaaggatgagcatttggactgtcagttctatattctagaccagcccggtgactcaaagcagacggctctaccacgctaaccaccatcccaacaacagtcgaggggagtctcgagcactgattgaacagtcattgcataacaaggcattaaaaattcgaatgcccccaactctttccacgttcgtgtacaccaggagggaatttgctgaaactgaaagcaccccgtcttaaatgaccccctccaatccgagcatggggtgtacacaaaggcatctgtctaatatcccgcacaatagacacacaccccacaattaaaaccctggactctctcaccacacaagcaaaggaaatgcaagctgctctgtttcaaaaatggtctatggtacatgcaaggtaacaataaccccaactgaagcaactataaaatcggctgtgccacgtccctgtgcaaccgtcagataaaatgcaggcagccggccccacgccttacggggtggccaacctcggctcggtggcctcaatggaccgctgagaacccccaggcccccgcctggcaggagctccaggtacacgtctataaatactccaggatgagaaggacgagaggggaagaggggaaggagggagggcagggggcaggccccgagcgggtgcgggaagaccggggcatcactgaaatgcatttttccacactcccgctccctcgcgtggagactcactttccgatcacctcgcacagctcgtacacatcctcgaacagcacgtcgtcgtcggccatggtccggaggggatagcggccgcagcgtggagggcttcgaaaacgggggtgggggcgcccaagagctcagtgcccagccccgggatcgcctcctcccctcaggacccgcgagccctcggtgccgaggacgctcgagtggggccgcgaggcccagagactgcggcgccttcctctgcaggcgaccgccccggcgcgggcggcggggccggggcgcgggagcgagggcggcccgggcccggcgccgcccgcccgcccgctgcttctcgcgctgctcgggccgcgctgcccggcgtgcggatcctcggggaccgcgcggcgtcgcgctctccgctcgtcagcccgcgcgggccgcgaggccgcgaccgctccctctgtccgaggccggctccgtcgcgtcgcggagcagctcgggctacagagggggccgcggcaggaccatggagcgaggatcgccgcggagggaggtggcggcggcggcggatcggcgctggggaccaggaggcggcggcagagacgctccctcctctttctcctcctcccgcagccgccaccgcccgcccgggagtgggagggggcttcgcgggaccggcgctctgtgcgggcgggagccgcggccgccgccttctgctccgcccctacgcctcagcagccgaccggctcgccagccccgctcacccgcctcgcgcagacacgccctcctcccccgtcggcggcgcggcttccagaaccacaggctccgcccactccaaccggtcgggaggcggtggcccagggaaaggggagcgggccgagcggcgcatgcgcggggcgccggccgcgtcacggcgaacgggcgggcaccgggattctagagggcgcggggggttgagtggggcgcgccggctgcagctgccgaggcggggctggttggggtcgtcgcctccgcgcctagccgcgaccaagccgcgaaaggggctggagacaaaaggtccacggctgcacgctcgttgtccggcaagaggcacgaaactctggccgctcccctttccttcttttgtaatcgcagggagcctttcccagttttttgctgggaaaagaggcagggaaagggtgctaatgaatgagaaagctaaaagagaggtggagagaggttgtcactgaatccgtgcttggcagcggatgcttttagtgctaccctgtcattccttaatgaagatgagggctgggggtaaggggaggtcgtccaagaaaaggactaaacaaaaactgcctaggaaggtgtgcgacagcaaacggtcatctatagagacagcttctcccacgttctgccccaaactcaacaaatatctatccagcgcctaccctcactagagaccaacctagagagaagctaggaaggcagggacaaaccgtgactttaagctcatttgtatattgtcctcaaactcccaggacctactctgctctctatactccctataaatgttagacttgtcaggaacagaatgcaactagagggagtgcaggcacaggagcagccagggagtgaggttctgggtgttgccgctgtgctaggttgcattcaatatgaagatttctgttcaactgagcatgtgcggaatgagccagcgccatcagacaggtatatgcctcagttgaagaccaatagtgtctttgttcctccgcacagcaaaagtgcccaattagttcataagtcagtttccagaaatcgtctggtaaatttctcagtgcagtattttttttaaaaaaagtatttattaataccaaagtggagggggtgatgtggagactcacagcctattttctcttcagaaacgtttcgtgcaaacccttgaccactccctcaaaaggctgagagatttgcctgctaaggatttgggtactaaaccttttttttttttttaaatgcagatcagaggacaagtgtaattgcacacggttttcctcctttctcaaagagcttgtgcattctctagagacgggggcttcagaacttgagaaacattgcctcctttaagggtccaagagttactcaccacaagttggc

SEQ ID NO: 1563235 - DNA, 4001 bp, Homo sapiens
ggccacagagctccattatcacctaccttgaagtcggcagcttgtcatgacatgttagcctggtgtgaggaagacccagccaaccaaggaggcatgggttcaagccccttccccatctgtgtattgtggggtgaggccaagctgcttgtaaggtgtcatgtttctctgcagtcctcctgcctgccccatagggcctgtacccctctcttgaagcagtggtgccctgccttcaacagcaggggtggggatcagtccctaaagccttttgacaaacccaggccccacatccccactcatctaaggtctgacacttcccagcatggcaggggttcctccacatcccagatcactggggctccaactttcccagcccccatttaggcccaaggaactctcacagggttccctggaaccttcctttacccccacaggaacccaactccatccacggtcccccttgccagcattggtcccaatccaatcccaattccatgctgggctgcttcgattcttttttttttttttttttttttttttttggagatagggcctggctctgtcacttaggctggaatgcagtggtggcacgatcttggctcactgcagcctccacttcccaggttcaagcaattctcccacttcagcctccaaagtagctgggattacaggtgcacgccaccatgcctggctacttttgtatttttagtagaaattgggtttcaccatgttggccaggctggtctcgaactcctgacctcaggtgatccacccgcctcggcctcccaaagtgctgggattacatgcgtgaggcactgcacccagccaatcctttcttctctaatttctcagagcgtcctggaagtccagacagggtccacacaggaaccccaactcctccctatcagcccgacctcggggggacatagttagagtatgagtcatggggtcactgggcaggctagacacagtcaacgccccacacccccacacccagttcctaagcttctgcctccgctcacctgccctctgcatacttgccttggggcctggagctgcctcatccccgcccagatggcgagaaagggatcccagcaaacccctccccagcacacccccacaccaaccccaggtctccccctaccagtgaccccatggcccccatcctgtcccagggaccagctgcagcgggagagcagtagagggcaccccccacacccagaggcgggcccggcaggtttttcaggtctgccattctgacaccacagccgagaaagaaattcctggctgtaataactgtttacaaccaagatacctcacctgggtggcaccccaacagttggggggtcatttccacatcctgccactattagagcaaatacaaaatctcaatgtctgggccattaccctccccagagcccctgcttcctccactgcagtgaacaaatcaggcataggcaggcaggtgcctgagtaatggtttcttagtagcccagtctggtctttcttggagagctgggccctgggttgggggaggacagaggctactcctggcggggaggaaaggaagcagggatagggtggagaaggggggactcatacttctcttttccccgatccctcctcgtccatttccggccgggaatcggcttggtgccaggaaaggaaattggtgttttgggctttgcccctgtcctcaggccctccattctcactgcccccctacccccccaccaccaccctgccctgcattgttggtgtgcctctcccacagacctagctctctaccgaagggaacttcagtacaccctgccccagctccccaatgcccttatccccctcgcaccctgggcccactgctcccaggtgctcaccaatgccagagagtgctgtggggtagcctcagatacctcaaaaatagttgtctcgaccaggccctggctccggctggtagtggcagtcagcagcagtggcagatgccttggccacctcccactaggtaatggcccagcctacctggccaggaactgggccggcccacaccttttaacccttgcctgtctgccaccaggactagggtcacccctgggggcagtttcagggccaggtccactcagggtgctcagcatgtctaagaagacagcctgggccaggcagggtagctggtgcctgtaatctcagcactttgggaggctgaggtgggaggattgcttgaagccaagagttcaaggccagactgtgcaacataatgagacccccatctctacaaaaattttttttaaaactggccaggcatggaggcctgtgcctcctcaccccgtacacttagcagaaaactgggaagaagggctgagagtggtgggagtagcagctgcctctcctactgcccaaattcccagaggattagacgctgcccacccaaggggcaacttggatctgggccatagaggtgtggggagctgtaaagtacatgggaggcttcgggtgtaaactgagtttttgtgtcttggcactaagcatcacattctgaggcccctaccctttcctcccagggcaaggcagtggtagaaggccttggggcaattcccaccctcactggggaataatagtttcccaagttggggacagaggaagtcaacctttctaaggagaggtcaggtctcaagatccttctgtggctccagaagaaataatctcaataaatcaagcacaacttacaccctacaaaacacttatgggttttgatccctcttggttcctacaaatgtagcaggatggcacagacccagcctcctcacagccattttatagatgcagaagctgaggcctggaaaggtgaagaggcctgattcagatcacagtggcagaagagcaggtgaaatcagaatttccgggggctgggtcctggctgggaggcagacagaggctactcctgcaagtgggaaggagaagtagggaagggggctcatgcttcttcacatccatgctgggtctctcttcttcagagagtcaggcttcatgccagagaaggaaatgagagctttgagtccttacgacgtactgtccctgcctcccctcaccccgcccaccaccaccaccatcaccaccaccaccatcaccactaccacctgagctctgggccagtcccggcacacagcacacatcctgtgctccattcaggaccatctgctctgtgacccagggcccaagccctacccagacccctgcagcagcccacaccatgacctgaagtgagaaaagctgcagatgggctgagcctagagaggagctcactctgaatcagcaatgccccagactcatactattaaggcctcccgccatccctgcccacctttcttcctgggtgtgagatttccagcatggaacacaaaggcccctttcatcgccctccccacttcactgcctggggcgggcagtggtaaggtgggcattggggagtgtcctctcggccacagcctctcccacctcttatgggccaccaaagatgttgggaagtgagacagtaataaaatcagagccaagagggatgagaatctggctggcaatgtagattgagtctcaaagcttaggtctcctcatctgtaaaatgggtaaaaggtggttacagagacaatggaggccccaaataactttgaaaggcatttcaaagtgcaaggaaacacaccatgtcattaatgactcttactaacaacaattaatacactcacacagaggtgggctgttgtgggggtaactgggggagagcaggtaactggacctcctgggccaggcagacaaatggggcagtcactaacacacatcattgccctggtccatgacttttaatagcctcgaagaggacccaacctctaagccctaccccagctgggccctgggcctcacgtgaccctgctgtcactagtaaatggtgagtctgggattcaacccagctctgccacttactagctgtgtgactgcttgaacaagtcacttaacctctctgt

SEQ ID NO: 1563236 - DNA, 4001 bp, Homo sapiens
gaagccttggcctagaatagacttcttctttttcagtccaggaaagcagggatcatgcacccagaatcaaacatggcctagaagattcatacatacccctgggtcccccatctcttcatattttcttaactcttccccccaacatgaggcagtccccaacacagcaagactggaaacatgacccagacctctcagactcccagagagtcactgaataatttagggtattctttcacacttgcagagggcaggggcgtaggaacagttgcatgccctcctggggcaggaagagaaatgtaagctctatgtaagatcactagggtggggataggggagatcacacacaaaaacccccatcagccacgcagggcacatagggctgcttgctcttgctaagagaagcatttgggatgtacttcggaggtcctgggaacagcagaatcttcaagttccgggcacagtataatgggacccctgtcctcggctcagaagggatggcaagtggatattaggaaggaagaagatctgaacagggtggaggggcatggtaaggggaagaacaccctggggctgggatgggaagggacagaacaggaaggagtgtaggggacaagatagagccagagttatcacaggatggaggtcaagaggcaggatggggaatgagccagaacactggccaggggatgggataaggtggggttcaggacaagggtcagagaaaaagtacaagaaagagacaaaacagcagggcaggggtcaggattaacatagaacagcagtcagaagacatgactaggaaaggctaagccagtggtcaaaggaggggacagggaaaagggcaggttcaggatggaggtcaggaacaggaaaagaccaggacacaatgaggataggaatgagtatggtgatgggacaagaaaagagggaaaaacggggcagagtcaggggcagggacaaggcaggagacgaaggtggtgagccaggatgcagatcacgagtatataggagaggatatcacatagggtgcagagaaaggacagaagttagagggcaggaatcaggacagaactacaccagattgtggttagggggacaggacatgactggaagaggtttggagactggataagagtttagggaacagacaggtcaagcgtcaggacagaaactggggtcagtgttgggcattaggatagggcaagatgtttcagagatgagacggggtcaggcaaggatcagggtcaggtcaaagatccccaggacataactggatggggtttggggtcaggactggatttagggggacaaaacaggggttgaggaccataccaggccagaatatggttaggtcagggctcggatggaaggtcctgaggccaaggccagcaggggttgaggtttaaaaaagatgtagtcaggtcgtaaggggtcagggctgaggccacggggtcagaggtcgcgggtgcgcgcgcaggtacgccccgtcggcgtttccgggccttcaccccaccctgtcccctcccttcctccgcaggcggggctggttactcaccaagggtccccgcgccgcagtaggcggggtcggtgtcggtcggccggccggggcagtggacgcgcccctccctcactgcgccctgctcgtccccgggcgcgcgcctgctcctcttcggcgccctgcccgtgggccgtgttcggctgcgctaccgttagccgtgggggccagacgggggtcgcggggagggtaggaggggagcgccggcccggccgcgggcgatggacccccgcccccacctctaactcgggtctgtccgcttccagcggcacggccacctccgccgctcagcctagcctagagggtggggggaccggggggcggggcacgagaccacagcagtggcggagactaagtgcgcaagcgccggctcgggtcttcgatttttcttgccctgggagcgccaggagcgaacaagctgggagcgcgtgcgcacacgctttctcgagggcggcggagccctccctcgccgaagccacgcccctcagggagcctactggcgcccctcaccccaagtcgtcccccagggaccctcaagcagtaccccaagctgctctctgtaagctctccccacacctgtaaaccccagctaccctccctgttgttcctcaaatgcactccaaaccaacctccattatcctccaaattatatccccaaactactgtctgttgattccaagcggtacctccagtccaccctctatggacacccaagctgtggcagtaaactaccttacactacccccagtttgctccatcaaaccatctgcaatcagccctgaaaccattaccctccaaacagcatgtccaaatcacctgctatctacttccaatgtgcacccgtaacaccctccattgaccccaaactcctctccatgtaccctccaaaccatactccattgacccaaaatggctctccaggagcccccaacaccagcccaaacattcctaattaccctcaacgtgggcctcacctgcaccacaaaataattccaacagtcacccacactacctccaaaccatgttccatggacccctcttacccagccacctttcattgacctcccctcgtatccccacaaaattaccttccaacagcccctatcactgtgccatataacccaactatactttctgtggtctttcaactgcatttcaagccaccctccagcaccatctacacctctaacccacactccactgacccaaactgcacctcaaacactctccaacagtcctcaactgtacctccgaatagccaccaaccatcctgctgtagttacccaattgggctcccaaatcatactccagtggccccaaatgtgtcccctaagccctccaaagacttacttgcaccctggatcatacttaagtgacctaaattacaaagcactctcagtgatttttttcttaaaacaacttaaccgggatataatttacgtaccaggccgggaacagtggctcacacttgtaatcccggcactttgggaggccaaggcgagtggatcacttgaggccaagagttcaagaccagcctggccaacatggtgaaaccccgtctctactaaaaatacaaaaaagtagctgggcatgatggctcacacctgtaatcccagctactcaggaggctgaggcaggagaatcgcttaaacccaggaggtggaggttgcagtgagccaagatagtgccactgcactctaacctgggcaacagagtgagactccatctcaaaaaataataatgataattatgtaccataaaagtcatccacgattaagtgtgcaatgcaacaactttagtaaatttacctaagtgaggcacagtggctcacacttgtaatcctagcactttgagaggccaaggtgggcagatcacctgaggtcaggagttcaggaccagcctggccaacatggtgaaaccccatctctactaaaaatacaaaaattagccaggcgtggtggcaggcacctgtaatcccagctactcagggggctgaggcaggagaatagcttgaacctggaaggcggaggttgcagtgagctgagatcatgccactgcactccagcctgggcgacagagcaagactctgtctcaaaaaaaaaaaaaaagaaaagaaaaaaaaaagaaaaaaatatttaccaaagtgtgcaacaatcgctatagcccagttttagagcatttccattaccccaaaaaaatccctcatgactgaatgccattcccattcccaaccataggcaaccacaaatctactttctgtctctataaatttgcctttcttggacatttcataaaaatgcaatatgtggattttttgtgtctcacatctttcatttagcttgatgtttttgaggttcatccgtgtggtagcatgtaacagtggtttgttccttttattgctgaacagtagtctatccaatgatctttaacttctctccaaattacc

SEQ ID NO: 1563237 - DNA, 4001 bp, Homo sapiens
ttagagaaagcacttttatttttcccttgaagtttatttggcttagctgaagtcttcaggacacttttcctttgtatttttatgaggccttcctgagagcttactgacaatgcagacgatcaattacaaggctgaagagttatgttgcgtaaggctctgtgcttctaaacaccccaaaaagataacagctaacacgactgtacttacacttcctggggtccaagatcttctgtctactggatatctctgccctccttctccagtttgaactggaaaaaagaaaattccgcctccctccctgtaatcaggaaatacatttaaccagaatgcccaaacccgtgtttatatctgagatgtagattaaaatgacaagtgatggccaggcgcggtggctcacgcctgtaatcccagcactttgggaggctgaggcgggcggatcacaaggtcaggagtttgagaccagcctgaccaacatggcaaaaccccgtctctactaaaaatacaaaaattagccgggcgtggtggcacgcgcctgtaatcccagctactcaggcggctgaggcaggagaatcgcttgaaccagggaggggaaggttgcagtgagccgaaattgcgccactgcactccagcctgggcaacagagcaagactccgcctcaaaaaaaaaaaaaaaaaaaaaaagacaagtgatatatttagaatgtcatttggtctatctgaaatgtgataccagacactaagaggtaatttctctttttgtcaacccatttccccaactattatgccactaagtcttccttccccaagccatacagatatcaaatgggacaagaatcatgaggaaattttattcaacacagtacctcctcacttttagcacctattgagcaaaggagccaccctggcttgttgttaatgagcacgccaggaaccgcattagcaaaaggctggagcccaggccttgcctccctccctcagagtgtagttaatttgaaacaaacaaacaaaaaaacatcgaaaagggaagtcatcctgatttttgccttcatctgtcagggtcctaatatatgggccaaagtgtccacttcccgggacaaattgtcttctctattgcttggcagctattgagggggaagaaaagtaccattgaaaactgggccccgtgaatgcttattactccccagttctttgttattagtgtgaagttattccttctagaagaaaagatacggggagtcaccttaattccgaaggctgagactttattagtatgagagtcacattcttgctacaaagctgtatctttgtatgcatagtttgggagttttctctgtaaattgttaactgaaactcctgccatcgttgcctcccgaggagagaaggtggctcggggtcggggcgctgcttcggtccccattgcaggtgacactttccacctccccagtcccgacctagtcgctggcgggcggcgggagaggcctgaccccactcctctttccgcactgccactcccacgtcctggtcctttccctcccaaacgctctccagccccggcctggggctctaaggacagaaataacttgcagtgggggttggggtgcggacctgggcgcctgcccctggctccccgccccttcgccccctgtgtccgggaagaagaggggcgagcccgggggagcccgggctttcccgtccgcagacatacctggaagcgtggatgccgtctggagagcccgaacctctcttcctcaaagacaaccaccacccgcgcgcggcagccccccgttcggctctggccaccgcgaccccgccgggccggctccgggctgagccaccgcagtgcagcgccagcgcgggccgcgcggttgcctagcaacgagcctgcccgatttaaagggacccggactccggacgcgcgcagggggccggacgctggcgtcccgcagtcaaagcctggccggaggactgagcatgcccggtgaagcgggtaccgcggcggcttctgcccggcaagaaataggagctcgtggaaggaaagctgagtcagggtgggaaggggccagaaactgcaaggcagccccacccgcagtgggattatttcggagggtctgggtgactcacaaagccacctggacactatgactgtatgcgggtccagacggcgtggcatagggtcagttcctaggtctgctgttattagcatgacatggtggagggtttgctctggaaggttgccaggatttggtgcagggttgctaactatgcaggagttccaccccaccctccatccccacgcacaccctcacgcattagcacaatggtctgacttctgaccaaggttttaaggacgttaggtcaggagagcattgtgccgtggctatgcccctacggaagactgggcttgtatctcagagagcccatggtttcctcatttgccactcaggaatttctctaaaccactcttgcaccctacttgaatttaaaacccattgggggcaactagttccacactactgacagtgtgaaattgtttccttttatttgtccccaaagtactgtcttcctacttcaaagtttgctcacaacttccaggatttggttgggtgacaagcccatgcttttcactgtgttatagattttaaacattgtattttgttgaatcaataaatgatcttcttagacttaggccaggcgcagtggctcacacctgtaatcccagcactttgggaggccgaggtgggcggattacctgaggtcaggagtttgagaccagcctggccaacatgctgaaacccatttctactaaaagcacaaaaattagcctggcgtggtggtgcacacctgtagtcccagctactcgggaggctaaggcaggtgaattgctggaacctgggaggcgtgagctgagatcatgccactgcactccagcctgggtgacagagcgagactccatctcaaaaaataaataaataggccgggcgcggtggctcatgcctgtaatcccagcaatttgggaggccgaggtgggtggatcacctgaggtcaggggttcgagaccagcctggccaacatggtgaaacctcatctctactaaaaattaccaaaaaattagcctggtgtggtggcacacatctgtagtcacagctactcgggaggctgaggcatgagaatcacttgaccctgggaggcggaggttgcagtgagccgagattgcaccactgctctccagcctgggtgacagagtgagactccatctctaaataaataaataaataaatatcttctcagattttgattagcctggttgcccagtactaattcttccatcaccacgatggacttgacccaggctgtgggacctgaaaccgtgggtctggggtgtctgaaatagtaacaagagtgattcttaggaaagctagtattttctaggaagcattagggtgaaaggaaatattggctttgggatctcaagtgaaaggaggtttaagaattttttaaacgtgccagtctaatttatcaaggacctagcaagggagtgacttaggaacaataccaggatacatttcaaagcttcaaaacttcttgggaaccggatgtaacaggtgtttgagagctggcaaagcttcttccaggtgccctgaggcctagttctcaatcacctttttcctccttagagaaccaaagtcaacaagggttggaggtaggaagagtcctaatgtcaatgtgtgttttattattgactgactccttcagaattaatttgtgggattctgacagaacttctttccttgacgttgagtctccaaattgccgtgcatcttccatgtattttttttttttttgagacagagtctggagtgcagacccaggctagagtgcagtggtgcgatctcagctcactgcaacctctgccttcccggttcaagtgattctcctgccccagcctccagagtagctaggactacaggcccgcaccaccatgcctggctcatttttaaattt

SEQ ID NO: 1563238 - DNA, 4001 bp, Homo sapiens
taaactactcaggcagtttggcagtacagtcagcagccttaaccactaatgaaaactaagccgcaggaaaaatgacagaggaaaggcaagtgttgcagaggaaaggcaagtgttgcagaggaaaggcaagtgttgcaaaggaacttggttactttgtaaaagaggaagaaagaggatgtgtgcattaggaggagggccactcaccatgcaggcctgagccaggctcatggccaggcggaaccgggcagacatggcaagaggcagcagagggctgaggccagagcccaccgcagggttgatcacacgcaggcagcggaccacagcctctacaaccagctcagtggtgaaggcgcgcaaggtctgcacatctggaggaactgccctgaagaaggggaccagcttgatcgcaggaatagtcaggcaacagggatcaggctgagccctgcagccttttggaaacactagtaccagggtcggggcagggaggatgcctacagttcagacagatcctggatgttggtgactgtgacttccatttggaaaaccaggaactagggaaatcctcaagtcctaagatcttggagtaggagaatggtgggtggaagagaactcagtttagaaaaatatcaaaatttgggagtctgggaaggtgaaagggtccaggtggcacaatctctgggtttcttggttcccagatagtatgttctttgcatacatattgagctgctagagttttgagaagactagattttaggaggctgctgttttcagaagttccaaatgtcagggtccctgggtatcaagatccctgaatatcaagaccacctagtttcaagcaatacaaaaatcagactccctagatgttggcatcctgggtttttagggcctctgaacggaggagtcttcgtgcgtcagggtgaccaaatgctgatgtcagattttagaattctgggtttttttggctgggcgtggtggctcacacctgtaatcccagcactttgggaggcggaggcgggcagatcacttgaggtcaggagttggagaccagcctgaccaacatggtgaaaccctgtctctgctaaaaatacaaaaattagccgggcaaggtggcgcacggctgtaataccagctacttgggaggctgaggcaggagaatcacttgaacctgggaggcggaggctgcagtgagctgagatcaccccactgcactccagcctaggcgacagagcgagactccatctcggaaaaggaaaaaaaaaaaaaagaatcctgggtttttttaagccccaggtgtttggggaactggagtttgaaggatcccaagtatctggtccagggattttttggagtccccgagtgccagggtcctggggttttacgctccctggttcttagggcacaggtgtcttagggtctccagataacagggtctcagggaactgatgttaagattccccagattacagggttccgggtcttgaggtttcaaggttgtaacgtctcaaggtgtctgggtcccagagctttgggtgtaccaaatatcatggttaaaggatttgggaggcctctgatgtcggtgtcagggagggcggtgtgtgtgtgcgtgtgtgtgtgtgtgtgtgtgtgtgtgtgtgtgtgtgtaagggggtgagggtcttaggatcctggagttggagccctgaatgtcaggatcccgggttttaaggttcccgggaaacggggtcctgggctttagagtcccggatgtgggcttcgggggtgggcgggggctctgtccttacgtgccggcctggcgcagcgaatggatgaggattcggtccgcctcctccatggtggagccgtgtcggagtcgggggctgggtccaggaccgggtccgagaaagtggggagcagctgtagaaaccctgctccgtgctcgcggtccacagagtgtcacgggtcgtgtggggagagttggaaagtgtagttctgtgagcgagcacggcgcatgccggatgtgaggcctggggtgagtgtgcacggaggttgagcttgcaatagctgctgggaactgtagttcttccacctgcagtccagtgggctcttccaagggaaaaaggaacaacccgtgtggtggggagtggaggggccggacagaaaggggcttcctgactcattcgtttaaggcggcattcatcttctaggctataaaagtgtacacattaagggcagaattttaacacaaagcgactacttccctgtgtcttagtctcctcatctgtaaaatgggactattgacagtacctgctttttaggattaaaacagaattaatttatataaagcacgttgtactatgtgcctgacacataagataagaaagcactatgtaagttatagttactagtgtccatgcattcaataaatgctttaatatgatacacatttgtacactccaaagaataattacacagcaaatatctatgtaaccggctgggtgcagtggctcacgcctgtaatcccagcactttgggaggccgagtcgggtggatcacctgaggtcaggagttcgagaccagcctggccaacatggtgaaaccccctctctactaaaatgagaaaaattagccaggcatggtggcacatgcctgtagtcccagctactcgggaggcttaggcaggagaatcacttgaactggggaagcgaaggtggcagtgagctgagattgcgccattacactccagcctgggcaacagagcgagactccgtctctaaataaataaataaagcaaaagaaatctatgtaaccatttcttgaacagccgacgcgcacctgcaatcccagcagttttggaggccaaggcgggaggatcgcttgaggtcaggagtttgagaccggcatgggcaatacagcaatacaccatctcttaaaaaaaaaaaaaaaattgacacttgtccaagcagacgtccccagcagagccagccagcatgaccgagcgccgcgtccccttctcgctcctgcgggaccccagctgggaccccttccgcgactggtacccgcacagtcgcctctttgaccaggccttcgggctggtcgcagtggttgggcaccagctgctggccccgctacgtgcgtcccctgcccccgccgcggtcgagagccccgcggtggccgcgcccgcctacagctacgcgctcagccggcagctcagcggcggggtctcggagaatcggcccacagcggaccgctggcgcgtatccctggacatcaactacttcgcctccgacgagctgacggtcaagaccaaggatggcatggtggagatcaccagcaagcacgaggagcggcaggacgagcatggctacatctcccgatgcttcacccggaaatacacgctgccccccggtgtggaccccaccaaggtctcctcctccctgtcccctgagggcacactgaccgtggaggcccccatgcccaagctagccacgcagtccaacgagatcaccttggagtcacgggcccagcttgggggcctaggagctgcgaaatccgaccagtctgcagccaagtaaaagccttagcccggatgcccaccccggccgccgccactagccgtgcccccgcacccacctgtgtgttcttttgataggtttatcttctgttgttctcaaataaagttcgaagcaacccaaaatttaaaaaaaaaatagttgggcatggtagtgcacacctgcagtcccagctacagaggctgaggtcagaggatcacttgagcacaggaattcaacgctactgtgagctatgatcacgccactgcactccagcctgggtgacagagcaagaccctgtctctaaaaataataataattgataatatttgatcttttttccatagagatattgcacatatattaggtttttcctacatacttcgaattccatatactactggaaaatgacatcgtttttcttattttagtttgactgtttgctgcaggtatatatttggtaaatatttcatc

SEQ ID NO: 1563239 - DNA, 4001 bp, Homo sapiens
ggatcacgaggtcaggagttcaagaccagcctggccaagatggtgaaaccccgtctctactaaaaatacaaaaattagccgggcatggtggcaggcgcctgtaatcctagctactcaggatgctaaggcagggaattgcttaaacccggaaggtggaggttgcagtgagccgagatcgtgccactgcactccagcctgggtgactgagcaagactccatctcaaaacaaaacagaacaagctgagaagaattacttccattttctaattgattaagccaagacataagtaagctattagtctttcatctagctgatgataaataatcccactagaaattagccaaaaatgaaacattattttctcagaaattagctaagaaataaactgttatccaattcctatttaatattactgatagaaataattgaccccaaataaaattatagctgaaactgaactcaataaaacttagatttgcaaaatgtactccaagaaagttggttttggaaaaataattgccactaaagaaaagttacaatggcagaacactaatccgaaaatttgatgttgacaaaaatctgatcaatatatcaaatctttctcgaaaaatttacataggaaaaaatttggcacctcgctgaaaatcattttagtaaaataagcaagattagaaaatgtttatctgtgctcagagaaaaccaatcaaggaaattaaattcacctaatgatgttttgctccaggaaatactctcttgatgccaattcatcagtgctagtataattctgattaaaatatgtatgatgatgaacacagaatatcctaaggttagaacatcaaactatcaataaagtcaaaacagcagagtcaaaatatacccattcttcaaatttaatagctataaaaagcataataatatatgtgctgatataatcttcatactctccccagaatgtaccagtctttcagcaaggtgcttggagcttctcagagaaagtaagaatatagacatgatcattaatgaggactgagtgttgttcagttttgagggttatggagggtggccttcatttgagccctgcatttatgggaatgaagagtccatactttctccccaagttctaatttgctggcattctccaatacaagggctgccacccctccccactttctcaggttaaaccagacatatttcaaaagactcacaggtgaggataggtactgagccaacacaggaagagactaccaaagatattgttgggaaagacagcttgctctaaccttttcagatgggtcatgatgactgggcacaattttgctggactgagatttcttaggcacaggtttggagctctggggtggtagtggcagtagcatcacttagagattcagctgcgtcttgtccaaggcagggctgtaatcagaaagaggctctttaacaccattcaccagaaacacgataaattctctgaaaattcttgagaaaacccagtctatctatagcatccctaggagaaaacagattttgatgttgggaagatctggattcaaatcttggttttatcacaattaacctcaggcaagtgactgacttaaaatctctgggcttcagttacctcatctgtaaaatggagataagtatacctacctctgcagggtgttgttcaaattaaatgagacactttatgtaaaaagccaagcacagtgcctaccatcctctgtgaacgctgggatgttgtctagcccctagtttaggcctagcaacactggggacaaattacataggagttttgcattgaaaacaaggaagaacatgacagctcatatagtatggaggcaagctggtagagccaatgttcttaaaaggcatggggtcctggcaaagcaattatgaccctacagagaaaacaataactgcacacacatgtattcgcgataggccaggcagtattcaaaggctgcgttcaatcagaagaaactgtaatccagttccagacacctggaaggaacaaaaaattcaaaagatgagattatagcaaaataaactaacttattaaaaaatcatttgacataagaacttgatcttggatttcccagcctccagaactgtgagaactaaatgccacccagtccatggcactttatagcagcgcaaactaagtgctatagaaacataatgattagtaacttcacaccaaatgacagaaggcagtgaaacaccgtttacatagtttctagggaaaaagatttttcacctagaattctatactttaccaattatgcagatgtgagggcaaactaaaattacctaaggacgaagatggtgaaggagtagggggaagagaaaggaagatggaggagaaacagaaaaatgagaaaacagttgaaaagtaagcagttgagcaaagaaaccaataaaatatatggctaaatctaagtaaaggttgataatgtgtctgtgatgcttaatatgactgctaaaaatgtattcctgaagtattttgatagaggcaaaatgttttttaaaaaatccaactacctggaaaaatacaactaaaattcttttatagactttgttcaaggaaaaggatagaaataatgattaaatcataataaaatttatatgtgtctgtcatgccaaactaaaaaaaaaaaagaaaagaaaaaagaaacataatggaaagccagtaatcttgttggggacaggggctggaggaaggcttcacaaaggaagtaacatgtgatcaggacttaaaatgacaaacaggttcccaagttgactgggaggtttccaggcaaagaaagccgagcccaggcagaggcatgaacatacagaattcagggatgtcctagttgtctggagtagggagcataaataacatgttggggaggggttaaaatgaggctgaaaagctaggctggggccaggctggtaagaaaaggaaacagaaaagtctgcagcttgaggggaaagtttaagaaaggagaaagcctgatttgggtttcgctttggatggagaaggatgaaacattttgtaggtcaggaaaagccagtataagtatatgcattcacatgttacctcagttgattctcacaacaaaaccataaggctaagcaaggcaggtacaattctattttacagtctcagatgagttaagtaacttactacccaggacaaactattaaggggcatagactgcccagctttttcccaggcagtttctaaaataccatgaagtctcttcgatcacactcaaaaatattccaaaacagtgaaaggccatagtatgaggaggtagaatgagcacaggtcttggagtttgaataactggacttctaagccagccaacttagcatttctgagcctcagtttcctcattttcaaaacagctataacaccacttacttgcagaggacttgtgtggctcagatgcaaatttacatgtacaaaacctgatgcatggcaggcatttaataaatactgtcttactcccctcttcttctatcaaatccaaacctatattccatctcattcctcaaacctcagccaagcagcaataaagctaaattgggtgcacccactgttaactgcactgtatgaaaatcacttactccactattattatttacgcctcataatttttttttttatggatgaccaaagactcacactctgaaacatttaccttttaaaaggaaaaagaaatacggagcccacaggctagaaaactctcagctgataacatacaggttaactaaatctcagagaaaataaggttatttaaatgatggtcatataccccatttattatcgtgaacactaatcatttgcattgagggacagatgcactgacttaggtaaactaattttcccagggagaaggggaggagaggggattgacactatcaaaaagatcctttcataaaaggacactctctgcggaacactctcaacttctgccacctacagaaccctgagccttgggcaagaaaattagaa

SEQ ID NO: 1563240 - DNA, 4001 bp, Homo sapiens
tcaacaagaggaggactttcaggcataaatggagaataataagttattatattggctgattgctattttgtatttgcagtttaaaaatctataaaagacagcaattaagatgtcatgttatcagaaactccaggtagaaatcagagctattctactaaatgttcactacaaaatgcatattttttcaacatactatagcagcaatattctgtaattgtcacatttctcattgcttcagtaatgattggtcattataaacatcagcctagaaaatagttttctgcagagctaatttgcccacttcattttagtgtttgtgatgcagtgctttataaaaagaagttaatttgcaatgtgtcagttaacgagttctaattacatctctctcccttttaactttagtatttgtagaaaacatttgcatttttaaagaaatcatcttttatcctcaaagtaacaagatattttattttccaatgtcttagaataattaaatgtacagaattcacttgcattatcaactaattttataccattttcttgctttaagagtagattttttagattcaaaacaagattcagttagctggcagcttctgctgtaattaagagcacatgtaaatagtacggtaaatatcagtccactgaggtcactattgcccctttagaagctaggcctatgtccatacatttgattgacagagcacatcaggccaaacacaaataaccaaccagaccagaagccccctcttttgtcagcagtgaaacctaatatttggataacccagtggatgacttcagccctcactacctcaccttatcctgttagaaaaatctcatgacattaattctaggtccagatcctaagagaggacactcaagtatccctgataaagtgcaatcatccagatgctttctagccacagttcctgcatccagaattttaggaacagccagaaaactaatcaactttctcctttacatctatgattggtattttgtcaacaccagccaattatactcctcagtggaagtgaaaaaatacatgaaaacaaaataagtcctgatggttttcttttcctaagaatgcaaaacagcctactaagttactctgctcttttgttcctgcaagtctaaccatttaaaaatgtaaaacatctcagagggagactgagcatcctgcaactacaatcagtgcttgtgaagaattacacagaaaatgctacttttactaaaagactgcaaattctgggacttatccatgtctatgttaatctgaagcattatgaaattttagatcaaattgacgctcttcttgcctagctggaaatttaaaagaaaaaagctgtctccataaaaaaatagcttacttttaaagcagaactttagcaaataattatagctagtgcgtacatagtgcttactatgtatcagaccccctcctaagctttttacaaggctaaactcacttaatctatgaaatggacaccaataccatccccatttctcagatgtggaaactgaggcacttgccccaggataacagagatggtatgggcagagccaagatttgaacccaggcagtctgactccagatcccaagatcctaaccagagacaagaatatgagacttcattgactaggcaacaaacattatgccacaagaccattcttctatttggtttctaccatcatccatcatttgggtagaaccaacctatgaattagtaaggaccccaaatttagttaataaaggcttgtggttcatcttaccttgtccaaccttctatgaagatacacagcaaaaagtgctgacccaatcatctgggtgataagaaaaacagtaagtaaatacataaaaattttcatgctgatgggcagtccagtggccgcagatcggggagaagtttggttgtatgtttcgatcatgctgtgttaaagttgaaatggtatcttctggcagagaaggtggcagaggcagcatgagaagactgtcaaagtggccaccttactcaggattagttaagagcgcacaatcgttgcagcccacacttcctggaaaatgtgcttcgtagtcttctctcccagcaaaaacgttacgtaaaggttttttgtttttttttttttttttaattatacccatatcattcacttccaggctttcctttttgtaagtaaagaagaaacaagtttcttcttccatatattcattcttgccttgaaatgtcatagacttcttaacagacaatggcagtattttcctatcactgtctaactttttgggttcaccagtttcaaggaaagtgacaaattcatccaccagcaatagacttatttcaatttcaatcttactaatacgaagcgggaacctggtatatggagaaagaaacacatgtcaacaaaagtttggattgattttatgactggtgtcccatcaactaattgcttctcagaactttacttctttaatcactaaactcaatgaaagcctggcaggttttcaggtcaagtctacatggcataaagcaaaaaaagcatgctgatggttattaaataaaatttagctggaaagataatgcaagaaaaataaattttgcaaaggcaaagataagtagggtcttgagggaaatcaggccaagactctggaattgaagttaaagtaaaaatcgtgacttgacgtagctaagctgcctgtgtacactgttccaatccattagataattgttgatgctgatgtaacagttcagaatagggaaaataggctgcagttaagagatctgaattctagtctttgctctaccaataaattgctatgagccttgggcaaatcacttcatctctttagacctcagtttcctcatacccaaaggaggcacttgcacctgtcttgcttatcctgtaggttgctgtgaagatctaataaagatgtgcatggaagaaatttgaaacacgttaagcaataaacaattctcatcctgaattttttggaatttatttagcctaagacatgagtttaacaaataattgccaactccttacatgttggtaaaaaccaaatgaacaataacaatattaaaaacaccttaagttttgacaatgaattgaatcactgaagtgtgtaggattacacatttctgaagggcttttgcatcatcttatcagatttccttcaaactaaaagcagctgtggaaatccctacctcacatccaaacctggtctagaaaccatgataaaattgctttgatgattcctataaaattgttttgagagacaaataggaaacgtaaaaactgctctgataggcatgctatctatatagttagcacctgctttcttcccctcccacgccccagcatcctgtcctgggcccagatctatgtagcttttcactacatctgccaagtaggtggcttcgatgcacgtgatgaactttgatcagtcaagtcagaggctttggttcttagacaagtaaccttagttccactgaaggaaaattatcatgagagccaaaatgggctcaaggacttctgcactgtcagttttatacaacttgagagtgccagagctgcaggggccctgcaatcagctcagccaagacccgagggaggggaggctgaaggtcacagatttgttcacgtgaccaacttgaaaaaacagttgttgtccaacctccttgcctcaacttcttgatccccagcctcctacagtctgacttctgcccacaatattcccctgaaattgatcccaccattattagctcaataatagttttggctgaatacttcttagagtttatttttagcgacctctctattactctgttgacctattatcctgttgtcatcttcctgaatgctctccccacttgaattctatatcaccctattcttaagggcttctgcctctcagaatccttcttcatgttatcttctttcctctttgtatcccttaaaactttggtattccttctctctatttcctttccttctcccttctcctc

SEQ ID NO: 1563241 - DNA, 4001 bp, Homo sapiens
ctggtgacagagtgaaactccgtccaaaaaaaaaaaaccaccaccaccaacaaaaacaaaaaaactgtgcaacgacttgtttggggcttagagaatataaggctttccactcactctgctccaatgacctggaacgccagaccagccggcaaatctgtccctagggcttcaaaatccagccaagcccctcaccaagatttaccactgggaacccctgagttatttcgtgatggaactataaaggtccctgtggccctgtctcccgtctgcctgttcagatgcctctgttctccaggaaactgaattcttaggccaccagcactcccttggatatatttccctgaccccaagcccacagtaggtgcaaaagaaggaaggcaggcatgaaggatgaaggaatgcattcgcagagagacaagtgaaaaacccgttcatctgcaggtgcctggggaacaaatgcagctgataaaaccctacagagccatcccgtccgtggtgacaggttgcccgcaagaaggacatttaggaagaaaagggagaaacaggaagctctgcttggaacctcccctgcaggctggaaagtcctccaagttttcctctacggagcaggcttcattatctctaatctctaccaagtgaaagcacaatttctaggatacccgggacccctttaaagagggtgtaaatccattagcaactcctccctaaaaatagagacccggcctagtcaccgcagctctaggctgagctagatcctatcaacacaaatcgggcctcctccgtcctccccagggccgggcgttcccgcgtctccttcctaaatacgtccagccctgataaggcccgtcctgaagtccacactgcccgcaagccggtctacttaaaagcctgcccatacgaagagcaaaaaatgcactgaccattgaaaaaagaatttataacatgaaaaaagaatttataacataccacatccggcagggtctccgtttccgtttcaaagggagggaaacagaaaaacatgattaaagtaataattagaaataggcccggtttagggcgtgggagggtgaccgtggctctttcttccctgcccactttttctgttttccgaattctccaccgccgcagatggacaatttggtaagcacacgtttctttctgcgccccgtgttgcttggcgcacagcacgcgctgaaattcccggagcccgcatccacagagtatttttgaacattttcagggctcaaagtttttttctaacttttccttcccttccccccaccacccgggtctcaggctcctagcgattccaaatttaggcccgggacgcagggcgtggctgtgacaggcaactccagggcggcctccgcgcgcggcctgaagacgcaggtccccaaaccctgggggtagataacggggtggggtgaggggctcatgcaaagggagagagatctgtaagaaggtcccctagattgggaaaaatcggacgcacctctcccaaggccgccccacatgtaagagtttgcaactccgacaacaaacgctgacttttctctctggaacggctccaggaaaagcgttggggagaaagtgggcgcctcctccgggcctgggcccccgtgggcacagcgcgtcctgccgggcagggaggaggctccgggtgtccccgcggggcgcccccaacgccgcatctcaagcggatccccagtcccggcccgcgccctccgcgtcccccaacccggatccctccgctcgctcacccggggcggcgaccagaacacccagcaggccgaagagcagcagcgccagcgcagccccgcgggccatggtgcgcccagagcgcgcagggacggtcccggagtgcagggcgtgggcgaaggcggcaggacagatactcccccacgggccgggtggggcgaagcccggggactcgaagggggcgggtgaggggagcggccctgcaagctcagcgccggctgcgcccgccccgccccggcctccacgcgcgcacagaaggggcgggaacgccgggcccggggaggagacagagggggtaggcgggcgggggtggcccaggcagcgccgaggggagtacggtacacgccccgccccttctcaggaaactgcccacgccccctcacccacccacagggccgtagccagggcggcgccgacccgaagcaaagtgaactacaacgttctcgggaaagtgcgggtccctcccggtttacagccctctgaatgcacgcccgagggcggcccttaactgtagtggcacaaaactgccgcccttcttggaaacatagagccccctctccccactcgcccctgcagccacttctccgcccctcaccccctggtctccagtgggagcaaaaaaacaaactttcccagcagctcccctgctcgggaaagtgcgggtccctccctgtctacagcctcctaaatgcacgcctgcaactgtagcgacacgaaactgccgcccttcttggaaacgtgtagcccccctccccactcgcccctgcagccccttctccgcccctagcagggaccctcccctgctctgcagtgggagcagaggaaactcccggctcccctgctgggaaaagtatgggggcccctccccgctgctcacctcagggagttccccaaggggagcaaagtgcaatcctctccctgctcaggaagcctaggcccccgctccacaggcaacccccgtcccaagtcctttctagagcgtccgagcgcggggtgcgcagccgggagggtggcggacgaaccctttgcgccggaccaaggacaacccttggagtagcctctgcgctggggcagtttctccccagaatccccaggacaaggttgggagtggggactcctggtcacgggagttagtgaggggcaatagggaacgaggtgccttctatctggggcacctgggccctagtcctggtcatgggcgactcgccttccagtgggctttgagtttagacaccctcccgcgccactggccacagctgcagtgcagttgtcgcccttcccacacttaacaatgttatctgttaacacctaagcctaaaattgtatccattttcccgcagggtagtggaacaactttgcagcctgacaaataaccctgaatattcttgcattccacacttcaaactgtccacgaaaagagtcaaactaggccgggcgcggtggctcacgcctggaatcccagcgctttgggagaccgaggcgggtggatcacctgaggtcaggaattggagaccagcctgaccaacaaggtgaaaccctgtctcttctaaaatacaaaattagacgcgtgtggtggtgtgcacctgtagtcccagctactcaggaggccgaggcaagagaatcgcttgaaccggggagatggaggttgcagtgagccaagatcaggccactgcactccagcctgggtgacagagcgagactccgtctcaaaaaaaaagaaagaaaaaagaaaaaaagagaaaggagtccaactctaacatatttgaagagatttattctgagccaaatatgagtgaccatggcccatgacacagccctcaggaggtcccgagaacgtgtcctcaaggtggtcggggtgcagcttggtgttatacgttttagggaggcatgagacatcaatgaaatttaagagacacattggttttgtccagaaaggcgggacaacccaaagcaggaggcttccagcttataggtagattttagaattttctgattggcaattgcttgggtttctttaaagtcctgggatcaatagaaaagaatgtctgggttaagataaagaattgtgaagactcaagttcttatttgaacaggaacccttccggtgctagggtcagagagaagaggttgtaaaatgtttcttctcaaacttaaaggctgtgtggatgttaacgccggagaggcaccgggaggcatgttcaacccctgcttcccgtcacggcttgaaacactctctcaggtta

SEQ ID NO: 1563242 - DNA, 4001 bp, Homo sapiens
tcaaatcataattctggcaatcgctgtgtgacctaaggcaagttacttcacctctctgtgcctctgtttcctcatctataaaacagatgtactgtttctgtctcctctaccacctcttaaatcaacaattgtaacgtgcaaatctgagacccaatcatttctattccccaccttctcaacgggcacaccatgttgaagactttcagaagacagctttgaagggagtatcatttttctaactttttttgtgcttctactttcaagatttccatgtcattagatgcaagtcaatcaaatgatcatacattttcctacaaatgcattgtaaacaaaataaaaattttatcccaaagggaaaatgaaaaagaaaattcaacaactctttacccctgtaacttcctttatttttctccatagcactgacaatatatatagatttcaatgttgggcttgttttctgcccggaccaggatgtaagctccatgaagacagtctcaattttgttcactaccgcatcatcagttcctagaacagagcctggcacctctgcagaatgttaaatggctcttcgtgaatcaactccaggtgggttgcccacatgaaaaacatttctgcatcttttgcaaaagtggcttggctagtaccatccactgttttccagtgttcctttatgtgacataaatcttactagaactcagtactaggacaaagtgtgtgtgtgtgtgtgtgtgtgtgtgtgtttcctgagctcacatattttccaccagctgggttcgcttctattgtcaggaagcttggagcataattcacgttcaattacagtgtttcccttaatccctttttctgatggggacataggatataaataagtgtaagaagattctgttggtacatgtttaagaccctatttttaaccacagactgcatttattctactaagatgcttctcaaacttgaatgtgccagagaatcacccgcggatctagttgaaatgcagaatcagactcagtaggtcgggggcggggcgtgagatgctgcagttcttacaagctcccaggtgatgcctatgcggctgggccctggaccacattttgagtagcagagggtctaagaaacgtgcttccttgattcagcgggatttctctctcctgctccttggcaaaacatgaccaaagtctcaaaaactgaagcggacggcagaagcacctagagagctggttagacctacgcctcgctgaccccccccccccccccccacagcccatgcccgctgtgatcccgatgaaaggggctaggaatccacctaggaagttccccaggtgcttctgctgtcggtggcctcgcagcaaatttcgaaaatgactgctctcttcaaggttttctcaaaggtaaactcttggggacagctgttgtcaccagtggtacacctgctcgttcaggattttagggggcccatcccgctgtttccagcccagcgtcaggaggggacccacccctcctctccggctactccgaccgcggcggagtcaacccccacgggcccggggctcggacccccgccgctccgcctcgcacagccgggccggccggtggcagccaccgcaggcccgagaggcggggaccgtgccgctcatgcgcagagcgacccctgggcccacaaggcggggtccccgcgcggtccccgcgcgccccccgcccgccttacctcgctggaccagggtggccaaggagaaagcgaggcagacaaggaacgccgagcgccaggccaccatggctgggagcaggcggagggccccggaggagcacagttagcgcgagagcgcccgaaggggaggccgaggaggagcgggaggaggagccccgccgcctctgcagggtcccgcccaaagcccgcgcgcgcgcgcggcgcggccccgggaagatggaggtcgggcgcgctagagagccggcgcctgagggcgcctgggctggggttaggccggggggcggggcgaggctgcagtatcgggggcggggccgcgttctggaggcggggctccgggcgaggggcgtggcctgcgggcacccggtgggtggggaggcctgggttgggttgggctgggtccagcggcagcgcgcggtccgcagaccctgtcccacctcggtcctcgagaccgaagtctcggaggtggccccgcggacctggagcagtgagtcaccagtgccggggagcgggaggcggcagcgccggtgggcgccgatttcctcccgggtgaccttgagaagggctcttccccttctggccttggtgttctcccggtgaagggttgttcccttggggcccctccagacaccgtccagcacggagccccgcactctgtccccacccgctgttccctgcaggagtgaaaccctggccggagactgaagaaaaggaccgttttcgtgactggctgcggtcaacaagcagtgacacgtctcgagaaaacgaggccgggggcgcccgggtgggcgacaggggaggatgggggcgtcccggagccgaagcgccgcgggctcgggagactgggggtagggactgggtcagctctcccgaggctttgatgaatgcgctgaaagtgcaagttcatatctgcagagtcgatctcaaaaacgtgcttaatgaccgacaaacgcgctgcagtcctttcccatgaacccccgcaaacggagtccgtctcccagacccgaagaaatcagattccgatacgatactgtgccgaccagcaaaatgcccgctgcagcagttgatgggaacgctccctagaagagccccagctgcaaccggctctcgaagacaaagaggaagcgctactgctctccggagtggtagcgtgagcctgtccctgccattatgcggcaccggctgcccagggccacatcctccttagagggcggctactaccacctcccctcaatatccattcggcagctttcctgtgcccccaacccagccctcgctgccataggcacccccctcagtggctcccaccaacccctaaggaacagtggggtgtggggtctccctgagatggagccgaaatctcccgtgtggcttacatccattgccctgaatcttagggctgcagaaacaaaacagcatatgaggagtggatcttcccaggctcagggcattaattactctatgaatggaacattattccattctagctgtagaattaacagaaatagctggtagttattgaacacacactatacacatggcatattccaggcattttacccttaatttttattcctcacaatgccttatgtatcatcacctattaacgagggaaaagcagcaaaatggaggttccttgaggttggggagttagccaggtctagtctcatgtgtcaaagggggagggtaccactaggaaccccagctggtgaatggctaagaatgtgtgctgtagagccagaccgggtacaaatcctggctaaacccaacaaggttgtgctaaggattaaatgaggtggtgaaaagtggacagcctgcacacagtgacagagggcagggaccattactggttaatctagtaacggctaaggaaatagtggccactgtgaggtcaggaggttactgtctattccaggctgtggacatgcccccacctttgctactaagtgccctgagccattccataggccctggtggtaccatctgtacctggagggcagtagattttctggtctttaggagtcttccaggatctgatgggtaaaccctgatgcatacacactcatctacactgaggaggtgagaagcatgtaacctcttaagtttgaggccatgtcaatcaatatgcagtggacagtcacactcaactggaactctagctgctaaaggtgctacaatgccatatgcaataagactgtcttctagctcaagaatagttctcaaactacaccccgtgggctaaatcctactcccacctgtttgttcagccttccagctaaaagtagtggttgcattttta

SEQ ID NO: 1563243 - DNA, 4001 bp, Homo sapiens
ttttgcctttgtagacggtggcataggtaccctggaatgtgaggaagtgtgacaggagaggtgctatgagattccaggagttcccactgaccttcatccccaccatgggcctcctatttgcctctcacctcgcccagtttgtccagcttaatgtaggtctccagtttcccaaagccaatctcagactgtgggacaaatgaggcaggttaaagctggctcaggagaagggtctgggagagaagaaaaaggagaggacgggaacagaaggtgcttactaggctgacacgacggaggcggcggctgaggggcttgtcaaagatggggctattgagggtcagcttctccaggtagccctcaggcagccggatgtcagctggtagtgataggcgcttgttgatgtcctagcaggtaaggcaagagagaaacaggatcatgagctccacctccccaggtccaacccccttttccagttcctccaccatccagacggggtcaagcacctcagtggagatcttgcgtgggggatggttgcgcatacgcactctcactggagactgcacctcatccgaggacgtggctgaagcctggtcactctccccatcagaccccatcttcaagtcctcgtgcacaatctctggtggcagggagaggggtagggcaggccaggtggggtcaggaaccacaggacaccccatcccccacgaaacatattccatcatcacacatgtgtgcacgtggcccccacaggaaacctggagtccctcggggagagggtgatgtacctgagcccagggaagctcaggtacatctagggcaggttgaactggggggtggggaagcaaaagtcacctagtggaacccttccttccaagggcaagctgagctcagagccggcagctaggtggtggcaggggaagccaagggtcctgggaaggcaggcccagggcaggcaggtaccagaggactgaggaggccatcatagagggcagaagggcagagggagccttggggcagctgtgacaggcaaggcaccttctgtcccccaccacggggcctgggcagaaaggcaagaagaggagcgcagatggacagatagacagacggtgttgagagaagatgggagggaagggggagaagagagcacatggggggcagagaaagggcagaaaatttagaggaaaatgaggaatgtgaccaggaggcaacacctgggaagcagcctggggccatatgggagaggggatagccagtggacccacctggtgcagagctgagtgggccccgtgcagaacgaagttccccaggagcagcacgtgtgggggcctctccagggtcactgccgccaccaccaccactctcatccaggcctatctgctcaggggcaccattggtcttgtctatgcctcggccacctcggagtgtcattgacagctgccgtttgatcttcttcatccgatccatggcgatctgagcaagggacaaggatggaaatgggtctcttattagcatttgcttgatcaccatgggttccctaaagcccacagcctagcagggggcactgacatgaacttgtcagtgctcactcaaccactatggaccccagagccactcaggagttctggaaacccagcatggatggggatctttgtcagtacctgcccacccacacagccagccccactgggaccctgctcctacgtagcccacctgagttctcagatttaggtggctgattgagggcaagggccctaacgatggattgttgggatctaggggaaaagccccactgcaggagcagaaggctccattgcagatcttctcaggtacagctgcagtgatgggcccagccatgggtcggccagggcgtgtgcccagaattgaaggatgggtgacatggtctcgagcacggccatagagtggcatagttcccctagcaccaccctcaaaggccaaggcagactattccctgtggccacagggaccctcttcctgacttctctagcactcatcgtcatgacaaccactgcatcatcccattcatctacccaggtggggggggggaggggagcgtgtgtcagggtgtcctgcccagacccaaccactgggtgggattgtgtggagggcgggggggtctcagtgtacaccagctcttctcagggctgccagaacggtttgatcaggttaggacccctagggtccaatctagacttttacaagccaagtcacatttctcctctactcaagaatgtacatttttcatcaccccaaatacacgccccagtcctcaatgtggcccacaggtgtttctttacctcatttgcccctattgcctcttgcccacggcccccccccacccccacacccccccgccatcattcctagttgctgttctgcaaccacacccagtagagtcccacctcggggcctttacactggctgttcctggtacctggaacacccttcccctaaatttcgaaatggctcactcccctctccctttgggccattgctcaaaggtcacctttttcatgaggcctctgtgaataaccctatttaaaatctcaaccatcccgaactccctcaccttgccagttatccccccagcactcattacctcctcagaaatgacaccacctacttattggtttctttagtctttactgtctatctcctcaccgccacaactagaagatcagctccgccagggtagatttctgtgtttaggtcacggctatatcctgaggacctggaatagtgactgacacagagtagatgctcaaaaagtgcttatggcagaaataagtgaatcagggggctgagggcctaggaccaacctctgctgaggtgatgagtccctgctattcattgaacaaccctaaacaaggtagcccagggatgctggcatcgacaggaagatgacctagatggattgctgaagggaatggggccaccaaaaggcttaggccagccgtcttctgcttcctcttgggctctgggccagcaaggagggggaaagacctgacccaggaaccatctggactcacagcagggcctaagatggccctgggcccaagggaagtagagctagataggaggtcgaggatgagactggggctggatttgaggagagaaatgggtcatctgctaccttgaaatcaggtgcttcccccagcagttctcgcccccacctggctgaactcactatccccaggaggggtaggggccaccctagcagaaagacctcagatacaggatgaggtccatccatggagaacccaggataaccacaaaacatcctgacctgggaggctgaatactgggcctaaggcaaggaaggtaaagcatggccagctcccaaagacaaccttgtgtccccatatggcacagatacccagttgctttgcatgttgtgacagggagtaggggaggggctgggggagactggaagtagggctgaatggaggatggggaggaagccaggaggagccatgggtccacgacctctaactggaaaccccaagggctggacatgctctggagttcagttttttgggattttaggaagatggggtgtaaaatctgtatatcacataacactcccagaaagggggatgggggtctcagacatgcccctgtgaacagagataattgaacatttatacgcaaggaaacttttaaatatcatttcagttgaatgagctttttagatttcaaaaaaggagggagcaagaaactggacataaaaccttaccccaaaaaaggcacatgtcctgcctgacccttcctgatccccaaagacatacacccatcctcagactactctcatactcaaggatactcaacacaccaaccactaaggacttggtcatcgcaccctatgtcctgatccccattaatacacgctagaccctcaaggaggcctcactacatcttacctgctattatctcatatacccatcagcattcaaagccctaacacataacataccgccctgaactct

SEQ ID NO: 1563244 - DNA, 4001 bp, Homo sapiens
tcagcacaaactgagtcttcactcaggcctgatttctattagcacacgccgggcctcacacagtcctgcctccccattagtgcaccctgaacccttactcagccctattccgcagggacacacaaacacactgttctaccatggcctgaccctcattagtgcacacaggtctcattcagccctgactcccattagcacacacttcagccctccctagctgtaatccactttagcacaccgagatcatcacacattcctgtcctctattgctctctgctcagagatatctccacagatataatccttgttggttcacacttagatcccttcatgaaagccctgatcccccttattacacactagatcccctccgcagccctacccccgagtagcaccccctggaacctcaacatactctggtcctccgcggacacaagggcacaatcttcacaaggttctgatgcttattagcatattccagacttcacacagctgactctcgaaatggcacacattgaagtgcctctatgtctctaaacccacattagcaaccaccagtacttctattaccctgctccttcctagtgtgccctcgagactcacattccctgtgtccatggacacactcacacctcacatcacctttacccttcgtccactaagcctctgacagtgctaagacacttccccaccactccttcctgggcccagacagacacgcaattctcatctcctttaggccaggctcaggtattccacagtccttcctccgttagataccctcaggtccttcctccactctgccctcattagcatatactgggtcccaaactacctagaccttcgaggccacaggcatacaccctctacagccatgacccccactggcgcacacaccacactcgagtccttcagctacctgccctccacaagcacacactgcattctcacacactgcaggccccacggacagacacgcagtattaacaccatccagggcctcatcgccacgcaccaggcctcagagccctgaccccaccaacacacgttctggtacctgtgccaccctgtcccccatgaacacacaccgggcctctctgcggacataatccctatgagcatgtcttagaacttcctcgacaccctaccccccgttatacaccctcgggtccctcacccgctccgcaccccgccctccttccacaagcacacacggggccttgaaccttacacgacttattggcgtgaggcttactgccacatgctccgacccccatcagcaacccccccaagtctttcaccccattgtcacccatttccacaccctttggtcctttgactcccccaggtccccattagcacccacagcactacccaaccccagctcccaggacaggcccagggcggggccaaggtcagggaggccccaaatgaccccccgccccggtgcattctgggaaattcgccgggggtgggggcacctgccagccccgcagcccagacccctgggcaccgcccgaggtgggttctgaaggaggaggggcagcctccacgcctcggggacgcgctcaccggcgggggcgcgcgagcaacctcagagccgcggggccggcgcggcggcgcctggggcggcggcccgggatgaggccgcgcgacctccttctcctcctgttcgccgcaggcgcccgtcccagtagtcttcagccatggttgctgggcccgggccgccgccggctgaggaggaggaggcggcggcggcggcggtggctgaggcggaggcggcgtcccgctcagccggccatgagcttggccgctgcgggcgatgcccccggactcgttggcgccggcttgaatccgagtgctcacggcggctcgcggcacagagcggtctgatcgcggagtggcggcggatcccagggccgaacagccaacggcccaaccgccgcgcgcgccgcgctccgcgcatgcgcacgcaggcgctcggaagggtgaagtggaaaggaggggactcacctcggactgcatgtaccaaaggacccgtccgcagcgggaggggacgcggccatcgcgagcccagaggaggatgcggcgccaagccggagacggcaccagggagaactgtggaggctgtttagtactcagttccgatcttggcagaagtttgctagcgcctaggtgagcagtggccagtaacctggcgcgtcaatcaccactcgttccccctactcggtctcacttggtacatccccatggtggcaaacgggacttttgcaaggaggaaaaaagacaaatgaagcactcagttctagtcccttgaggtgcttggggaggaaggcattttaaaggttcgcgagaagatgacttttcgaggagaggcagcctgaagagttattggcctttaccaccttagctaggacggcctatccccgcccaactgccccctccaccgctacctcattcccgtagtgaacgtgtgcagccccgccctttgaggttgtcgcccagccaatctgatttgctctctgtggcgaggccgagcaagaataaagggcgtggctgactgaagaggcgtgatttcgctctctacccgactccgcacgcctccgcccaggtttcataggttttcaccgtcggcgggggtggggtctcctttttgttctgagctcctccttcgctataggccgaatattccgcaaggtgattggtcataattgcgctcaatcgagtctcgtcccgcctttagcccgccctccatctcatacagcgggcctcccggggtggaacccaggctgagaaagaaggaaagaggcggatccttagaggcgcaggagccgctactgcgcatgcttggaacttcgagcggggcggagcctcttttctgcctcacacgagtatttgcataggcgccgtgcgttggattttcctgccacctctcttgcccggcacagcccctcccgtgcctcccctcactctgagggttttttgttttgttttgatgtcagtcaacacaagtagaacactccgcggttttatttccattttatttattgggcgcatgttgtgtgccaagtactaccaggccgacctaatccttcacttccttctgcctggaaaaccacactatccccaagtccagctcaaagggctgcaacctccagcaggccttctggcacatccttacactaccctgttccaaggcagcctccccgcctcttccgggcttccctttatggcagccttgatcacagcagttaggattttcagtaaggtttacattagtgagatttcccgggccatgatgggagtggaaatatttgacaaagataaaagtcctcgccttggcatagaacaggctcatcacttctctgacctcatctcttcctcttcttcccctgactcactgccaccatactagcgctctttctagctgtttgagtgaaacgggcacaatccagcctcaggggttttgcatttgctgtggttccctttgcctggaatgctgctggcccacatccacgtgcctcattctctcacttcttccaggtgcttgcttcaaagtcatctccatgaagcctttccgatttaaaaattcctacctgcactgccatcattccagatccccagatcgggctctattcctcgccttttgaagagcactgatcaacttctaaggtacaatttgcttactgtgtttataatctattctgggtgtcaacctagcagaacgtaaaaccccaagaggacagggatctttgttttatccactgctgtctcacgtgcctagaaagtgactggcacacagcacacaacaaatgtttgttgaatgcctgccagagcaggccaagaaaataaaatgatcagaaggaggtgggcaaatagttccaggcagtgacaagagaaacctttgtcccaccctatcctttgtggctgctgggtgcagggggctcggtgcaatgacgcaacccccgcctgctaagccctgatctcccatctggctggtg

SEQ ID NO: 1563245 - DNA, 4001 bp, Homo sapiens
caaccaccagtacttctattaccctgctccttcctagtgtgccctcgagactcacattccctgtgtccatggacacactcacacctcacatcacctttacccttcgtccactaagcctctgacagtgctaagacacttccccaccactccttcctgggcccagacagacacgcaattctcatctcctttaggccaggctcaggtattccacagtccttcctccgttagataccctcaggtccttcctccactctgccctcattagcatatactgggtcccaaactacctagaccttcgaggccacaggcatacaccctctacagccatgacccccactggcgcacacaccacactcgagtccttcagctacctgccctccacaagcacacactgcattctcacacactgcaggccccacggacagacacgcagtattaacaccatccagggcctcatcgccacgcaccaggcctcagagccctgaccccaccaacacacgttctggtacctgtgccaccctgtcccccatgaacacacaccgggcctctctgcggacataatccctatgagcatgtcttagaacttcctcgacaccctaccccccgttatacaccctcgggtccctcacccgctccgcaccccgccctccttccacaagcacacacggggccttgaaccttacacgacttattggcgtgaggcttactgccacatgctccgacccccatcagcaacccccccaagtctttcaccccattgtcacccatttccacaccctttggtcctttgactcccccaggtccccattagcacccacagcactacccaaccccagctcccaggacaggcccagggcggggccaaggtcagggaggccccaaatgaccccccgccccggtgcattctgggaaattcgccgggggtgggggcacctgccagccccgcagcccagacccctgggcaccgcccgaggtgggttctgaaggaggaggggcagcctccacgcctcggggacgcgctcaccggcgggggcgcgcgagcaacctcagagccgcggggccggcgcggcggcgcctggggcggcggcccgggatgaggccgcgcgacctccttctcctcctgttcgccgcaggcgcccgtcccagtagtcttcagccatggttgctgggcccgggccgccgccggctgaggaggaggaggcggcggcggcggcggtggctgaggcggaggcggcgtcccgctcagccggccatgagcttggccgctgcgggcgatgcccccggactcgttggcgccggcttgaatccgagtgctcacggcggctcgcggcacagagcggtctgatcgcggagtggcggcggatcccagggccgaacagccaacggcccaaccgccgcgcgcgccgcgctccgcgcatgcgcacgcaggcgctcggaagggtgaagtggaaaggaggggactcacctcggactgcatgtaccaaaggacccgtccgcagcgggaggggacgcggccatcgcgagcccagaggaggatgcggcgccaagccggagacggcaccagggagaactgtggaggctgtttagtactcagttccgatcttggcagaagtttgctagcgcctaggtgagcagtggccagtaacctggcgcgtcaatcaccactcgttccccctactcggtctcacttggtacatccccatggtggcaaacgggacttttgcaaggaggaaaaaagacaaatgaagcactcagttctagtcccttgaggtgcttggggaggaaggcattttaaaggttcgcgagaagatgacttttcgaggagaggcagcctgaagagttattggcctttaccaccttagctaggacggcctatccccgcccaactgccccctccaccgctacctcattcccgtagtgaacgtgtgcagccccgccctttgaggttgtcgcccagccaatctgatttgctctctgtggcgaggccgagcaagaataaagggcgtggctgactgaagaggcgtgatttcgctctctacccgactccgcacgcctccgcccaggtttcataggttttcaccgtcggcgggggtggggtctcctttttgttctgagctcctccttcgctataggccgaatattccgcaaggtgattggtcataattgcgctcaatcgagtctcgtcccgcctttagcccgccctccatctcatacagcgggcctcccggggtggaacccaggctgagaaagaaggaaagaggcggatccttagaggcgcaggagccgctactgcgcatgcttggaacttcgagcggggcggagcctcttttctgcctcacacgagtatttgcataggcgccgtgcgttggattttcctgccacctctcttgcccggcacagcccctcccgtgcctcccctcactctgagggttttttgttttgttttgatgtcagtcaacacaagtagaacactccgcggttttatttccattttatttattgggcgcatgttgtgtgccaagtactaccaggccgacctaatccttcacttccttctgcctggaaaaccacactatccccaagtccagctcaaagggctgcaacctccagcaggccttctggcacatccttacactaccctgttccaaggcagcctccccgcctcttccgggcttccctttatggcagccttgatcacagcagttaggattttcagtaaggtttacattagtgagatttcccgggccatgatgggagtggaaatatttgacaaagataaaagtcctcgccttggcatagaacaggctcatcacttctctgacctcatctcttcctcttcttcccctgactcactgccaccatactagcgctctttctagctgtttgagtgaaacgggcacaatccagcctcaggggttttgcatttgctgtggttccctttgcctggaatgctgctggcccacatccacgtgcctcattctctcacttcttccaggtgcttgcttcaaagtcatctccatgaagcctttccgatttaaaaattcctacctgcactgccatcattccagatccccagatcgggctctattcctcgccttttgaagagcactgatcaacttctaaggtacaatttgcttactgtgtttataatctattctgggtgtcaacctagcagaacgtaaaaccccaagaggacagggatctttgttttatccactgctgtctcacgtgcctagaaagtgactggcacacagcacacaacaaatgtttgttgaatgcctgccagagcaggccaagaaaataaaatgatcagaaggaggtgggcaaatagttccaggcagtgacaagagaaacctttgtcccaccctatcctttgtggctgctgggtgcagggggctcggtgcaatgacgcaacccccgcctgctaagccctgatctcccatctggctggtgttaacaatggtagactggtagacaaaccgcagaagtaaaatggaatgaggtggagggggaacaactaagatgcaaccaggattcatgcatgactcaaaagcttgttttgatggagaagggtgtcaggcacgaataaggtgtcaaggagatccaggagttgtggtggggaagacatggagccgtaatgggggaggtgcagtgaacaaggtgtctatagagtatccgcaaaggagctggcatactggagaaagaagacaacagttgtgttcaagcctcagctgctgtagtggtgtggccagtggactgcggtgtggagtgtctagggtactctagagcaataatgggaaagttcctgtggtgggaaaaactttccctttgacagtatcaccactagataccaaagggaaaatgcctctgtcctcaacgtcctagtggggaagaagaaactgtggaaggataaggtcacccaagcagagcaggccaagaaaataaaatgatcagaaggaggtggacaagggcatatactgtgcccaggaccaggaactact

SEQ ID NO: 1563246 - DNA, 4001 bp, Homo sapiens
gagacgaaactattttaaaagataatggctaagattttctcccacagctgaagacatcaggggtcctcagactaatggaatacatcaaataaaagcaggatacataaaacaaatccacacctagagatatcgcaaaaaaaaaaaaccctgaagatcaaaaaaacaaggaaataaacagcaactcaaaagtactgtaaataaaaaataaataaataaacaaggaaaagctcttaaaagtagctcaagaggagagagaattacttacctacaacgaaattacaactaaactgactgttgacttgtcattagcaaataaaactaggccaggtgcagtggttcacacctgtaatcccagatctttgggaggctgaggaggatcacttgaagccaggagttccagaccagcctagaccaaaaaactaaaaattaacgggagctaaatgataagaacttatgaacacaaggaaacaacagaaattggggactacctgagggtggaggatgggaggagggagaggagcagaaaaaatgactattgggtactgggcttaatacctgggtgatgaaataatctgtacaacaaacccctaagacatgtgtttacctatgtaacaaaccttcaggtgtacccccaaacctaaaataaaagttaaacaaaatttaaaaatctgtcaaaacacaaaagaataacattaactatccccctctacctgaggggaagggtgagaggaaggagaggagcagaaaagataactactaggtactgggcttattacctggatgatgaaataatatgtacaacaaacccctgtgacatgtgtttacctatgtaacaaaacttcacatgtagccccaaacttaaaagttaaaaaaaatttacaaatttgtcaaaacacaagagaataacatcaaagtactcggggaaaggaattaacccaaaattctggacccagctcaacaaccattcaagggaaaaagtgaagtacagacactttcacaaacaccaaaaccaaatttactattaaggggcccttactgaaataattaagaacattttttaataaagaaggaagaaactgaaccaagaaggaagaaatggagtgaaggaagaatggtgagcaaagaaacctgaaaagcacatgagtaaatattcactatttttattggtgtaaggtggcttaaataaggcaaaactaacacataaataacattaacatggaagaggggctgacggttaaggagtaaatcattccaaactcttggtcttattcaggaggacaggaataataattaagcttagacttaaggaaacgctcatgttaaaattttaagagtaaccaaatttctggcttaaaccctggaataagagaactacaatgaaaaagagctgaactaatttcaaattcaagactttctttaaacccaacagagcgctaggcgcggtggctcacacctgtaatcccagcactttgggaggccgaggcgggcggatcacgaggtcaagagattgagatcatcctggctaacatggtgaaaccccgtctctaccaaaaatacaaaaaaagtagccgggcgtggaggcgggcacctgtagtcccagctactcgggaggctgaggcaggagaatggcgtgaacccgggaggcggagcttgcagtgagccgagatcgcgccacagcacttcagcctgggcgaaagagcgaaactccgcctcaaaacaaaacaaaacaaaacaaaacaaaacaaaacaaaacaaaaaaaccaacagagcaaccagttggctcaaaaactaaggagagtacctgaagggagagaggagacgaccatgtgctcgcctgttggagagtacagctggacaccaaaaagaacgggtagaagagtcagtaaatgcgtgaaatccaatgtggcttgctgaaaagatagtgtgaaaccactgggggtcacagaaattgaggatatgatacctcaacttcctgtagggtcttcctcctccaactcccccaccccactcactcagagctctaaagagtcctgaggtaggctcattgtgatgcaaacctgggggtgggcagcagctaagcctgagaggctggacactaccctcagatcactctcccctatctccactcaggaagacaagccttcactgtgacagaaaggacaatggttacttctacccttaagacaatagtgaaaaatcagagcagcagggaggaggggtgggggcccaagtcctgggagaggggtaggattccacattgagcccaatacaacagccagggaaggggcaagatcctgagagtcaggcctgaaactgaggcttaatcaagaacagagaccacatcctatcacccctccccacctccaagcaaacaaacttccaggaacagtaagagcagaatatcactgagaaagggacgggagaaaatcaagagtatgtaaagagaccctcactaaagcacacttcgaaggggagacctgaaatttagactggaacagacactgttctggtaaaccaattcccaccctgatcacaaagtatctctaagagaatttgaaaactggggtacactaggttaaccataacaacacaaaaaaactcaaatccagcccaatgtaacagtgaaaaggaagcctagcatgactaacatcattttgcttctaagcccccccaccaccacccagtgaaaccatctaactatgggagaaattcagtttatagtttaaagcaaatagtcccttctgaaaacccctgaagagataggggcagtgtacacacaagtaacaacgttgttaatgatttttttttttgagacagggtctcactctgtcacccaggctagagtgcagtggtgcaatcatggctcactgcagcctcgacctcctgggctcaggtgatcctcccacctcagcctcctgagtagcgggactacaggtgtgtgccaccacacccagctaatttttgtatttttgatagagacggtgtttcaccatgttgcccaggctggtcttgaactcctagactcaagttatctgcctgactcggcttcccaaagtgctaggattacaggagtgagccaccatgcccagccatgttaaagatttatagtattgtgacctgaccaaggacaaagaagtttcacaacctccacagaccctcactgccacctagatgtctgtggtcatcatagtcatctcttgacctcaacctcctccctcttccctcttcctctaacataaaaggaggcgaaaattcatattaagatggttctttcggacattactagtccaccatcttctcaggttgctggctctccaaataaggttgctttctttgcgccaacaccttgtctcttaacttattggctgtcatttggtgagtagtacaaccttggacttggctacaccaattcctaactagattaactcaaataccagcactaacggcctagcagaaggaaagacatacccatttaaagacacaaagattatatggaggctgaagtgggtggatcacctgaggtcaggagttcgagaccagcctgaccaacacagtgaaacgccgtctctactaaaaatacaaaattacctaggtgtggtggcacatgcctgtaatctcagctacttgggaggctgaggcaggagaattgcttgaacccgggaggcagaggttgcagtgagccaagatagtgccattgtgctacagtctgggcaacaagagcaaaactccgtctaaaaaaacccaaaacacacacaaaaaaatgatatggccaggtgcagtggttcacacctacaatcctaccactttgggaggccaaggcaagaggagcctgaagatatgactgaattgctgtgatctcatgataaaacatgaatggacaaaggagttgctgcttatggaagaacaaaggaactgtttttctgagatgaaatctactggtaaagatgccttaaacatttttgaaatgactatttcaaaaatacactactctataaacttag

SEQ ID NO: 1563247 - DNA, 4001 bp, Homo sapiens
actatgttaaaaaggcaagacaattcaaagagatttgataccctctccaattgaggaacccccaactactctgaaatggcagataatatctaacactcttggaatggttaactttatttagtatgcctcttttgtagttctattatttaatagagccaaacggaatttttccctaattaggtttccttgtacttgtgaaatgctcagcatacagtgctggcagcattagcttctctcttctggctccttcccccctcaaccaccctcacctcccccccaacccccgccccgaaaaaaagatttccttcccaaatgttctcttctctgcatttgtcaacagaaacacctactggtggtgtcaaactgctaagactgctgcaggcttccttattcctggtttcagtgtcaacgccaaaaattctcaatcctaaaatagtacttttaataaaaagaaattagaagtcttgctaggtactcaacctatcatattctcgaaaagcagcacgccttttttaaaaatctattattaatggaccctaattggattgttaatcataagatcatactatcaccttcaacactaacatacaggaacaagtaaatatagcctcttcacattttgtgaacaaaacattttaaaacacttgaaggaaataaaaacaaatttacatctaagtgtcactcacatgtaattccgaatagcctcggtgaagatgtcttttttgtaaccctacagcaagaaagaaacaagctggaaatgttccagcagatgttacctaaaacgataatcctgttctatacacatctctgtctcctgtttctgacaaacgctctcagacaaattaatttgtgtaatcttttacattaactatataaccattacgttcaaacaaacctaattcagatgcacagaaagaaatcattcggtgtcaacaatactttctaaaatcagcttaaattccagccaattaaaatagattgtgctaacagaatactgatctgcaactacttaaatatcacagcacccgtctaatctcactgtagagatactaaggtcaggcttttcttattcaggcatctgttctttaacactcaaatgaagcgaaaaacaaaaccctcaaggaagatctgcctttacactgaaatatgttcaggttatttttttccccaacgtgggcacaaaacgtgtcaatgcaaggaggacctgttcgttctgggagacggttccaaatcccagaatccgatttctatgagggtccaaaaggtatgaaggtctgagaaggggccattcttcttccccgcactatgccagtcgtgaacttcacagcatcgcctgaaacttgtccgggggaggttgcggagccgcggggccggcgcccggtcgctagcccaccctcgcgggcagccaaggtcagaagggcccgggccgcgactgacggcccctggcgagtctcgggctccctccgaactcgggcagggggctggggcgcgcaggcccctcctcggcgccggcgggaaggggcttacctcgccgcaagccccggggagctcgtgccgcgggagcggcggggcggggacgccgcagacccgccgctgaggggaaccccgcggggcgggctcgacccgccgcccctctttcacaccctttcgcctccccacaccccaaaagacagccccagcccctcgggggaagcccttccagaggcgcaggggagcgctgaggaggggctactccgggctgggacgtcctcaccgcgtcgccccgttccgggggaaccggcgcccccgccccttctcttgtccgcccggggggactgggtgggtctccactctcaggagaagctgggtggacgcggggccgatgtaagggtaagaaggcttggcgggcgggtggcggcgcgactactcaccccgccgagtcccccacttctagcaggggaccccacagctcctgaggacgccgtcgccgctttaccttccccagcggcagagacaactaatcgaaacctccggccccgccctctagcagaagcgaacgcgcagcctattttgctaactgccccgccccagccggcccgttcggaccaatgggaaagcacctcaggttttgcccgatcccgcctttaccccgcccccttctggtaggagccaatgaggaggaagcgcttgtcctggggttcgggctcgcgccgctcgtgctcgagtctccgaagccgaagaacgctggttccttatacaagctcgcctgcgcgctcacgcgcgcgccgcgcctcctggcacgccaggtttggttgccccgccaagccctagcaacctgggctggagaggctgagaggggcggggcccgagcctggagtcgacgccggggggtagagcggggaagcagggagagggtcgacggtggtggggtggggagatcgtgactgagaaaggggtggctgcgggggtaggaggtggcgaggaggccccggaatccgcctgtcactgcggaaaaaagagggaatcctgcctgcagcgcagctaccctgccctccctccggagggacccgtgccgggggctggggtgggggaagtcggagaagagggggagaacatactcggggcgggagctgagaaatacaggatggaggatggtttatctctgttgttggtaaaaatgatatcgaagtccattgctgctgctgcccaactgttgccgctgcgtgtgcacacacacacgcacatatgcacacacacaacacacactcacacgtacactcatccagcagcttgcggtcccttgggtgagttaggcgcaaagacctagcagcctgaggattccttacacagcagctgggcgcgtgcaaagagctgttgcagcagtagcagcagcagcagcagcaacgacccacacctccgcttcggtccgatgctctgccacacaagatcccccagctggcttgaaagcaatgaagtcatcgcccaaccagtacaaatgtaaagatcttaatacccaccatggatcgggtttccaaggaggatgaagaggtgatgaaattgaaggagataacatttccaatgctacttttagaaaataaagaaaaaaaatttttttaaaaagacattggggacaaatctatggaaagctgcataattattttcgctttaacaagcaaaggagaaaaatagggtctcttctggttaggaaaagcacggaaaataggcagtgtatgaggtcatagctgccaccaaattagaaagatgcagtactgtaataggaaatagatatttgggataaaatccacttaatctattcctgtagtgaatctggtaacaatatgtagcagcatgctcagtttggccacttgataccaagccaataggattttctttttcataacggtgaatatttgatgaggaaatgaaagtggaagcatattagaaaattttacaggtaggagcaatgaattagcaaagagggaaaatggagtcagaggcaacaacagagggcttcgcagagtctcctgcctcctccagatgcaaagtaacagtgctgtgacctctagcttcacccacgtggatccagaactcctggggcaatcactccattttcatccctgtatatcagagcctttgtactaggaatttcagcagcattacctttgactcaaatgaataattttttaaaattttatttagacctggtgaaccggaagtaacaaattaattatccgtatagattgagaagatggagaaaaaacaataactgaacatctgttaatataggtccaatttagtattaagtagtaatattagatgccttataatgtgccatcccatatacacaaatatgaccttctgcttagggacatttgctttgatctggttttaagtagtggtaaaggatttcttgcagtcacttgcagtttagttaattcgtcttttggtcaaaaactaacctttctagaaagttagtaaaagtttaaaaagtaccatgcgccgggagcagtggctcacgcctg

SEQ ID NO: 1563248 - DNA, 4001 bp, Homo sapiens
ctcctatatacaggtcttctagaggctatgtatttcatagtgtttaagtctagattcttcaatgtcttccagcacttacatcattcagtttttacatttttaaatgtctcctactttctagttttacagtgtatttttatcgccaattcctccaatgcccaagtctttaaatacctgcaagaactttcaggtacatcaatatcctcaatgtctgaatgaatagacctcttaatatcctggtctcatattgtccaggctgccagtattcttgacatccagcatctttaaaatttaattcttccaaactgtctttttgacataaatatgtcaatatccatgcttaccaatgtctcccaatatccagggcttctcattttaggatttataaatgtctacatctgctgttgtttatatctgccagtatttaggagttccaaggtacaggacttacaatatctctaatttccagagatttcagtgtctatgacttccaatattcaatatcccaatgttcagggcctccagaaatatcaatgtccagagtaaccaatgtcttcaaaatccaaggcttgcaatgtctccaatatcctgtgcttacaatgtttccaatgtccagggtttccgatggcacctgtgtcaaggtcttccaacaactccgggtcttccagcgacttcaagtcttccaataatctcaaggtcttccagataatcctgagcttccagaaaatccacatcttccagacaatccatgtcttccggacaatccatgtcttccaagaagctccaagtcttccagtaaatcaagtcttccagcaaatccagtcttccagcaattactggtcttccaccaaatccagatcttccaggaaaatccacgtcttccaggaaatccatgtcttccaataatttcaaggtcttccatcaaatacagatcttccagctaatccatgtcttccagaaaaatctgtgtcttccaccaaatccaagtcttccagtaaatctagttcttccagaaaaatctagatcttccagtcaatcagtgtcttccagaaagaaatccaggtcttccagtcaatcagtgtcttccagaaagaaatccaggtcttccagtcagtcagtgtcttccagaaaaatctacgtcttccaccaaatccaggtcttccagtcaatccacatcttccggaaaaaatccaggtcttccagccaatatatgtcttcctgaagatccacgtcttccagaaaatccatgtcttccagaaaatccatgtcttccagtaacctcccagtcttccagaaaatccacgtcttcccaacaatccaagtcttccggataatttgggtcttcctgaaaatctacgtcttccaaaaaagccatgtcttccagaaaatccacatcttccaatggcctccaggtcttccagactatccatgtcttccagaaaatccttgtcttcccttaaatctatagcttccaaaaaatccgggtcttccaggaaatccgtgtcttccagcaagtccacgtcttccaacaaagccatgtcttccagactatccatgtcttccagaaaatccttgtcttccctcaaatccatagcttccgaaaaatccaggtcttccaggaaatccgtgtcttccagcaaatccacgtcttccaacaaagccatgtcttccatcaaattaatgtcttccagcctacttgtgtcttccaacaaaggtacgtcttccaacaaaggtacgtcttccaacaaaggtatgtcttccaacaaaggtacgtcttccagaaaatccacgtcttccaaccaagccatgtcttccagaaaatccacgtcttccagaaaatatatgtcttccaactaagctacgtcttccaacaaatccatgtcttcctatatctccaggtcttccagcatctccagggcttccagcatctgctcgtcttccaacatctccacgtcttccagcatctctgtgtcttccagcatcttcatgtcttccaacaactacccagtcttccatcaactggctcaatatccatgtcttccaacgtctccagtgtgctgatcttctgacattcaggtcttccagtgtctgcaatatccaggtattctaacatgttctatagtccagatcttccagcctttccccaggtccaggccttttcaaatctaggcttcccctgtctgagccttcccatgttaaaatcactctacagaaaaatcttccaactcaactatttctgcttctagttgaattagcttcaaaaacatttaatgggacattcctccttatagaccagatcttatgaaccaacagtactgcagtttgtgttttttactattaggaaatgtgtgtttaatccctacaacttttaaaagtaatgtccataataaaacttctgcagaataaacagataggactgctgcaataaattttactacttcactagtgcttacggtttttatacagtttactatgtttaggtctaagtgaaatttttatttaatgagaaaaattcctgtttaagactggtattttaggtaaagttaacatgtagagtattatttgtccattttaaatgatattaatttttatcattggtcttacatgaccaaagaataataataatataataataataataataataataacaacaacaacacttaacatagcatttgctacatccaggcactgttctcagatccttacatgcattaactcatttaatctatttaatcttcacaacaacccattgaagctaggtaccatcattatccctattttacagatgaggaaactggcacacagaggtgaagtaaattttgtccacaggacacaactactaaataatggagccagatttaaacccggctagcctgttgtgagagtccatgattgtaaccactatgctataatatctgctgtttaaaatcatgatagaatgatgtgatccaaaggttgattgcttccacattttgtgtagaatattatacaatcccgtatacaaatggtctcgcttgatcctgtcactgccagagtctgtttgtatgcacagcttttattccccaaccagctactaccattcccttggacctgtatatggaagtaggtgcaaacactttctgataccattttcagttttggcaggaagaatataaggaagcactgagttcaattaccctttgcttcagaatcatattcatagctccatgcttcgagtactggtgcttggaatttaactcttctatctatttgaatccccttttactgacttttgtccagtttgcaccttactatgtggagcacttaccattagtttgtttctaacctccagcatctacctgcttcaaatatcgcaacctcctgggttcctggccactgccttgtatccgactaatggtagctgcaactccttaaatcccagcatgctgatctggagaaccaagtagttggttctctaagtctcagctcccaccaggtgccttcagcaatgttgctacccatgcttctggctggcatgaaaagcatgaaaaccacataattaaatttttacagttaggcagggactctctaaagatttaaaatcctctatgtgataacaaaaaggaacaatgataatgccaattaaaatagaaataccttctgaatgtctaatgatttatactttacaaagtgctgtcacctcattcattcaacaaatatttattgagcgctaactgtatgccaggcatgttttgataaagcttaaaatcgtctgtgggaaacaacatacagataattggaaaattatttatcaattgttaaggccatgaagaaaaagtaactgagagtctggaaaatcaaggaaagcattcctaaagaagtaatatttattgtgactctgaagaatctatattgtcatttggttctcacaatatagccttgtgacttaaataaaacagattttttgtatatcagttttactaatctgagtgctaacaatagccatgggacccagctgt

SEQ ID NO: 1563249 - DNA, 4001 bp, Homo sapiens
aatcctagactgcgagcaactacttttctagcttttgtgtcttttgctgattgttagggtttagtgagtggatgttaattacaaccccgagattagatgtaataaaaactctgggagtgccccaccctaacctctttttctattctacttagtcgacagactcactcatatttttttaaaatgcagatttacttgcaaacgctttaaagccaagtatttcaactctacttttaccttgggatcgctactctagtgaggttctaatacacagaacttcctcttcctggctaaaagttctcctaatggtaaaaatgggtcacttcccaccctcctgtctttgctttttggaggaaagacaaagtgcagaactgagaacaggagcataatcattgcggacaaatgctattgaaatgccatttcctccccagagggatgaaaatactcagagtcgatttttactaattttctctaatgacagggagcgagggttggaataataagaatgtaataaaagaacaacagttgaaaacaaacattcctcccccagccccggttaagattaaagtggaacggccacttccctcgccctggctcccagcagtcgcccactggcttgctggttaggctgtgatcgcgatcgctttgacttctctcgcgctgccgcagacctgcattcagcccccacgcctgagagacgcctgctttgatagttatgagggctttagccatttattagtgctggagctgattcgtttgcgtgtcgggcgggtgtgagggttaggtaccgtattatgtaccaggtcagtgctgtagccttctcgcctgcctcaacacttgggttagaagaaaggacgttgtaagatggcaatggattttaggccaatttgcctctgccaacttgtaggaaggaagctggagcttccctgagaggccagggtgaagaggttgctttgccgtcggggacttagtggctaaactggagggtccgttgccagccaagcactgtgaacctaaattgagcatcaccagctttgggggcggggaggggggagacagcccgctcagatgggtaagggtttggaaatggaacagtcaagcagcagtgcctgaacaacgggacactacagctgccctctcgcttcattcacccgttgagctttctcatgcatctcttttcccatgtgggcaactacagggttgcatcctgatccttgtggcttaacatacccattgtccactcactcgctttcttcatggagcagcgaaaggcgaaaatcacctctagggtaggtttagtcccaatcgctgcactcagtgagtgagttttgagcccaggcgaatgcgagggagatgcctaataggccagccagccatataggggtcgcctcagctaagccctcttgggagaggcctgagaagtacgagggcaggccgaccaagagaagtagcggagaagggaaggaaggaaaagtgtgtgggcattggaattgattactcacccgtcacctgcaccgtcttgcgcatccatgcataggggctgtggcggctcctgctgggggaactggccttggcggcgcctgcgtccgtcgggacaagcgacccgccagcctggcctggtaggctgctgccgctagttccaccgcccacagggcccaagttgctgtagtcggtcgagcagaaagcggcggggctagaggtcacgtcgttcaccggcactgtgcccattgtactagacggcccaggatacacgctccagtcttctcgcgggggactgtagggtgagccccagactcccagagacggccagtgaggatccatgctgggcatatgaggataccccatatagtgcgagaaagccggtgccgcagcgaaattggaggctggcatcggactcccaccgccccctgtgccgcctgtcccagctgtgccgtcgcccccagggctcatgagagtgcccgggtacatgcctgcttctttctccaaaagacagcttccgtacatcgtgtcttgggtagaaggcgctccctaagccatcctgaagtccctgtaaggccccaactcgactttgagaagcagcagagaataaacttatcagtacgtagttgtgccgcaagctcttttgcacccctcaggctactccatcccacgtttcttacgagggtatccaggtgactagcagccctgtatagataggccaccaatggctgggctgacgtcaaggggcttcaggcttttacatagcatttgcattcaaatgaagggccatttcactttcacaggaacttgttcacccactccccaagctcccaggcctttctgtctcatctttcttgattctgtccatctggtccccatagcgtcagtattgtgcttttggggacaggaactcctccagggatttctgaccagctcccctcaaagtcagatagagacctgcagaaaccgggcaaagttccgctctctaggattcagtccttacaccgcggcctcctccctttcaccgatcttcccgcgtccaacctgcatctgcagtctccttctgcccaattccctcgcaggggtttactgcatggcactggcccaggatgccaatgaaaagagctttcccttactctccttactccctccatcaagaggacgcctttgtttccaagggcaaagattcatttcacaactctctgttgagcgtctactgtgtgccaggtactgtgtaggcatggggatacagcagtgaataaaagacaaaaattcttgctctgccttcctaagattacactgtagtggatggcaggctgaattaatagaacgttgtttacaaatatgcacaaattaaagaaagatgagtaacgtaggttatgcaaaatggtaggagagagagagaaccatgtggataataaactttcctattttcatgtcaatccactactctcaggtgtctccttctgccaggtatggcttctgtctgaaatccagtgcctcaaggggccagaactcttgcagtctcaaatccatggcagctgcagcaaactaaaaaagttttctttgtaaaactccaattgttgaaaaagacatagacttgctagtagatgccaatgaaatcagtatcttgcctcaagaaaccaggtctcctcttgtgttcctcctctccacccagcacccccaagacctaccacagcctttactccaggctgcttcctactcaggaaatgtgctcctacacaaaatccaacataacctggcacccccacccccttttagctaatccatctatggctttgggaaagtcacttaacctctctgagtttcacgggttttcccttttaaaaatagagaacctaatggtatctaccttacaagcaggatttcctcagataatgcaagcaaactgcttaacttagtgcttggcacacagtatgggaccactgtattcactcagcaaatatttattgagtacttagtgctgttctatgtatggagacatcagtggtgagcagataaagcctccggctttattaagcatatatcatagtggggagaaacactgataagtaattaaattttatggtatatcagacagtaatcaactctatggagaaaaaaaaaagcagggaaggaatatacggaatgctgggaggtggacgtcacaattttaaatgtgatagtctaggatgacttcacagataattgacatttaactaaaatatgaaagagttaatggagtgaggtaagaggacagaggattcagaagaaagaaacaagtgaaaacagaatgttcattttctgttggagaaagtgcaaggaagacagtgtagctaaagactagatgaggtctaaaagctgaagggaaataggccattgcaaaaattctagtttttgctttgagatagggagacattgtagggtttagagcagaggagtgacatgatttgagttaaattttgagtggctctctctggccattggatcaaaaatagactgtaagtagacagaatcaggcagat

SEQ ID NO: 1563250 - DNA, 4001 bp, Homo sapiens
caacttcagtgaggaaagctggattatgccctgacattcctattctaaactaaaagcactgaacttagactacaacctgtttcaatattaggacagtggttcccaaactttaccatacattggaaccacctaggaagcctttaaaaaaaatccctatgccaggttgcatcccataccaataaaatcagaaagtctaagagtagatgcctgacatcagtttgtttgttaaagattctcagagccaaaggggtagagagggaggaaaaaaaaaaagaaaaaaaggttctcaagtgatcccaatatgcagccgtttgggaaccactctgctagtaagttttgttgttgtgtccctagtgcctagcatactgatatatagtaattgctcaatgtctattaaataaacaaaagcatgaatgagcaaaattatgctttcctttaaaaattcttaagaaaaaaagactagaatatttttacagaaataggagtttcataaggaaaacaatccacctttacctttctcaaaatatcccactgccatttgcaaagcatcttcttcagcttgatcatcagcatgttcataatctcccactggattgttttgtccatgttttgagatgttcttcgagttgcttggatcctgttttactttccaggctgaaagcgtggtctgaaaactactactaccttgtgaagtcctgttttgtgcctggacgttcttaactctcttttgaggtgacattactgcatatgttctacacagaaacaagtgttaagttatcattaatcagccaaacagtccttttttctccacagagacagggtgtgtttccagtatttagtatacaatagctagcatacaacaggcatacaataaataagttgacaacaatccaggaaacaaagtctagaggttgactttctcagaaagtccttgccctaaatagaaatagaaacaacctgacaaggtaacattcatcagctgaactagctttctagtggaaaaaaccagtaagagtacaggcaacatatgcaagttctctcttagaatggctatgtcatataagtgggtccaaaactaatccatctcggccgggcgtggtggctcacacctgtaatcccagcactctgggaggccgaggtgggcctgacttgaggtcaggcgtacaggagtttgagaccagcctggccaatatgaggaaaccccgtctctgctaaaaaatacaaaaactagttgggcatggtggcacacacctgtaatcccagctactcgggaggctgaggcaggagaatcacttgaacccaggaggtgaaggctgcagtgagcagagattgcactactgcactccagcctgggtgacacagtgagaccctgtctcaaacaacaaacaaaaaaactaatccatctcaataactcaatcttactttctccactcctattttccccacttctccttgattttgcttttaatctttatgctcctaaatttgtcagtgctaagttaaagctgcacagttcaaaagccaaactggtggccagactaagcattttcaggagacaaatattcccatttattcacttaataaataattactaaatgtcatctatttgccaagcacaagtctagttaccagggataaaataataaaacaatcaagatctctgctctcatgacacttacactgaagggggaggtgagagtcaataaataagtatacaactaagactggacatggtagttcacacctgtaatacagcacttcgggaggcagaggctggaagatcccttcaacctaggagttcaagaccagtctgggcaacacagtgagacaatgtctctacttaagatttaaaaaattagctaggcatagccgcacgtgcctgtagtcctatctactcaggagggtgaggcaggagaatagcttgagccccgggggtcgaggctgcagagagccgtgattgcgccactgcactccagcctgggtgacagagcaagactttgtctaaaaaaaaaaaaaaaaaaaaggaagaaaagtaaacaataatgaatataatacacagtgatgtgatagaaatgaagtggagatgggaagctacattgtaactttgtaataagtgttcagagaaaacctctctgaggtgacctttaaactgagatttgaatgccaagaaggaaccagccctgtgaagatctggtggaagagtatttcatggagagagaagaggaagacatgctaagactaagaccttaaagcaaaaagagctttatgtgttaaagaaacagcagcttggctgggcaaggtgggtcacacctataatcccagcactttgggaagctgagggcaacatagtgagacattgtttctttttttttttttttgagacagtctcactctgtcacccaggctggactgcagtggcgcaatctctatctcggctcaccacaacctccgcctcccgggttcaagcaattctcctgtctcagcctcccaagtaggtggaattacaggcgcacaccaccatacccggctatttgttgtattttagtagagactgggtttcaccatgttagccaggctggtctcgaactcctgacctcaagtgatccacacctgcctcagcctcccaaagtgctgggattacaggcgtgagccaccacgcctggcccaactctgtcaaaagaaagaagaaagaaaggaaagaaagaaagaaagggagggagggagagagagagagacagacagagacagaaagaaagaaagaaaagagaaaagaaaagaaacagtagtaacatcagtctggagggagtggaatgaaagaggtaaaaggtaatgagcgatgaagtcagaacgtagccagggactaagttcatattgggatttgcaggccagagtaaggagtttggattttaaatgtcatgggaaaacataggggaagggggaaaggttagagaggggagcaataccacctgatttgtgtttgacgatcatgttagctgcagtgcagagacgagaatgttagaggtcaaggagcggcaagaaaccaaataaaaggctgtcgcagaagtccagaagaggtttgactgtagcctgcactaggcctagggtgtagaggtggaaaatgattggattcgtgcaatgttttggagttagacaaagtaggccgtgataaaagaattggatgtagggaaaagggaagaggaaccaaaaatgacttctaagtttttggctgcaaataggaaaaactaaaggaatagtcggaatgacacttactcaatcccacctccctggaacagatgaggccagatcaggagaggaatatgtccaaaccagtgggacgttacaggttccgagttatttcctaggttcctaggaaagaagggcaggggagcagcttctgaccccacccagttgaaccatcccagcgcttcccaaggatccctggtgcgaaactggctacggaaaacccgaccgcagtcacaccttgcaggatagtcccaccctcaaaagtaaaaaaattctcttcgcccccatttcgcgcggtgcttaaaagtacctcctcacctaagacactctacctgcagccgcacaggcctctgaccaccgaatgccgcctccggaattcaaagaagctgactccaccccacgcatgcgcttccgcgcagacccagaggggcggctgggcggagcaacgcactcagctgaagcctgattggctagaggtggcgggaggctcggtggcgggaggtggcgcgcgcgacgacgctggcgtagaaccaattacggagagcggcttgccccacccacctgggcctgtgaggagagcagcgagtgggccgttgctgctggagtcagctgattggctggcgttcccactgtgctaagaatataagaatgttcacattcgtcattttgcgtataacgggacaattcgtgtctcggttcttgaatttaacatgatcaattatagtgattattttgcctaggctgaccccagatgtcgg

SEQ ID NO: 1563251 - DNA, 4001 bp, Homo sapiens
caggtcaccctttcctttttaacaatgtaactcgagtctagacttgcggcaagtgtcaggaagcccattttggcctcaaagaaacaccaggcaagccaggcactccatccaaggtgacgtttgctacctatcgctatatctctccctatcccatatctatttcctaactgatttggaattctgtgggaagaggtatctgcttggaagtcttgagaaagaagcacaagggcttgttttgggagcccaaagtaacatgatgggagggcaggcctcctgatgcagttgctacctggactgctctgtggtcacatgactgttttaacaggaagacgccatggacctctgcagatgactggggctccataccatgataattgtcttagctacttaccattttctgggtcatcacagttaaaaagtcaccaaagttcatttttcctgtcccttccttatcaatttcacttatcattttcttaatttcttctttcttgggttcaaagcccagggccctcattgccacctataaagaaaacaggatcgtctcaataagcacatctaaagtagcaggagcaaaaataacagtgttgagagcattaagccagcatctgatgtggtcatgttaatatgattggggaacactatgacattgatctaattgatatttgcaatcaattttattgaataatactcaaagtaagtaaagacaggaaaacagcacagtacaacctcccctgttacttactgcagggagaagagggcaaaaggggtagagaggtgatagggagatgacaaggaagaggcagaggaaaggaagggcagtacggcaggaatgcacagagcttgccttcagttctttaacatctatggtgccagttccatccgcatcgaaaagatcaaaagcttcccggatctcctgcttttgctcttcagtaagctcaggcttagggctcattctttttcgctgagaacttgatgccatgtttgccttcttaaagttggaggcctttatatgttatgcaatacacaagcacaataatatatcatacagtccatatttacataacatagttacagacacccatatgtatttttaaagtcatttatataaccaattccaaagctttgcttaaaaagaaagataacagggtttactggcaagaacaatgaatctttccatgaacttctacccctcccttttctttactgttgtttctagaagcagggagatcacttgttcagtaaggacacctcttactgaaaatcatcccaaaagagagccagtcaagaagatgactgtgaataactagagataatcagctcttcccgaacgtggggatcctggttctgaaaacagtcttacgatgcccactcccagtactccccttcccagtaagtactccgacttcccaattacttctagatttggccaaatattagtaagttgttaagatgtatattgtgtcagtaccgagtaataaaactcaatccatctggcaccttcgtgccttctccaagaagctaaagcatcccctgaatgcccctgtatttaaattgtaaaaaacattgtaacagaacacgatacaccttttcccagctgtgtgtggaaattttggcagaatgaggaggccagggggccaaggtctgagagagtcaggggcctgtgagggattcgagtcttttttgcccagggaggttcaccgaggggatcagggaatgcaaggggagcccgaggggcgggtgtgggcctgttgtgggtgaagaggaggcagcagcgaagcgcaggcccagtaggttggttagcgtctgtaccctactctcccgggaaagagctcaaaggaaagactggtgcgctaaagccgagaaaggcgcaggagaggcggcgtggccgagctggggcctgggaagggctcagccgctgggcgtggggcgcgacagagcggcagcactcaccatagccaaaggagtccgctgccggttgttaggcaaccgacgtgtacactgactcggcgccgttcccaccgccccgcgcgcgcagccccgctccccattggccgtccgctcgtcgccgcctctccctattggtgcagggccgaagagggtgggactaacctggcaaagccccggcccagcgcggggaggggcacgctggcgacagagccccgtctttattgggcaagatcacgccgtgagcgccaattggctgagtcgtcgccgagctgggccaatcctcttggtggaggaagctcggctgattctcggctcacgcgggaggggagtaaagggtggcggtccgggcctggagttcagtgggtgcagcctgcttgcgagctgaggccagacaggggggcgcctacggacgggtaagagtcgtggccttgccattggaggtcaccctgtgtcagcgactgggcagtgcgggagggtggggagctacggggtcgcccgggtcgggtgctttctgggttgacctaaggctgagtttagggaccgagtgcatcagagcagccagaaacgattaccttgcgtgttggagcagggactgtactcacggggcaactgagacccggagaggggaaggggtgtgctgagtgttgtcgcagaggtcggacggctgggacctaggaactgaatccagccgaggctcgctctttgagggtggcccttcgagagcacccctagactgacccagatgtataggccccagaccaggttccaagagaggatcactttagatcttacctggctaaaagcagcccaggacggtgaactggggcctttgggaacggactttgaaaggagtgagggggatgtgagcgagcatgaggggcggggagaggtcatcaaaatatactctttttgacacccacacaatgcagataaggaggagcattccaggccgagacgccctcatcagcagagtcacaggagttttggaagtgagaggtatgcttggagaattaaaagggagcgtgtgcaagggctgtggactgacatagacctgcagaagtggagctggaggtccagtttgccctctttagctatccccgtggcttttagccttcacctgtttttcctccaggcataggggcagtaatctagggagacagagggcagagagtaagtttctcagacagagaaaggcccgaggcttattagaaccttttaaatggagctgctgccctttgccctcttctctcttcagcagtgaacagattcctgacttttgggtcatcatcatccccccaagtagtacgagccagagttctcactgtgatctccaaagcttggcacgacgtgtccccttccatcgctccacaactcttctctcgtctggctcactccagccccagaacactggctttgtggttgaacctcatgtgccagccacactcctgcctctcatctttgtctcagttgtcctctccgcctgcctcctcttaggcaccctatttaagtattgcagcccccagtacaaacaagccactcaccttgctctacttttttttccaacagttcttatccccttctgacctactgtatattttgcttgtttgttttgctctttgttgtccctccactagaaggcaggctgtctgagggcaggcatctttgttgtattcactactggtactccaggacctagaacagagaggggcacatattagacaactgatgagtagctcccctgtttcccagctctcacctagctagtcctccctgctctaccaggttaatcttcgtagtgaacggccctggtcagggcatctccctgctcttaaaccttcagagcctgaaccgtaaagggctccttagcctggcctgtgatccctctgcccagttttgcccctggtaacccttctagcttaatgtccctccataccttgcttcccagtccgtcaacctgcagatcggaagcctgacagagtacaagggaaaaacacaagttctgcgcaggctgtgtgcaggctgtgtgaccttgggcaagtcgcttaacctctctg

SEQ ID NO: 1563252 - DNA, 4001 bp, Homo sapiens
cctcccaccactctcctccttaggtccttacaaacactggggacgggcccactctgaggacctctgtaccgatcgttcccaccagtgctgggtgacagggagtgcttgcccgccttgctcatcctcctcaccaggacagcactgctggtcctcacaggcctggagctgccactccagggtcccaggtgccacctttccagagcactgcccattccagcccacacagcgccggtaccgcagctgggagccctcagagcacgtcaccgaacagggggcccatgtggaccacagggaccatcgtggggacctgtggagaagagcacacacatcccatcctggcatgagctaacaagaatggcatgtgggactccagagtgtgggcagacacgaagggttgctaggcaagtgcgtgtgcgatggattgataagtccttaccttttagggatattgggatactgatgggaagcagtggatatacaataagtgcttgataatgtcatttaccttcacaatcaggcatctggagttaccattggaaggctgcatggccaacaccaggtccgcagtaagcaaaggtaaggactagaaaccaagggctgctgtcagaaacccaccagatcaccacactacacggtagtaggtaaatagaaagtgcttaataaacctgagccatcatccctatgacctcagaggcctcctcagaaataaccccagatctatccccaacccactgcatagccctaggtatgctgttcatgccaaatagatgtgatgaactgttgacatgacttggggcccagagctgccctcaaaaatccccaagctccccatgcccacggtgtatctgggatatatagtaaacaagtagaaaacaggtctggcatacggtaagggctcaatccatgcaagctggaaatcatgatcaggagactagagctaccctcagaaatcctcaagctcatctcccaaccctgccatgcagctggtatacagggagtgctcaatgaatgtgaagtgtcatcataattaggggcctagagctgccctttgaattccccaaactttcccgcccccacagtgtgtccatatacagtaagcactcaataaacatgagctgtcatcaaaattagggaaataccaagctgcaccccacctgcaatgcttccagtgtgcaggaggtgctcaatatgtgtgagctatgtcagtggttctcaatcaggggtgattttgacccccaggggacatttggcaatgtctgctgacatgtttggttgtcacagctggtggggagaattgctactggcatctagtggaaggctaggggtgttacaaaacatcccacaatacacaggtaagcaatcccctcccccagccaagaatttccagccccaaatgtcaatagtaacaaggttgagaaaccctgaggtatggtcacgatcagggcctcagggccacccttggaagtcccagagaaagaaagtgcccagttttgggtgacccccacagacagtccttccctcccccccatcccccaccccaggctccccctaacctgcaaggctgacagagcccaccactacgtttctggtaggcaaaggcagtgttgagacagcagtcttccacgctgacaccaccccccaggaggcccttgcacttgccggaggattcttcatactgggtgaagcagagcacggggtctgagcctgtaacagggccaggggatgggtgggtggggctcggtcagggatgtggtgggcctggacacccctggggccagctgggccctcaccccctcacctgtggctggcagggtgagcagcaggagcagcggcggcagcaacaatcgaggggcctgcgctccctctgtgatcatgttgagtactgccccctgcacctctaccagagaggaggtcccgctttatctgggttgataggctcctggaatcagcagggaaagaggaacctagaggcaggaggaactgggagggcatcctgctttgaccccaccctgtcccctctgcctccttctctactctcccctccccatttcctgtcttactcttggtcttgttctgtttgttactatatccccagcacctcgcgctcctcccagcaacctcacagtgttcaatagaagctcctaggacaaattctcacccagaggaaatggagcataggagcgtgcagcaacttcctagccgtgtgaccttgggtgagtcacttaacacccctgagcctcagtttccctatgtggaaaatgcataatctctaacataatgacggggtcaacctcgtgggggtgttgaaccagggtgaagtgagtgtgcggtgctcagtatgttcctgctcgtgggggtggagggagcatcgagtcagttgctccaccttccaccctcccttaacctcggccctcctttcctgagaggttccctgtggtcagcttgtggtcggggaggtcagcacaagggaagtgagaaagggaagtggcaggagcctggggagggattcaggaggggaatggggtctatccattgttccatgggcccagctggggacaacaccagggtctggggtgattaggagggaataagctgggccatattccatcagagaaccctcaggcagataacaccccccttctggagcctgtttcccctctgtaaaatgtgctcacagacagcacctacaacataggtagggtgtgttgcaaagattgcgagttaagcttttgtttgttttgtcgagatggagtctcactccgtcgcccaggctggcgtgcagtgtcacgatctcggctcactgcaacctctgcctcccgatttcaaccaattctcctgcctcagcctcctgagtagctgggattacagccgtgtaccaccatgtccagctaatttttgtatttttagtggagacagggtttcaccatgttggccaggctggtctcgaactcctgacctcaggttatccacctgccttggcctcccaaagtgctaggattacaggcgtgagtcaccgtgcccggccaggagttaagcttttggaaagtctttagaacagtgcctggcatatagtaggtgctctgtgtttgataaatttattcaacatttattgagcacctactggatgccagatgcggttcttagcattagagcagagaataggacagacaaaaatcctggccctcgagaagatggataacaaatgttgcccctcctcacagaggccttccccatacccttgtctggcatccctgtcactctctagcccagtagcttccaaacctgtttttttgtttgttttgttttaaagagacagagtcttgctgtcacctgggctggagtgcagtggtctgatcatagctcattgcagcctcaaactcctgggctcaagtgattttcccaccttagcgtccccaagtagctgggactacaggcacacaccaccacacaactaatgtttttattttctgtatagatggggtctcgttgtgttgcccaggctggtctcaaactcctggcttcaatattttctcccaacctcagcctcccaaagtgctgggattacaggcatgagccatcacaccagcccttcttttttttttatttttttattttttttttataaaccctaatgaaactccagggcccactttaaaatttttattttgcttttaattaacaaaaagaagcacaagaaagataggaaggcaatgcctaatttcctctgctctcagggaggcagaggaattctgcaaattcaaatgtaataatttggtcagctgttaaaacagaagttcttcaggaacacttgttttatgggcagtaaagtatgtgttaatatctgtatccattacagacatactctgttctctgataacataaggctatccttgaaaatgtgctttgaacaaaggagtcttattaagattctacgacttcaagacaatcattgctgtgttatcctgtgaaaacactctccaagagacctgaaactggccagg

SEQ ID NO: 1563253 - DNA, 4001 bp, Homo sapiens
ctggcatgagctaacaagaatggcatgtgggactccagagtgtgggcagacacgaagggttgctaggcaagtgcgtgtgcgatggattgataagtccttaccttttagggatattgggatactgatgggaagcagtggatatacaataagtgcttgataatgtcatttaccttcacaatcaggcatctggagttaccattggaaggctgcatggccaacaccaggtccgcagtaagcaaaggtaaggactagaaaccaagggctgctgtcagaaacccaccagatcaccacactacacggtagtaggtaaatagaaagtgcttaataaacctgagccatcatccctatgacctcagaggcctcctcagaaataaccccagatctatccccaacccactgcatagccctaggtatgctgttcatgccaaatagatgtgatgaactgttgacatgacttggggcccagagctgccctcaaaaatccccaagctccccatgcccacggtgtatctgggatatatagtaaacaagtagaaaacaggtctggcatacggtaagggctcaatccatgcaagctggaaatcatgatcaggagactagagctaccctcagaaatcctcaagctcatctcccaaccctgccatgcagctggtatacagggagtgctcaatgaatgtgaagtgtcatcataattaggggcctagagctgccctttgaattccccaaactttcccgcccccacagtgtgtccatatacagtaagcactcaataaacatgagctgtcatcaaaattagggaaataccaagctgcaccccacctgcaatgcttccagtgtgcaggaggtgctcaatatgtgtgagctatgtcagtggttctcaatcaggggtgattttgacccccaggggacatttggcaatgtctgctgacatgtttggttgtcacagctggtggggagaattgctactggcatctagtggaaggctaggggtgttacaaaacatcccacaatacacaggtaagcaatcccctcccccagccaagaatttccagccccaaatgtcaatagtaacaaggttgagaaaccctgaggtatggtcacgatcagggcctcagggccacccttggaagtcccagagaaagaaagtgcccagttttgggtgacccccacagacagtccttccctcccccccatcccccaccccaggctccccctaacctgcaaggctgacagagcccaccactacgtttctggtaggcaaaggcagtgttgagacagcagtcttccacgctgacaccaccccccaggaggcccttgcacttgccggaggattcttcatactgggtgaagcagagcacggggtctgagcctgtaacagggccaggggatgggtgggtggggctcggtcagggatgtggtgggcctggacacccctggggccagctgggccctcaccccctcacctgtggctggcagggtgagcagcaggagcagcggcggcagcaacaatcgaggggcctgcgctccctctgtgatcatgttgagtactgccccctgcacctctaccagagaggaggtcccgctttatctgggttgataggctcctggaatcagcagggaaagaggaacctagaggcaggaggaactgggagggcatcctgctttgaccccaccctgtcccctctgcctccttctctactctcccctccccatttcctgtcttactcttggtcttgttctgtttgttactatatccccagcacctcgcgctcctcccagcaacctcacagtgttcaatagaagctcctaggacaaattctcacccagaggaaatggagcataggagcgtgcagcaacttcctagccgtgtgaccttgggtgagtcacttaacacccctgagcctcagtttccctatgtggaaaatgcataatctctaacataatgacggggtcaacctcgtgggggtgttgaaccagggtgaagtgagtgtgcggtgctcagtatgttcctgctcgtgggggtggagggagcatcgagtcagttgctccaccttccaccctcccttaacctcggccctcctttcctgagaggttccctgtggtcagcttgtggtcggggaggtcagcacaagggaagtgagaaagggaagtggcaggagcctggggagggattcaggaggggaatggggtctatccattgttccatgggcccagctggggacaacaccagggtctggggtgattaggagggaataagctgggccatattccatcagagaaccctcaggcagataacaccccccttctggagcctgtttcccctctgtaaaatgtgctcacagacagcacctacaacataggtagggtgtgttgcaaagattgcgagttaagcttttgtttgttttgtcgagatggagtctcactccgtcgcccaggctggcgtgcagtgtcacgatctcggctcactgcaacctctgcctcccgatttcaaccaattctcctgcctcagcctcctgagtagctgggattacagccgtgtaccaccatgtccagctaatttttgtatttttagtggagacagggtttcaccatgttggccaggctggtctcgaactcctgacctcaggttatccacctgccttggcctcccaaagtgctaggattacaggcgtgagtcaccgtgcccggccaggagttaagcttttggaaagtctttagaacagtgcctggcatatagtaggtgctctgtgtttgataaatttattcaacatttattgagcacctactggatgccagatgcggttcttagcattagagcagagaataggacagacaaaaatcctggccctcgagaagatggataacaaatgttgcccctcctcacagaggccttccccatacccttgtctggcatccctgtcactctctagcccagtagcttccaaacctgtttttttgtttgttttgttttaaagagacagagtcttgctgtcacctgggctggagtgcagtggtctgatcatagctcattgcagcctcaaactcctgggctcaagtgattttcccaccttagcgtccccaagtagctgggactacaggcacacaccaccacacaactaatgtttttattttctgtatagatggggtctcgttgtgttgcccaggctggtctcaaactcctggcttcaatattttctcccaacctcagcctcccaaagtgctgggattacaggcatgagccatcacaccagcccttcttttttttttatttttttattttttttttataaaccctaatgaaactccagggcccactttaaaatttttattttgcttttaattaacaaaaagaagcacaagaaagataggaaggcaatgcctaatttcctctgctctcagggaggcagaggaattctgcaaattcaaatgtaataatttggtcagctgttaaaacagaagttcttcaggaacacttgttttatgggcagtaaagtatgtgttaatatctgtatccattacagacatactctgttctctgataacataaggctatccttgaaaatgtgctttgaacaaaggagtcttattaagattctacgacttcaagacaatcattgctgtgttatcctgtgaaaacactctccaagagacctgaaactggccaggcatggtggctcacgcctgtaatcccaacactttgggagattgaggcaggtggatcacctgacgtcaggagttcgagaccagcctggtcaacatggtgaaacgccgtctctactaaaaatacaaaaattagccaggcgtggtggcggatgcctgtaatcccagctacttgggaggctgaggcaggagaatcgcttgaactcgggaggcagaggctctagtgagctgagatcgtgccactgcactccagcctgggcgacagagtgagactctgtcccaaaaaaaaaaaaaaaaaaaaagaaagaaacctgaaattctggctggcttctttatttaac

SEQ ID NO: 1563254 - DNA, 4001 bp, Homo sapiens
cagctaagtcttgccagaattcaccaaaccgtaacaccaaaaatgccattaaaatatgggttgctttagcctccatacctcatgcttcattttactgtttataatactccttattcacatcaccatttctcacacagatatatatttaggttgatgcaaaagtaattgtggtttttctgacattgaaaataatggcaaaaactgcaattgcttttgcaccaattgaataaaacttctatccccagactttttggggaatttgggtaagacgcaagtagggtgtacaatctctgagctgggagcacattattgtggatgggaaagcagacagattagcagaaaatatttattcctgctattattcacagatttccagctggttgggccaatccaaatgtgacaaaatctaaagaaaacaaaattaaaagccaagcatgttggcccccaagagaagccacattatgaaagaatcttacaaagtaaaagaaagcaaaaaaatcaagaaatcagtcttatatttttaattaggcccatgggcttccatatgaacaaaccagatgcaaataaaggcttcaacatagggcaaaaaacctaacacactgacatccatcaaggatttgccccctttctttacctaaatcttgggcagagtacacacatggtttgcctacaataaatatatgctaatagattaccaataataaatgagtataatttatttcatagaaattctaaaatgaaaaggaagctcttgaggaattcctttctggaagacctcatttatctcaatgagatcagaaatggtatgcctaaagagagaaaggcaaggacagcattggagagtagagaagagtaagaggatctgatcatattcactgtagaaaaccagataaggagttaaccagtcaccagtaaaaggatttgccagtattaaggctctggggaatgcttatggccttagtgccttgtttatctgggtgtacagaaaagtcttttgttgctcatctatgatttgcaaagtttctaaattagttccaatagctctaatttatcacaaatctgctgatgattgaaatgggatgttgtgaaatatgatgtattaagaagaagatatttctatgtattaagaagagagatgtccctctcctaatgccaaacacatgaatcagtcctttaactacaaatatacaaatgacgcctctaaatgttaataaatgagcacatagagaacatactctgacactaattttacttttcattataagccttttaaacaaactttatagctctacacttcaacctcttgccatttagttagtcaagttatttcaggatatgatgtaaaaatggtatttctggtcctataagataagatatccagaaatatcattttaccaagatgtatttgaaatctcctcaccccgttaaagtaacatgcaacaaagctatattgtagggaaatcattatgttgatatttctcactttcagttgacacttatttagcatttcctttgggttatttcctgtccaattgctcaataattactaactcactgtacttttcatgatgacagatgggataggttctgctattagctccatttcatagatgaggaaactgagagtctcagaagtaatgttaacaaagcctggatttgaccccaggcagtctagctccagagtataaattggtagccactattatgctgctttttgtgagagcgcacttacatttggaattttagaaataatctttatgtccaaggttattatattagatccctctctttttaacattttaccatggtgtaaaatataaatatgttattctttaatgtcagatacaaaataatgtacatttagatatcttaccagttttttctgtcatcacagaaaagaagattggtaaaaaatgacacaggtttagatgacttgaaactgaggtggcaagtgagcttattattaattccactgtgagagcctgggatgactctgccttttggaaatttcacagaaagagggtgaatctcttcaccatcaagaagccttactgtgggaatctggacacatagagttgaatttctgtttaaaataaaaaaaatgtttcattagctcaaaatacctgccagtcattggctttaaatgtatatttcatttttttgaatcctcaagaaaattaaaataagaaatatttgtaatcatgtgcctaattattaaagatatctttgtatcatctcttattttctgatcacaatataagatggatgataactaagaaccacttgagatgatcaaatattccttttgttctataaggattaaaaagacatgtgacacctgattaaacacaatatttcttaatcaccatcatgatagaaattactgtttttaaatgtattctgatgaaaatttaccaaaagttatcactttaataggtacaaacttaatgcatatagactgaataataataacagatgcatatacatgtaggtagatatttgaaaatttggatactattaagcgcatatatacatatattatgaatgtttttcaatcattaccattcaaaaattccacttaatgttgacatacttaattatacatttatactttttatagccattccaaactgtttatttttaatataaaaatatgtattaatagtattcactttaaaattgaattactacttattatttttagtgaccaataaatatttaatcatattactttgtttacttatatatgtaaaaacttacatatctatggcagataagaggtatcatcaaatggaaattatatatccttgctattttaatcagtatgagaactatttagctaataagaaaaaataaagatctaaaattgtattagttaaacctatacgctaccttgaataaaaacatggaaagtaatttataaatccagtttgaaaataattcagttattacttagctaattaacttatctttgcataagtgattaatgctgttgattttattacatatgtataacttggacactgcattacattatttcttcagtacctctcatattcatttcattataccatatttagcaagactcaacttttgagttgaagtagcttttaaattgatacctttatacattaattccaaagttgaaaaattaagagattaattcatatattagaaaatgattattgatttaaaactgctttctagcacaatttaattgaagccactactatttcccgtttaaacaacaaaggttagtgtctatttataagataaggtcttaaaggaactgcaaatcccaaagttttgatgatgttgaacattacctaacaaagtaaatgacattttgagcgagccccatggagtctgtaagtactcagtcctggcagcattcatcacctgttaactgaagagcccccttggaccctgaataaccagcagcaatacccaggtactacattgagggccttgggtgaccctctgagacttgctggcttcaggtgagattcagcacattactagctgtggtggctatggggcaaaacttgttctgcttgtgaaaagcagaagaaaaagtaaaggagactttgtcttgcacctgaggtaccagcacagccacagcggagtagaacaccaagttgataaatttcattaccccttcaggacaaaaaccctcaaaacactggggacaggagaaacatacctcagcatgataaaagtgatgtatgacagaccaacagctaatatcacatagaatagagaaaaactgaaaaatgtcttctaagatttagaacacaacaaggatgctcactttcactactgtcattcaacatagtaatggaatttctagatagagcaatcagacaagagaaagatataaagggcatccaagttggaaaggaagaagtacaatatccttgtttgtagattatatgagcttatatttgaaaaagactctgcaagaaaactattagaactgatcaattcagtaaagttgcagg

SEQ ID NO: 1563255 - DNA, 4001 bp, Homo sapiens
gaagtaaaaccgtgcaataagttggcatctgaatattgtaggctatctgcaaaattcttggaccaagaaaaattgtcttaaaatttcctaatcaaaaagcagctctaaaaccctcccccaacacttccccaatttcaaaatatttgttaatatatttgatgcaaagattacgaaagtatattacaattaaaatactcaacatatcacgcctgtagtcccagctactcaggaggctgaggcaggagaattgcttgaacctgggaggcagaggctgcagtgagccaagattgcgccactgcactccagcctgggcaaaagagtgagactctgtctcaaaaaaaaaaaaaaaaaaaaaaactcaacatgttaaaaattgaagctaatataagggaggtagcatatatatgatttaatgtaacatgaactcaattgaaagtcaaagggactaggtgagccattatcaaaaccagaggcagcatgacataacaacaaaaggcaacctattttgaaaatgcagtaaaagatagcatagttcagaggatgaacatgacacagtactcaaacttccaaatagttatggtccaagcaaataaaaatgaggaagcactctttaaatcccggagaatcatcaacatttttgccttgtagctgttatgaagtccctccccattttattttctgaaatattcaatttttcctcaagatttcaattttttaaaaaaccaccctggataaattttaaagaaattatgctcagctcccaaagtattaatttccatatatatttaatgcctgtatatttcatacttgggcatacaaaatcccttggaggtaaattatctcagaactgaaaagctttagaaaccatctactccaaacccttcattttagagatgaagaaatcaaggcgcagaaatgagaaaaagcaacctgaccaaggtcacagggccagtaagaagcaaaaccgggaccagcgtctaagagccctgactcaatccatttctttttctactttccatagctgcctctcatcctgaacctctaatcgagtgatatataaggaaggattcgataggaagaatggatggatgaatacgtgggtgaatgaacattctattattattcacaaaatatatcatgtttctgttttgaagaatgcaagcctagttcttgtcacatgtcacagcaattgctgtttcccacaaagtatcaatcttgtcagcaaaaaaccctctggtacatcctgcagtttagagactgttcacttgccagcatacatacaagaaaggagactcacccctactccaatcgctctggctcccaaacccctaacttccctctcctatactcactctttacctggcattggtgcatcatatttacattctcctcacttccttcacacgtatccacccatggtttccccatttagaccaggtgtcctttcctaagtgtacgcctcagtcaatcagtcaaccctcccccactccacaggcccctcgatcacttctcattcctctgttgccaaatctcaggcatttcaagtcccaagaccccctctcgcttacacagtgatgtggccggcaccccgcactaatacagggtcgggagcatatctccgcagatgctcctcgctcactacccgaggcgggggcggcgcttcctcctcctcttcctcctcctcctcttcttcctcctcctcctcttcctcctcttcctcctcatcctcctcgtcatcgtcgggcccagataccgacgacgacgacgacggcgacgacgacgacgttgccgcttcttcttcctcctcctcctccagttccgagatggtgtcgaactccgccatgttgggcagcaggatgctcatcacgtgacctcgcgatcgccgccacgctcccggagaagagtttgaacctgccgaggtgctgcaagaggagggggaacgaaatgaagagaaagaggaggggtgtagggacaggatttgaggagacgcgcctgcgtgttgggcagacgggggggtgggggggcggctgctggaggcgggggcactagagaggagcaaagtcagtgtacgcttgcgcagctccaaggggagggggccgctagaggtgaactccaaggagttatccaggtccggtctgcgggtgctcgccttaatactgctctctgagcgtcagctacttgtattcggggtatcttctgattttattgcttattaattaatgctgggcattattaacccaactgcaggcgggtgagagaaagcatattgtataaaagtaaggttagaactttgtccaaaatatctcaaggtatataccaatcccttacgtttgttcagcattacagtttaaaagccttgcgtcataactttgccacaatcttgggaggcagggtaagcacttttattagcattttacttaagaggaaactttttactacttctcctatgtaatacttaacggaggacttattaactcagggactgtgctaagtgctctgtatgtatatctcatttaatcctctgcaaccctatgaggtatgtatcatgatgattttatattacagatgggaaatctaggtgcagagaaaataagtaatttgtccagtgtcagggagctactaaatgggagacctggttttaaatttggtggtctcttctgattccagaagcccagtactcttaaccaaagggctgtactgcctgaagttgtttggaaagattttgtagaatggtgcctcttgggctcttccttaaaagatgaatcagaatatgcatgtttgaattttggagtgttttttgggggagggggcggatggagggggtgaaaggagcattccaacctaaggaaaccttaattaacatcatccattttccagacactgagctagaccctcacatacaatatttcagttaacccttaatcctgagaggtaagtatcattatatctattttattacatgacaaaagtgggtctcagaagtttaagtaatttattcaagtctatggtgaccttttgttcaaaattttccattttaaatggtctatcctatcttctttacactcactaaaatgttgtggggatcacatattttgcgtatctaaatagtgtgccaaactgtttcatacttggcagcagcacaaaaatccatatcattaagacagtaaagtcacacagctgctaagtaacagaacaaacactgtaatccaggcattctaataccagcttcactgctctttctgctactctacggctgcatcccaatcagatggtgtgtctctggggaaacagacatagtcaaactttaatttaggatgagcacgacattatcagtataaacaaagcatttaatgtgtgtgaagtaggaagaaattagttctgtaagagaaatgaatcaaaccattatcatcaaggagtatgtgttattaaaatgaaaagcccatttttattcaaaagttggtttatttagggaactttaaaaataagtcggagatcgagaccatcctggctaacaaggtgaaaccccgtctctactaaaaatacaaaaaaaattagccgggcgcggtggcgggcgcctgtagtcccagctactcgggaggctgaggcaggagaatggcgtgaacccgggaagcggagcttgcagtgagccgagattgcgccactgcagtccgcagtcccgcctgggcgacagagcgagactccgtctcaaaaaaaaaaaaaaaaaagtcataacattatcaataagcaacaaattataactttttgtagtttagataactgtatctactagccaggaattatagaagatagaaccttaaaatattttgtatagccttctggcaagacatatatatctttgcttttttggggtgttaataaatgtgtcagagttaagatcaaaattaatactttgcaacagttcttctctttcaagaggcaaaaaaaaaaaactgtaaatgacatttaaaatttttccaaatatcttatccacgaaggtccac

SEQ ID NO: 1563256 - DNA, 4001 bp, Homo sapiens
gtataaaatgagtatttttccaaatataagcgatgtcacctgatgcaattctctggctcactcactgtaacttcctacctctaccataacagactccatcaggatggatgtcttccaattctgaactgtacagaaggcaaaatatttatgaaaaacattagcatcattcataagaattaacattcatcaattaaaatttgaacccagacctgaaaaaaaaaattgttgattaaaaaaattgttaaaaacacctcaagttcctacacaaaaaaagcaagattataaaactcaagtatggtataacaactattccaaaatggatgctgttctcagttttagtatagacttaaaagaaaaaatgaatagtccattggctctttccagctctcatccaacatctgttcatagcagctacaaccaggttatttgcagccatgcagttattttcaggctaagaataaacctgtccatgctgttctgagaactgttacccaggcattttttgttagacaacataaagaccatctattttaccttccttatattcaaaaacaaggaaactgaggctcagagagatttagtgcctggccctcccaattcaagcaattcatactagcactaagcaagacctaaaaccaagttttctcaattgtttctacgaatatgggtcaactctgaggatcagaaccactgactgttttcctgggatggaatgggcctttggaaatttaccagctgtgtgatcctgagcaaattacaacttttccaagtccccttttcctcttctacaaaatgcagagagtacctactactctaacaaggttgtgaggattatgttcggcttgtaaagtgcttagcacagtgattaggaaattttaagcattcgaaaacaggtagctattatttttactcccaacctgaaaacatggctgctcctaatcatggctgtatgagaagacaacgaactgaattcattaacacaatggacagggtcccatccaccagagcttctctggcctaccacattctacaaacagtaaaaaaccccatcaaacaacctatttcattccatctaaaatgatcatcccttacactattaaaaaaaattgaaattgctgccatatgtgttctgctacgtgttgtacactgaatatgtcaactagaaactgcagaggagtttctggttccacccaaaacatgaagaacaaacgacgggaaaacaagagttagataaggtcacacacctgaactggaactcaggaccttattctcagcacatttagttattgatggtagaaagcaagatgctttaagcaccataaagcaggaataatggctacctcaacaaaataaaattccctaggtttctcaacaaaatagaatccgtttactttccctagtaaattcatacgcacatgggcaataattgagcatctttcttgtaaaactgaggattaagctgtgtctgagctgcgatgtatgctaagatcatacaaatctatgaaaaagtcctatgaaatggcgagacaaaatgatggggaatatcaccttgaaatcaataaggaaggaatcataatgtcttgccaaagtcgtctccgttgataaaatcccgaccctccatttcatgacactgcacatccacttccctctaaggaaattaacaggaatcaccgcagcaaccaacctcagcaatcagcatcgaccagatcaacccctactcaaatggcgataagcactgcgggtcccagcccctccctgtaactgccaactcccgcgctgactccggactacctcacttcctttcagttctccctcccactctcgacccacgatgtttgtcccaaaactcgccactgacagaaaaaacagaaacaagacagtcttcctaaactttgtccaggaagcaccaggctacacatacccgtccctattacgatcacatcaaactccgaagggagagtatccgccatcttgacgggaaacgtgtcatgtgactattacttgtggaaatgagatcaagttaggcattccctccgtggaaggcggaaaagaaaacagtgcattctgggtgttgtagttcttgggtggaaggtccaggcaggcgactacagtattatatttaaaatgtttacacgtaagttaaaagctcgactcattttccaggctgaatgctgtagctcatttagcctggagggttgaagtaggaaagaaatgtagatttttattccgttagctaggatgaatgtgggagacttggataccccttgacaatactgaagcaaaattgttaggagacacggagagcggagtgaaattgaaggcggtttgctctgtgaacaaaggagactttcattccagcctaaaaaactgtttcccgccatcgtttctgtactttcgtgttggccctcgaggcatggtttttcacaccaatactttcagaatatattccatatctttttcgtttccatgtctcctcgatgaaaacccacaaaaaacctctcaccctagtttcgccagaatggaactcccaccgcgtccgtatttgttccagttagtccagacagccactcgggcaataaattagccttgctttacaggagggaaaaaatatatgaaagcatggttgcgctggataagcgtctgttgagtctgaattcgattttccgcaccaactagataagttcatgtaagattctccttagtttacatttagtttccaatctattagtttccataagctaccgtagaaataattaaggtaaaatggtctttatattaaagtgattgtatctgatgaggggctttaggtcgtctatgtctaacagctaacatagctctcataagtatcttcaaggtctgtcgcctcccaccgcttccctccaaccgccccccaccctgcccccgattatttaatactccgctgtctgacaacaccaaagcaaaaggggaaggatgctgggaatgaaggaggatacttttttgacgacagaaatttcttgtgtagttattttacaagagtttcaaaataaatcaaagataatgtgcagtagtgggccttccctgacaccacctatccgctaagatgcttgtggttccccagacattgttttctttccagtctctgaccacgctcatgctgttctttcagcatggaatgatcttcccattctctagctaacagttattcccaggatgtcgctgggcttccacctcctcctcctttcgtctccgtgtgtgggctgtttccctacatggtgctagactttgtcttaacccgccatactgcatttatgacgattcctatagagtacacatatccccatatatccacacaaaaatacacacccagacatgcaataccataattataaacccctgtacagcatgacagacaccaagtctcatttatctttttcactcctgcacctaacctaagcccggtgcatagtaggaatttaataaatgtttgctaaaccaaacttgattttgactcccctaatagatggatgagacgagtccctgtcctcatagtgcttaccatctttgcctttatatctgcccaccactatcatgtgtcttatatttagaagatgttcagtgtccattaattgtaaatatttacatgaaaatgctttaaaatgtattttgatacgctttttactgcatttctcttgcattttaccataatcattagcaacattgtacatgtttcattactttcttttatagatcatccagttgtattacacaactctcttaagatatggtctttgattagtattttctgtaaaacagattcccctgagaagtataatgtactgttcagtaaaccactttgtcatttgccttggtatgtaaagcaagtttttagtattatcagaagtgaaacagatattatttgtgagactcttgataagacagtagaaaatggaaacaaatggatttctcagagtaaacacagaaaactttccaaaatcttctctaataatgagaagccacag

SEQ ID NO: 1563257 - DNA, 4001 bp, Homo sapiens
ctgcctttgtattctgtgcagaaatatgaaccaagaagagttccctccccagatctcctcactgttcaatttctctttatctcttcagctttttcttttagggaagggggtggttcaaaacatgtgttgggactgcagcagtaaacactagcaagcattgctcagcgaacttagccgactcttattcttgcaaagagccaaactgtccttaatttttcaaattatactttgacccagttaactggagttatttctgcattaactctctgtctgcttcacacaggctgttgtgccattgaacttgcactggctcttttacaggttacttagacatgtagccattgacatgcttcaggggatccaggacccaacaagaaagcaacaacaacaacaaaaaaacaaaaccctgcaactaacacaggtagtggaggtgggatgggagagttcctgtgttttacaagagaaagagaaatgtatcaagtaccaaaagaaaggtatttattaaggtgcttccatgaaacaagcattcacattgttcatctgcgttaagcaaagggaccaactgctccttgcccagctgtgactgcaaggcaatctgggccatcaagtgtcaggagcccactttcagaacaggtctcctgggtagaacagaagcaaagagacatccccacaggaaggctaagggatgaacacatgtcagccagttcttcacgccccacagtgtctctttaatcctcctgagaggcttgactgaccttgtaatctcacattgactatcatctgtgggacagcccctagggtagcaattttctttccgacaaacaataagaaagacactggagtcccaggcccttgtccatcagctgaaatcctctccccactctaccacccagcaagaaaagttcagttaactggtggtgtgttgccactgaaaatggcagttttaacccagggtatctcttgttggaggaaatgctttcattgctgcttatgactgacaaacaatgcctcgcatttggcttgcaaaacacctttctatcatttcatttcattccacacaactccaccttcaaaatgggcactggggggacccagagaactcaaataactttagtggcagggctgggagggactggaaagcaggctttccgggccctatgttctggcaatataccacgttgcttccagagcctagtgtctcaaattctgacccccgtagtcagggacaaaaaatgaggcagatggccagaggataggatagggagcctttcgcccatctaccctgctacattaactttaccatgtattcatcagcaaaatgagaaaacaggctcaggaatacaggcagtgattaaggggactgcagagtcccttgggtagctcagggtggagtacctaagtgacctctcaaagcgccagagcataaagaaatgcaggccgagtggggagggacgagctgtgagttcgaattcagagacccccaacttgctttggtcagaagccttgggccccacctccatccaggttgctaactgctggagcacagaacaggttggggtggcaggggaatttggggcaccctggggaaacttccagggacggctccggccaagagaaggcaacccacctgtgcaaaggctggaaaaggaggtgagggaagcgggcgccgggcactgctcactaacctgggcactggccttctccgtctgccacgcgtgcacgcgctccgagctccccggggcgctctcgtccgaggtctggggctggcaggttgtggcgagagctagagtgcgcgcgaggggggagggggaactcaaaagtgggtgggaggaaaaacatcaccgccctcacaccacgagggagcagcggcttgctcggctcccgggggcagagccaaggcgcgggcgcggcggcccggggccacctgcccgccctcccgctcgctccccacttggcccgagaagccggccgctcggcgctggcgggaagtccgcaagcacgcagccgctgcaagcacgcacactttctccaccccggcacaatggctttatttctgctcccccggcccgaaagtttaaaaatcgggagaaagtgtgagactcagccggctactttcccatcacacagcgcccccactgcagcccccactcctttggctaggcgagcgttggggtcttaaagggaccgcacagctcctccggtccctcctccccctctgcactggatgcacctaggagctccccaccactcgcgcacgccctgaagataccgactaccctctgactcccctgcctggaagcccacacccgctctcctccggcaccaaggcctttccgaggtgtgcacctggtctggtactgagctggtgccctggacacagaatgaaccctcctcgcaaatcacgccctagcatgctgcttatcatttcacggcgtttcccatatccacactgtggctaacagagtgacaaagctttggtttggtgtccttaaaggcggggtggagatgggtgtgtgtagggtcagggattagaaatccactttctcttacaaactgggctcccaagcctcatggaaagggcctgttctaactgttaagtgtcttgaagaaaacttggtgccacacactatacccaccattttttttttaaatgagtccctaagcttctaagttgggccaagagctcaacctggaaatcacagtagcactgctgatgccttggtgggcctgcctactccaaatttgtgtttattcaacaagtgatagttgcaaagaattgtcagaaacttctagggtccaggaaagtgctgcctcgacagacaaaattttaagcccctaaatttggagaagaaccgcagagcttttttctagatgaactagataaatatctatattcctaacatctgtatagtactttatggcttacggagtgttttcacatacatcaacattactttttaaaccctcaaaaccaaccgaactacctgaggtctcaagtgttagagttggtggggaacttctgaaccattcagcttaacttcatcatttcacagaagaggaaactgaattgggggaagaggatgatgtatctaaggtcacacagctagtaaatgacaaatttgagattccaatccagattccctgactttcaacccactactctctggttgttatctccagtctgtagatgaggaaattgatgttcagagaaactgtggcttgtcaaaaaaacaaacaaacaaacaaacaaaccacttatcaggaacagaaaacaaagaaaaattaaaacaagaataattgtccctgaacgttacctccttttgctttttcagaagtgttaatagtatccagctagcccctgcattgctggtgatgtttatttcactgttaacaaaggaaagggggccctttctgtaatgttgccttcagggcccaaaatgtctagctccgtcctgctgcctgggtagccatacactgccacatgcattcaatttgtgctgttgtatatcggtttgaacttgctgatttgttgccttataactgttctcatgccgtttaatgcagtgatgttttgtcttactagattgtgagttcttcaagggcaaggactggttgttcaatttctcttgtgcgtgcattacccaactcccatcattacttccaacatgcttacagagtattctggaaaatgagtttcaagggatagtctgagacaaacataaattctagcatttaaaataaatagactcactgggatttaaaagttcatctatttggctacaaccactcactcccttgcttggtgtagaatcctaattactgcataacaaaccatccgaaaacctagtggcttaaagcaagcaattattctcaattggttctattgagttgattctattgaacttgcttaagatctcttatgcagttgcaggcaactgtatatggggctgctggaattctctgacaggtttttcattagtgtaaatgttagtcatccttgt

SEQ ID NO: 1563258 - DNA, 4001 bp, Homo sapiens
tcaagttggcaagaaaacagctcatagatttttttgcctttcttaggtcccaactaatattatgagcaaataaaaaagttggtaactagagagcaattaatctcctttggcgttcctgtcatctgtgtggcctcccaggctgtgatggagaacatcagaaaatgaatcgctttataaatattcacttttgatttacaagatcctgaagtcctgcctttgtattctgtgcagaaatatgaaccaagaagagttccctccccagatctcctcactgttcaatttctctttatctcttcagctttttcttttagggaagggggtggttcaaaacatgtgttgggactgcagcagtaaacactagcaagcattgctcagcgaacttagccgactcttattcttgcaaagagccaaactgtccttaatttttcaaattatactttgacccagttaactggagttatttctgcattaactctctgtctgcttcacacaggctgttgtgccattgaacttgcactggctcttttacaggttacttagacatgtagccattgacatgcttcaggggatccaggacccaacaagaaagcaacaacaacaacaaaaaaacaaaaccctgcaactaacacaggtagtggaggtgggatgggagagttcctgtgttttacaagagaaagagaaatgtatcaagtaccaaaagaaaggtatttattaaggtgcttccatgaaacaagcattcacattgttcatctgcgttaagcaaagggaccaactgctccttgcccagctgtgactgcaaggcaatctgggccatcaagtgtcaggagcccactttcagaacaggtctcctgggtagaacagaagcaaagagacatccccacaggaaggctaagggatgaacacatgtcagccagttcttcacgccccacagtgtctctttaatcctcctgagaggcttgactgaccttgtaatctcacattgactatcatctgtgggacagcccctagggtagcaattttctttccgacaaacaataagaaagacactggagtcccaggcccttgtccatcagctgaaatcctctccccactctaccacccagcaagaaaagttcagttaactggtggtgtgttgccactgaaaatggcagttttaacccagggtatctcttgttggaggaaatgctttcattgctgcttatgactgacaaacaatgcctcgcatttggcttgcaaaacacctttctatcatttcatttcattccacacaactccaccttcaaaatgggcactggggggacccagagaactcaaataactttagtggcagggctgggagggactggaaagcaggctttccgggccctatgttctggcaatataccacgttgcttccagagcctagtgtctcaaattctgacccccgtagtcagggacaaaaaatgaggcagatggccagaggataggatagggagcctttcgcccatctaccctgctacattaactttaccatgtattcatcagcaaaatgagaaaacaggctcaggaatacaggcagtgattaaggggactgcagagtcccttgggtagctcagggtggagtacctaagtgacctctcaaagcgccagagcataaagaaatgcaggccgagtggggagggacgagctgtgagttcgaattcagagacccccaacttgctttggtcagaagccttgggccccacctccatccaggttgctaactgctggagcacagaacaggttggggtggcaggggaatttggggcaccctggggaaacttccagggacggctccggccaagagaaggcaacccacctgtgcaaaggctggaaaaggaggtgagggaagcgggcgccgggcactgctcactaacctgggcactggccttctccgtctgccacgcgtgcacgcgctccgagctccccggggcgctctcgtccgaggtctggggctggcaggttgtggcgagagctagagtgcgcgcgaggggggagggggaactcaaaagtgggtgggaggaaaaacatcaccgccctcacaccacgagggagcagcggcttgctcggctcccgggggcagagccaaggcgcgggcgcggcggcccggggccacctgcccgccctcccgctcgctccccacttggcccgagaagccggccgctcggcgctggcgggaagtccgcaagcacgcagccgctgcaagcacgcacactttctccaccccggcacaatggctttatttctgctcccccggcccgaaagtttaaaaatcgggagaaagtgtgagactcagccggctactttcccatcacacagcgcccccactgcagcccccactcctttggctaggcgagcgttggggtcttaaagggaccgcacagctcctccggtccctcctccccctctgcactggatgcacctaggagctccccaccactcgcgcacgccctgaagataccgactaccctctgactcccctgcctggaagcccacacccgctctcctccggcaccaaggcctttccgaggtgtgcacctggtctggtactgagctggtgccctggacacagaatgaaccctcctcgcaaatcacgccctagcatgctgcttatcatttcacggcgtttcccatatccacactgtggctaacagagtgacaaagctttggtttggtgtccttaaaggcggggtggagatgggtgtgtgtagggtcagggattagaaatccactttctcttacaaactgggctcccaagcctcatggaaagggcctgttctaactgttaagtgtcttgaagaaaacttggtgccacacactatacccaccattttttttttaaatgagtccctaagcttctaagttgggccaagagctcaacctggaaatcacagtagcactgctgatgccttggtgggcctgcctactccaaatttgtgtttattcaacaagtgatagttgcaaagaattgtcagaaacttctagggtccaggaaagtgctgcctcgacagacaaaattttaagcccctaaatttggagaagaaccgcagagcttttttctagatgaactagataaatatctatattcctaacatctgtatagtactttatggcttacggagtgttttcacatacatcaacattactttttaaaccctcaaaaccaaccgaactacctgaggtctcaagtgttagagttggtggggaacttctgaaccattcagcttaacttcatcatttcacagaagaggaaactgaattgggggaagaggatgatgtatctaaggtcacacagctagtaaatgacaaatttgagattccaatccagattccctgactttcaacccactactctctggttgttatctccagtctgtagatgaggaaattgatgttcagagaaactgtggcttgtcaaaaaaacaaacaaacaaacaaacaaaccacttatcaggaacagaaaacaaagaaaaattaaaacaagaataattgtccctgaacgttacctccttttgctttttcagaagtgttaatagtatccagctagcccctgcattgctggtgatgtttatttcactgttaacaaaggaaagggggccctttctgtaatgttgccttcagggcccaaaatgtctagctccgtcctgctgcctgggtagccatacactgccacatgcattcaatttgtgctgttgtatatcggtttgaacttgctgatttgttgccttataactgttctcatgccgtttaatgcagtgatgttttgtcttactagattgtgagttcttcaagggcaaggactggttgttcaatttctcttgtgcgtgcattacccaactcccatcattacttccaacatgcttacagagtattctggaaaatgagtttcaagggatagtctgagacaaacataaattctagcatttaaaataaatagactcactgggatttaaaagttcatctatttggctacaaccactcac

SEQ ID NO: 1563259 - DNA, 4001 bp, Homo sapiens
aatgcagagacctggcttccacctcagtcacgcctaaatatcctctctcatctcaggatctccctctaaggaggcgcgaggctaagctggagattccgatgaatctaccaaattctacgagcaggactttcccatcctcttggacctgatctgatagaatgggatccagcatggtaccctcccccctacacttccccctccccaggccattccaggctcccggaagaccagtcccggtccctgccttgccccgggccaccttacccggatccgtgccggggacagggatgggaggctacgtggcgccgtcggcatccatctccagcggcgtctccccttccctgggctgctccgcgtcgccctcctctccgctgcgagggtaggcgagcagacgcatggctggagcgcaggcggcctccacctggcgcacctgctctcggctcaggcgctcgcgccaggcgtgcaccgcctcccgggcgtcgcgcgctgacaggtggaagggccggtcggcgccgtaggccgcgccgcgagtcatgttgagcgcgaaggcatcgagcgctgcgagcgcgcgtagcccggagaagcgcagcaggcggcgcagctgggcgcgtggctgccgcaccaggtcctcatagcgcagcctcaggtagcggcgccgcagccaggcgggcgcgccgcgcgcgaaaagcagatcgcgcagccaggcttcgcagatcacctcgagcgcaccggtcaggaagaaatcggcgcgcggcgcggcgggcagcgcgcgagactggcccccggggcgagcacccacgccgtgcgccagcagcacacggtggaagcggtcgcccctctggcgggtgcgcagcacctggatgctctcgcgcagcagtccctgcctagacttgaggcgcgagttgtgcaccgccctcgggtcgcggaaaagctgcaccaccttcaggttgaggcctggatcacgcaacaggggcaccagcacgcccagatcgagcaggcgcacgtccttgatgaccaccaccgggtactttcggcactcggcctccagggcgcgtatcgccacgggtgggcagctgcgctcgcaggcggtgtcctcgacgaggcccacctcggcccgggcacggggtgcgccaggacacagtggcggcgagcagatgaccttgttagtccgccagcggaagagggcggccgtggtaagattggccgtgtccggggcgcgcgcagcggggtcccccggcggcgcgtacagccgcagcacggagaagtcgcagcggaagagcgaacgcagcatgtcgcgcagcgcgccctgcaagctctcggcgtcgcccggatacagcgcctgccatagatgccacatgggctcatacaagtagaaaacgtccgggtgctggttaaagagttcgcccaggaaggacgagccggtgcgccaggtggcatgcacgtagatgtgctgcttctcgcgagacactgcctccccgacagcgccgctgaggttgcttgggaaccgaggagactggttcgcgcccccttcctcggcggcccgcgcctccgctccctgctcgcgttcgccggccgccgccgcctccaggctccacactcccaggctgcgctgcaggccggggcagtgctcggcgcccttgtccccgtcgcggccgccgtccaatacggaggggacgagcaacagcaccagcgtgtacagcaccaacagcagcgcgaacttgcagtactctcggcgtcgccgccgccggcccttcatcgttcaccgaccctccagagcgggtcgggcgccagtcttctcccgttcctcagaaatcccgtgccaggtccgctcctgtggcctctcccggcccctctgcgccgggaggagcagagccgcggggccgcgcatccacaaggggaaacttggaaggcggtggtgctactgacggcgcccctgccctctcggcttagcagccggagagccgcctattggccggcttggcagccgcccgccccgcctttctgcccgcctgggttcgcccacggctctgccagatctgggcggggctgtagcggggctgggacgccggcttacccagccagacccccacctttccccaaaccctccgtaatgaagtcttcatcaatgacttcaggcaaaggaggggcctgtgtgtacagaatgtacccagtaaagggccatagaccccacccggagaaggtcactgcctcttctgttttatgtcccctgcctagccatcgctatcctaggcagataaacactcgccactatacatccagcgcccccatcagccctggagtgggtgttactgagttccggactgaaagatagaagattgtacgtggcagagcggtccaggggggttggagatactactgcatccacgcagcacatttcataaagtctagcctttgtgaaattctaagtgttgtgttccttagggtttcaccagctgatgggctctgcacattttaccaatactctggggcccagtttggtcatttgtaaaatgtgaataattcttagtacccatgtacctcctgggattgcgagatttgggggttgttaccacagtataacccagcctattctgacacctatgagcaaaagacatttacagaatcaaagtggtagaatggtgacctttctcaggagctcggtgtttaaaaggacccgtaagaagaaatgtgtacccaaagatagatgaaaaagagacaggaagtccaacaggcagatgaagactagagttactaaaattcaaaacagaaccaaaaaagatacattttgctctgtttcatcaggctaatgaataaggaagtgagagcttcctttcaccagcttggggaaggtgttgtaaagttaataaaacatagaaagcatatctacttatctccaccaggggaaggtgttcaaattggaagagtgagaacatatgcaatgctctccactggtctttttcatcacggaagctactccacctgtgaaaccactgactcaagcatttcgttttctttccacaattcccctcttcttccagccagttgttcaaatcttccctattctccaacctccactttttgaccaccacccccactttcttctcaatttttcatattcagctgaaagatgccataccattattttaataacactccctccaataagctaaactcacgtgccctctgccttttcattactcatctagcaaaatcccccaaaccctgcttttggctttctctgtgcctgcaaacaccactgcgaaacatttctccacaggtgtgagccaggcacagtggctcacgcctgtaatctcagcactttgggagcccacagaacagatcagcatcaagataacctcataatcatcaacctgaaatggttgctgaaatcttaggttcttcatgtcacttcccagtctccagttccattatgatgatttcaaaccttctctagtctcctcagacttctgatacccctcttcccccacccacctcttctcagcacatgaccttactgcctacttcataaagaaaccatgttagacgatctctcacttttccactaccaaactcatatatgcattgacctctgtacacatctcgtttatagcaaggatatgattttgcaatattaatctacaactttcccttctgttttcacttttccctcctctctggcttttttaaaaagctttgagacagggtctggctctgtcacccaggctggagtgcggtggcactatcaccactcactgcagcctcaacctctcaagcccaagcgatcttcctacctcagcctcccaagcagctgagaccacaggcatgtggaccacacccagctaattttgtttgtttgtttgttttttgtagagaccggggtctgtatgttgcccaggctggtcttgaactcgtgggctcaagtgatcctcccacttcggccttgtgctgggattacaggcctgagctactgtgcctggcctcctctcatcttttaagcaagt

SEQ ID NO: 1563260 - DNA, 4001 bp, Homo sapiens
aagaaaaaaatgtcccatagctaggcacagtagcaccctcctgtagtctcagctactcaggaagctgaggtgggaggatcacctgagccctggagtttgataccaggctgggcaacatagcgggaccctatctctttaaaaaaaaaaagccccatatattctagctttcatgatcaattagagatgtagaatttcatatttataaatacctcttggtccaaagaatcttgaggaccttaaaaagagtctctaatctttccaaggaggctagaattctccgtgacactctccactccgcagcggtcattaagaatctgctcagacacttctagaaagtggccacttactacctctctgtatcatctttgcattgcttacttgggtggatgggggtaggggagggaaaaaatagagaaaggggtaaacatttttttaaaaacatgaggaaaaaatatcagctgttgggtcccgcatcattgcttgattgaagccctgctccttctctgaggcaaccgtagaaaaatatttcaaaagcaagtgatcaccagacaagaagtctaacacatgtcgtcttcaagagccctagcacaatcagtatcagacaattttcctgtcctaagaaaaatgtctgggggccctgtccatcttttcctgttcctatccagccttccctctcctttttgccgcttggtacccgaatgtacaaaacgaagaaaaaacaacaggagcagcagcaacaacagcaaaaccaaaagagaaacattagaaaaatcaaaagagagaacgagcaaaaaaactctctctattctgatatcagttcgtgggggaagaccattttaccgcgcctccctcttcaatctgggagctcccccagaagaggccctgtgtccattcagatcttctgccttccattactgacccaccacccaccctgaccccagcctgggtctgcgctcaataggcgctcagtaagtgttgttgaatgcgtctgaagaagcaatcgcatttccatcggcatccctggctctgcttccccggctttctgccctcctccaccaccctctagcccgttcgtgggcaaaacttggcaacgcggaaacgtcccagcccgctctccaagccgcgagctgaccactgcgaaacggctgcgacaggcggctgggaaacctagagcaacaagtgccttctcgccggctgatgcctggcggccccccggccaccagttcccagtcccgctgcccgctcttcgcttcaggccttcccttgggcgagcagccccctcccgcctagacaggggtgggaaggggagagggaaaagagaagggagaggcaggtgggggcctcatctttaacctgttgggggaccaaaagttaaaatggcaccaaccggatggttccatctcgattgctattttctcactcagaaggagaaatttaaaaatccaaacagcactgcggcttggcttggacgcgctctaaccagaccagtcagtttcgccacctgaaaactaaaggcccgttgtttgcggacagctcggctgccctcctcgccgcatcccagatggagccgcggaaccgggggcggccgggagcatcccttgcacggcgggcgcgtgcacccaggccaccggggccctgagcgtccgttcccgcaagtgctgtatcaggaactgatcttagagacaggatggacaggcaggaaggggcacggggtgtcggcctccgcggcgagtccgcactccggcgccggctgctgccactctcgcgcctgatcaacacttactgagcgcccgctgagcatccgacgcggcagcaggctgagcctaccccctagccaagccgcctgcggtcagtgctaaaaccccgctaggagaagagtgagagaggctcggagaggtgcggtaacttgcccaaggtcacagcgctagaaagtggcggagccgggattcgcagccaggtctctctgactccaagtccggtgctctgcgaagcagggactcggcgcgcggctcgccagcccgcgtttatagggagaggggtgtgcgcgtgggtgtgtgtgtgtgggcgtgtgtcgggggaggggagggctgaggtcgactgggcagtagaggcaagttgcccaaattcgctaacttccatcccgcaattccgctgaactcggcccgaaaagccccctcttgcctcaattccccgaagtaaatctgagctttgtgcagctccggagccagagcgtccagatgcggtccgggagattagcaaagtcggtggaagccaagctggagaaagcgcgggcgcagggagaaaaggtgctgccgtctccccgggagaagcgggcacccggccccgctggccggcaggggggcgcgctggcaagcgaacccgagcgctggcgggcgggcgggcgggcggcccctcgcccccagcagagcagctttccaacagaaagcaagtctccccagaaccctccggcccgcctggcggccgcccactccccatacccgctccacgggagtcctcggccccgccgcccagcccggcgcccagcccggcggcccggcttacctctgagaagccgcctgccctggagagagggaagcgcggagctcggtgagccgcaagagaggcggcggagcccccagcccctggcacgcacgccgccgccaccgctaccgcgaaccggtcgcgctcagcgcccgcggccgcgccgttggccacccgaccccggggcgcctgggaaaagcccgcaccgcgccgcgccgccgctgcaccgcacagtgccgcgccaagcagcccctgaccgagctggtgcccgcccgcccgcccgcagcttcggcgccggactccggggcggtggcggtggcggccaccgcgctcccttcccggcgctggggacccggctctcaagcccccattgccgcccggagagccctgacgcacacgcacacggcagcagactggcctcggctaggaatcccaggaaggacagaccctttttttccctttttttttctcccctcaatttccacgtctttataaccggcttagggcattattagcacatgtcctggctcgtgggcgagttggtggcaaaatctgaactggatactcacggagggcccgcgcgggtgctgtgccgtccgctgctctcttcctcctcaccgagaactgcccctcgccggcggactacaagagggcagccgggcagagcgagcttcctctcggcagctcagcggtgccccttctgcagctttgccgccgggcacatttttatagcagcggctggcgtctgtggccctttaaaggcgctcgagctggtgcagtcaccgcggatcgtgtgaaagcaaagggccggctggggaacggagtccacgcggccacgcgagtccggcagccctgtggaccggccaaggctcccggggtggggctggcgagtccgggctatgggcagccctcgcccggagccctggccagtgcccggcttctaaagctgtcgggggccagggcccgggacaccggctctccccaccgccctgcgtggacttgcccaataaattccacttagtaatttcactgaggcaaaggagagccgttagtgtctgttttctgacctaaatctagtcgggggccaaaacgggcttcaggggttttgggagagagctgtgggctcaaggagtgacctggaagagcggggcgcacacgagacgggggaatggtcattagttttctgcagggctgtcttggagcctgtctgccttttgggggggctgtactatctcattcgttgaagagctgaggctgggggctccttttcctcttaaagtcgccagattctgggcagagtcgcatggggggcctatatggcagcggtggctcttctagaagttctgagctggggttgggttcgagggtttctgttctgtggtcatccagggcaggaggctggcaggatgcgacccggagaaatgctactctcccggaccgtggggccaggtacagctcac

SEQ ID NO: 1563261 - DNA, 4001 bp, Homo sapiens
agccccctcccgcctagacaggggtgggaaggggagagggaaaagagaagggagaggcaggtgggggcctcatctttaacctgttgggggaccaaaagttaaaatggcaccaaccggatggttccatctcgattgctattttctcactcagaaggagaaatttaaaaatccaaacagcactgcggcttggcttggacgcgctctaaccagaccagtcagtttcgccacctgaaaactaaaggcccgttgtttgcggacagctcggctgccctcctcgccgcatcccagatggagccgcggaaccgggggcggccgggagcatcccttgcacggcgggcgcgtgcacccaggccaccggggccctgagcgtccgttcccgcaagtgctgtatcaggaactgatcttagagacaggatggacaggcaggaaggggcacggggtgtcggcctccgcggcgagtccgcactccggcgccggctgctgccactctcgcgcctgatcaacacttactgagcgcccgctgagcatccgacgcggcagcaggctgagcctaccccctagccaagccgcctgcggtcagtgctaaaaccccgctaggagaagagtgagagaggctcggagaggtgcggtaacttgcccaaggtcacagcgctagaaagtggcggagccgggattcgcagccaggtctctctgactccaagtccggtgctctgcgaagcagggactcggcgcgcggctcgccagcccgcgtttatagggagaggggtgtgcgcgtgggtgtgtgtgtgtgggcgtgtgtcgggggaggggagggctgaggtcgactgggcagtagaggcaagttgcccaaattcgctaacttccatcccgcaattccgctgaactcggcccgaaaagccccctcttgcctcaattccccgaagtaaatctgagctttgtgcagctccggagccagagcgtccagatgcggtccgggagattagcaaagtcggtggaagccaagctggagaaagcgcgggcgcagggagaaaaggtgctgccgtctccccgggagaagcgggcacccggccccgctggccggcaggggggcgcgctggcaagcgaacccgagcgctggcgggcgggcgggcgggcggcccctcgcccccagcagagcagctttccaacagaaagcaagtctccccagaaccctccggcccgcctggcggccgcccactccccatacccgctccacgggagtcctcggccccgccgcccagcccggcgcccagcccggcggcccggcttacctctgagaagccgcctgccctggagagagggaagcgcggagctcggtgagccgcaagagaggcggcggagcccccagcccctggcacgcacgccgccgccaccgctaccgcgaaccggtcgcgctcagcgcccgcggccgcgccgttggccacccgaccccggggcgcctgggaaaagcccgcaccgcgccgcgccgccgctgcaccgcacagtgccgcgccaagcagcccctgaccgagctggtgcccgcccgcccgcccgcagcttcggcgccggactccggggcggtggcggtggcggccaccgcgctcccttcccggcgctggggacccggctctcaagcccccattgccgcccggagagccctgacgcacacgcacacggcagcagactggcctcggctaggaatcccaggaaggacagaccctttttttccctttttttttctcccctcaatttccacgtctttataaccggcttagggcattattagcacatgtcctggctcgtgggcgagttggtggcaaaatctgaactggatactcacggagggcccgcgcgggtgctgtgccgtccgctgctctcttcctcctcaccgagaactgcccctcgccggcggactacaagagggcagccgggcagagcgagcttcctctcggcagctcagcggtgccccttctgcagctttgccgccgggcacatttttatagcagcggctggcgtctgtggccctttaaaggcgctcgagctggtgcagtcaccgcggatcgtgtgaaagcaaagggccggctggggaacggagtccacgcggccacgcgagtccggcagccctgtggaccggccaaggctcccggggtggggctggcgagtccgggctatgggcagccctcgcccggagccctggccagtgcccggcttctaaagctgtcgggggccagggcccgggacaccggctctccccaccgccctgcgtggacttgcccaataaattccacttagtaatttcactgaggcaaaggagagccgttagtgtctgttttctgacctaaatctagtcgggggccaaaacgggcttcaggggttttgggagagagctgtgggctcaaggagtgacctggaagagcggggcgcacacgagacgggggaatggtcattagttttctgcagggctgtcttggagcctgtctgccttttgggggggctgtactatctcattcgttgaagagctgaggctgggggctccttttcctcttaaagtcgccagattctgggcagagtcgcatggggggcctatatggcagcggtggctcttctagaagttctgagctggggttgggttcgagggtttctgttctgtggtcatccagggcaggaggctggcaggatgcgacccggagaaatgctactctcccggaccgtggggccaggtacagctcactaggctcgccgaaaagccaacagtaggcaacggggtacgaagagcttgccccagggttcgcggagattcctcctgccttcccacgatgtcaggttgttttattgtaactacataatcattcccgtctagcaagaataacgttttgcatttggagttcgtctttcttaggtagagatgttgtcttacaaatccttactggaaagaggtctgggtcttctccttcacctcaattcggattctttgtggccaagaaattcccaccttaccacttacagggaggccatcgggattacccctctgtcacccccccaccccgccccggccccgccgctctttttttgctgcctttcagcaacagcgactcagtttacactgtttataaaacatactctttaagaaaaggtcctgatgttaaaaaagggggggagggaatgtcacgaagtcattttcactatgtatgtgttctgtcttcttaattggatttgaagacctgaagttctctttttcttttctttttctttttttagtagccccaagtgccctgcatttgctcttctaacaaagttctgtttgttgacggactgaccggcttaccgacacaaagatgggaagcaaatggagagacggatcaaggcccttcctcggcatctggaggaagcttgggcgagtgtcttggtcgccaggtaaacccattctccagccctcaaggctgccttgcacagctccagtcttttcacttaccctgtcccaacacaaaccccggtagcatccacaccccacacatcttcgctgcactttctcactttgcttgccagattgtgggccctgcctagtctccctctgataaaaggcgggatctgtcggcaccctaaagccttactgcaaaccgcgtgtgaaatacactctcaagttctcttggtgtttgcctgggatgaaaaaaaatgtttctgcgaaaactaagtggtggagaatgagcgactctaggctttcgaattgcatgttactaatttgaacccctgacccaccctccccgtcagccccggcttggctcgggagcaggtctggcaacagcggcagcttctccgctgcaggctccggatccgggaggtgtggatccgccctccatctattggatggctcccaggccaattgttagaaagaggcatatgttcatctcggcttctggagtgtctccggagcagttgctcaacagccagccccctcccccatccggaccattgaagggcagaaaaaggagcgccctccaccacat

SEQ ID NO: 1563262 - DNA, 4001 bp, Homo sapiens
gtgggcaaaacttggcaacgcggaaacgtcccagcccgctctccaagccgcgagctgaccactgcgaaacggctgcgacaggcggctgggaaacctagagcaacaagtgccttctcgccggctgatgcctggcggccccccggccaccagttcccagtcccgctgcccgctcttcgcttcaggccttcccttgggcgagcagccccctcccgcctagacaggggtgggaaggggagagggaaaagagaagggagaggcaggtgggggcctcatctttaacctgttgggggaccaaaagttaaaatggcaccaaccggatggttccatctcgattgctattttctcactcagaaggagaaatttaaaaatccaaacagcactgcggcttggcttggacgcgctctaaccagaccagtcagtttcgccacctgaaaactaaaggcccgttgtttgcggacagctcggctgccctcctcgccgcatcccagatggagccgcggaaccgggggcggccgggagcatcccttgcacggcgggcgcgtgcacccaggccaccggggccctgagcgtccgttcccgcaagtgctgtatcaggaactgatcttagagacaggatggacaggcaggaaggggcacggggtgtcggcctccgcggcgagtccgcactccggcgccggctgctgccactctcgcgcctgatcaacacttactgagcgcccgctgagcatccgacgcggcagcaggctgagcctaccccctagccaagccgcctgcggtcagtgctaaaaccccgctaggagaagagtgagagaggctcggagaggtgcggtaacttgcccaaggtcacagcgctagaaagtggcggagccgggattcgcagccaggtctctctgactccaagtccggtgctctgcgaagcagggactcggcgcgcggctcgccagcccgcgtttatagggagaggggtgtgcgcgtgggtgtgtgtgtgtgggcgtgtgtcgggggaggggagggctgaggtcgactgggcagtagaggcaagttgcccaaattcgctaacttccatcccgcaattccgctgaactcggcccgaaaagccccctcttgcctcaattccccgaagtaaatctgagctttgtgcagctccggagccagagcgtccagatgcggtccgggagattagcaaagtcggtggaagccaagctggagaaagcgcgggcgcagggagaaaaggtgctgccgtctccccgggagaagcgggcacccggccccgctggccggcaggggggcgcgctggcaagcgaacccgagcgctggcgggcgggcgggcgggcggcccctcgcccccagcagagcagctttccaacagaaagcaagtctccccagaaccctccggcccgcctggcggccgcccactccccatacccgctccacgggagtcctcggccccgccgcccagcccggcgcccagcccggcggcccggcttacctctgagaagccgcctgccctggagagagggaagcgcggagctcggtgagccgcaagagaggcggcggagcccccagcccctggcacgcacgccgccgccaccgctaccgcgaaccggtcgcgctcagcgcccgcggccgcgccgttggccacccgaccccggggcgcctgggaaaagcccgcaccgcgccgcgccgccgctgcaccgcacagtgccgcgccaagcagcccctgaccgagctggtgcccgcccgcccgcccgcagcttcggcgccggactccggggcggtggcggtggcggccaccgcgctcccttcccggcgctggggacccggctctcaagcccccattgccgcccggagagccctgacgcacacgcacacggcagcagactggcctcggctaggaatcccaggaaggacagaccctttttttccctttttttttctcccctcaatttccacgtctttataaccggcttagggcattattagcacatgtcctggctcgtgggcgagttggtggcaaaatctgaactggatactcacggagggcccgcgcgggtgctgtgccgtccgctgctctcttcctcctcaccgagaactgcccctcgccggcggactacaagagggcagccgggcagagcgagcttcctctcggcagctcagcggtgccccttctgcagctttgccgccgggcacatttttatagcagcggctggcgtctgtggccctttaaaggcgctcgagctggtgcagtcaccgcggatcgtgtgaaagcaaagggccggctggggaacggagtccacgcggccacgcgagtccggcagccctgtggaccggccaaggctcccggggtggggctggcgagtccgggctatgggcagccctcgcccggagccctggccagtgcccggcttctaaagctgtcgggggccagggcccgggacaccggctctccccaccgccctgcgtggacttgcccaataaattccacttagtaatttcactgaggcaaaggagagccgttagtgtctgttttctgacctaaatctagtcgggggccaaaacgggcttcaggggttttgggagagagctgtgggctcaaggagtgacctggaagagcggggcgcacacgagacgggggaatggtcattagttttctgcagggctgtcttggagcctgtctgccttttgggggggctgtactatctcattcgttgaagagctgaggctgggggctccttttcctcttaaagtcgccagattctgggcagagtcgcatggggggcctatatggcagcggtggctcttctagaagttctgagctggggttgggttcgagggtttctgttctgtggtcatccagggcaggaggctggcaggatgcgacccggagaaatgctactctcccggaccgtggggccaggtacagctcactaggctcgccgaaaagccaacagtaggcaacggggtacgaagagcttgccccagggttcgcggagattcctcctgccttcccacgatgtcaggttgttttattgtaactacataatcattcccgtctagcaagaataacgttttgcatttggagttcgtctttcttaggtagagatgttgtcttacaaatccttactggaaagaggtctgggtcttctccttcacctcaattcggattctttgtggccaagaaattcccaccttaccacttacagggaggccatcgggattacccctctgtcacccccccaccccgccccggccccgccgctctttttttgctgcctttcagcaacagcgactcagtttacactgtttataaaacatactctttaagaaaaggtcctgatgttaaaaaagggggggagggaatgtcacgaagtcattttcactatgtatgtgttctgtcttcttaattggatttgaagacctgaagttctctttttcttttctttttctttttttagtagccccaagtgccctgcatttgctcttctaacaaagttctgtttgttgacggactgaccggcttaccgacacaaagatgggaagcaaatggagagacggatcaaggcccttcctcggcatctggaggaagcttgggcgagtgtcttggtcgccaggtaaacccattctccagccctcaaggctgccttgcacagctccagtcttttcacttaccctgtcccaacacaaaccccggtagcatccacaccccacacatcttcgctgcactttctcactttgcttgccagattgtgggccctgcctagtctccctctgataaaaggcgggatctgtcggcaccctaaagccttactgcaaaccgcgtgtgaaatacactctcaagttctcttggtgtttgcctgggatgaaaaaaaatgtttctgcgaaaactaagtggtggagaatgagcgactctaggctttcgaattgcatgttactaatttgaacccctgacccaccctccccgtcagccccggcttggctcgggagcaggtctggcaacagcg

SEQ ID NO: 1563263 - DNA, 4001 bp, Homo sapiens
aagaagcagaatgacactaggaaaacacttgatagttacctcttaaaagcccctctgtctacttagaatgcatgcagtgtggtcacttcagattttgttcccccgccggagcggttttttccctcccccgtctttctgtctggcccctgcccgctttctcggggcgggcacgccaagacccaagtcacgcgtgggcctgccacgggccatccccggccgggtgcatgcagctgcagcaggcagctgtgggcagcaggcgccgcagcagccagaggccccactttgggtttctgggggcgcagccgggctgcaggcccgcgggccgggctccacctgcagcgtccgcgctgccgggggcgccggggagggcatccaggcgccgcgcgccccttacctgcagtgccgcatcgcgcccgcggccgcccacctggacagcatcctcgagcatcctttcttcagcgcgacggctgcgagcgccgtgacatcaccaggaggcgggccccacgctgccacgtgacgccctcggggcgaggcagggaggtgtgcgcggggtggggggaagaccctggaagtcccgggaggtgagggtcgatggccagaaaccctcgcgctggccgcccctcaggcgtttcgcttgatgtgtgcagcttgcctggcctttcgcgaagaattatgaaaaacaacacacaggaggagaaatccaaattattacaggctccaagcgagtaataggatttcaaaagaattagcaataaagggattacagtgaaaggaaatacaatttcatgttttattttaaaactagtatttatcaaatgcagtggagaaataaacattttgtgcaaatcaaaatgacacaaaatatagcatggacatactttgcctagagtttctatgtttcaagccgtatatcgagtattataccaaacactttagttcaaagcaattcattatggaacattatactaattgcacggatgaataatgctttaattactctgaatagctgcattccaatattaatttgtatttgccaaaggaaaaaatggtgacaccacgtatttctactacttacttaaatatgtgatgatttaaaataaagcactgctacgtgagcatggttgtatttgtgtctctgttttcttacatcttctggcaaggcatttaatctctgagacatgacttaattcacaataactcattatttcacattttctaatctttatcacattctgaagaagtgagtcattttactatcacagaaaatatgtacaatgtcaacatttctcattcacaactgaaacagccttgcctagaaagactttagaaaattacaactgtgataattttgtaaatttgaaatagcgtatttcaaacttaagcagtgcacatataaacttttcttttgccaaaatacacaagcgtttttgaaatgtaaaaggacaaaagcaaagactgcttttatttgtattccaattgcaaatagattcatttactttcacttgagttaaaaatcacaattttaacattccctttgctcacagccctgaaggagacatgaaatagattgttttacaagcaggctagagttaagtttacttgcagtttattccatcagctttcgtgtccttctatatttaaccctggcccttataccgtgattccctccaaattaaccaaatttctgttcagaaggttaatctctaatttggggataaatacagcccttgactctcacagcgatcaattattttcaacaccagattttaaaaatcaacaaagtcgcagtgtactttactaggtcactcctctcaaatttgtttttctgagtgataagcagcttaccttccgctttcagattctgagataaagttaaaacgctaccgaaatctcctgctcctttgggttgagggtctaatggaggcagaaactgacaagctcattttcctgccagaggcaaatgtcgatttcagcccggagggccccggaggccggctgggagcatcacgtgctcggcccagccactcagccctgcccagccagcctggtcacctcttggctccggagccccgccgtgccagtgtcattcgcctcctacccccggagcattcgtgtccagagaaaacccggcgtcccggagacaggacgccccaccctcaggggctgggctgcacggaattctgtgaccggattttccagcatcaatgggaggtggtgggtatacaaaatgccctgcagcctgaagaggatggtagcacggtgcagacagccttgctccgtattccggcttggctgaaatgacgaaatacaggcaaccttcttcatcctggagcagtttttttgcagtaggttagtttcaccttctcttttttctaggtgattgctcaattgtaaaaaacattgcagcaaaccggcaattcagacaaggcccagaactgggccaagcaattctcaacagaatgagagagctgtctgaacaccctccaccctcgcctttcaaattgtcattttagccaagattaaaaaacaaaaccaaaaaaagcaaaaaccaataccacccatgggaatgtaagttgagcaatctttctggtggtctgtttagcatttttcctaccaaatgccttacagatacacagtttcgccaattactccgggccctacagctgttggtatcatgtgctccagcaacttgatgtccaagaatttgtcctggggtgtggggagtgggggtggggggaagaacggtgtgcaaacccctgactagggaaagtttgctgcaatattacttatgatctcaaagcactggaaacaagttaaatctccaaaaacaggggatgttttaaattataagccatctgtgcagtggaagaattaaaactaatacggtggtacacacggatggaaaaagacatgtgcagcggattaaatgggaaaaaaaatggaagcttcaaagcattatgtgctgagtgatccgtcgtttctatgtaggtgtaatatatttatatctacacatatacctttgcgaacacagaaaactattaggaaatgaattcactaaagtatcaaacatggtatctcactggttagtgggattaagggtgttttaaatttttcttcttttaagcttagagatatcgtctaatttttccacagtgaatatgtattgcttttatagcaacaaaaaaattgttttcttaaaagcaccatatagacatgattatggaataaacaaacagttttggctaattttttaatgcagatttcattacttgaagatcctgaattcttaaccacaaagtcccgagggaacaatccctagccatcctagattattctgctcatgaagatctttaggaaagaaagtgccattcaggggccgttgttaatatttaaccatctgtatgtccagttttaatttctcttccatttaaacctacttctttttactttgctctgtgtggagatagaaagctggttattaccatccttcatgaaaagattctttcaatagttacggaataataacctttgagttttttgttcattcgagacagggtctcaccctgtctcccaggctggagtgcagtggcacgatcatggctcactgcaacctcaaattcctgggctcaagcaatcctcctgcctcagcctcccaagtaactgggactacaggctctttccattgtcttcacagatttctctttcctatccctttgaatcttctacattttttctcttatctgccagttttctacagatgtcatacaaggtttagaacagcggttcttaatggggtgatgttgctccctttcccccaggggacatttttggcagccacaactgaagtgggaggagccgtgtgctcctggcattgagtgggtagaggccagggctgctgctgaacatcctacagtgcacaggacagctccctctccactcctacctcccgggacaatgaacatttcggcccaaaatatcagtacaatagtgctgaagtcgag

SEQ ID NO: 1563264 - DNA, 4001 bp, Homo sapiens
tatttcagtttatggaagggagacaaaagggtcaaaggcacttgcagccatatcacatcaagaaccattttacatttataaggcaataattcaatcctatgaagtggtttttgcctggctggggactccaaataaagcatgtgggcctcttcacgagttaagttggctggaatgtacaaatttcccttcaataggtataagacttgatctctgatgtaacaggcttgtaggaactctaagtatgtcagcacagtctaagatttacaagcagagatttaaagaacagtgtatgattcagtgatgaaatgtccctccctgatccttcaactgcaagaaacatatccacctgcccacccatcatagtcccttatctactttgctttgggtacttctattacaattacttttgtgcatgctttatcttcctttctagactacaagctctttgctggtagcctgatgtctgattcatcgttcccttctctacagtgtctagcacatatccaagaatcagtatatatcagctgaaccaaaatttgtttgatgaacggtgggaatgggggagaaagttttaaactcacaagctatactcacacaaggcttaaacttgattcaaaatatttcagcaacatcatctgatggaataagattttgctattaaacacaaaatacaaaacagtactgaggaatctatgcaaatgcacactggggaaaagtgcagagtaatgccatcatttaattcacccagccaaagctcacatttgcagcaccaaccttggcagggacaaggcttcctccagactgtttggtaatgaatccctctgcagaggaggccaaagtgggcctgagctgactccctctcctcccatctgcatccccatcttcactgtaaactccaaacagacaactttagcaatgtcatggggaaagtttgaaggaacaccccaagctgtacttacaattggtttaccaattgtaagtcttctgaatacctaagtcagcatgcctttcacaggcaaggtgcacatttgaaagaaaaagctctgcagagtccaaatcatctgtagggtgggggcggggtgggggtggagtggaaaaggtgaacaagttaatcttaaaccccaaccaaagtcctttccatatcttcattcgtacctgactgtaaaatggatggctgctgaatcaccagcccagcatttcctatcatgtcagtgtcatactgataaagatgaaagctgatgtgtttcttgagagcttagagggaaaaagccagctaggaaatgagggcagaaagaggataaagtatgtgtgtgtggaggtgggggagggcaagctgtttcaattctcaagtccaatgctgacatgaacacatgacaccaaacaaccagatatttactttttaaggcaggttaatgctccagttgaatttgctctggtttaagagttctcctttcagaaggggaaaaataggattttgtgaaactgattttaaaaatcatctgatagctatctaatgatacactatatatcaaatgaggcccccacctttaaggatattaaggcaaaatgaagatctgcaacagcttctagcaggaaagaaagaatcctattacatcactaggtaacatgagcaccgcatcatcctcctttgtagtctggtttccttagaaacgcaattgtcaggcccctctcaaagagcaggcagtgattagaatcctacaacagactgcttgcaattctccagatcccctgctcccggggggcatgcttcagtccttggtcaggctcaagtctgcttaccttcaatcacagttttctttttttctgcctcaaggaagaaataaccttggcagcccgcatttggtcattcaggttggggagcttttacaaaagaagccccagtctgaagtgctttagaagggcacttgctgcattctctgcctttcacagcaacaaacgccacctaaagaactaccagtgttccctggcggtcagaatgtgatgtcactgttggagtcacgtgaccagacctttggaccagcctgggagaaaggaagatttttaaccgggcacagaagccttaaagatgtagtctcatctaaacaaatgccatcaaactgcgggcagtcgggtcagctcaggaaacctgggtccagacaagtcttagtcttcatttagcagaaagtccaagaaggcaaagtagaaatatccaaaagaatttagagttacaggggtcctaagtataaaagggagaaaggcaaatataaaaaaggttttttaaaaaatacactagatagcagcaacgtgggtagtctcacaaacctaatgctgagtgaaagataccagacacaaaaatgcacaaaacattcattacgattctatgcctctaagttcaaaaacaggcaagcaagttatatcattttagaatacaaatgtaagtgattacatttcaaagagaagcaaggaaatggcaaaagtaaagacagaagctacccagagtagagggctgccatgtgggaggggcacatggcaagggcagggcttctggaatgctggtcatttttcttgatctgggaggtggtttacctgagtgttcacttaataattattctttaaactgtacacatgttttatgcttatgtacaaatcataattaaaggaaaacgtgaaaaactaaacttcatatgaacttactatacaaggtcagttctttaacagcacctcatcactttgaaaacccagagtatagtcaagaaaatgagttgtttctgagtagtaatgctctacgcagaaagcaacaacaactctggtactcattaatccaacctggatgaaagtagctattttagcctgacaataaattcactatgatgtttccatggttttaaagggttgtgaaggctattttaaagcaggtcttaattaattgtgcaataaggtcagtccggtaaagaaaaataaaattgctatctcccaactccctaaattgggaggattccctaagggaacccaaaggacagccactgttaaacattaacccagtcacagtgtgctgtaataactggaccctatgtgtagagctttgaaatagtattacttgcatcaattcttaaggttcgatacaccctgaaatgttaatacaacaaaaccttatgaaatgtgaggcactgcatgggacctgtatgctttcagttcatcattgttatattatctcactcacttgatgaactaatctagcattaaggaggaggattgaaaatgaagtggcaactgactgtattaagtggccatgagctacattgctgtaaaaagcaaaagccatttgtggcccaactgtgactgtcttttttttttttttgctctggaatttctctttctttcttttttttttttttttaattatactttaagttttagggtacatgtgcacaatgtgcaggttagttacatgtgtatacatgtgccatgctggtgcgctgcacccactaactcatcatctagcattaggtatatctcccaatgctatcccttccccctcccccctccccaccacagtccccagagtgtgatattccccttcctgtgtccatgtgatctcattgttcaattcccacctatgagtgagaatatgcggtgtttggttttttgttgttgcgatagtttactgagaatgatggtttccaatttcatccatgtccctacaaaggacatgaactcatcattttttatggctgcatagtattccatggtgtatatgtgccacattttcttaatccagtctatcattgttggacatttggcttggttccaagtctttgctattgtgaataatgccgcaatgaacatacgtgtgcatgtatctttatagcagcatgatttatagtcctttgggtatatacccagtaatgggatggctgggtcaaatggtatttctagttctagatccctgaggaatcgccacactgacttccacaatggttgaactagtttacagtcccacc

SEQ ID NO: 1563265 - DNA, 4001 bp, Homo sapiens
tattgcttttataatcagggggaaaatgaaccaaagaagaagaaaaatgtaaaaatggaataccagtttaaagaaaaccaaattaattcagctaattcctgttgttaaaacttcaaatccagtcctaggacaatatttgcaaagatattaaaggagttaggggccgggtgcggtgtaatcccagcactttgggaggccgaagcaggcggatcacctgaggtcagttcgagaccagcctggccaacatggtgaaaccccgtctctactaaaaatacaaaaattagccaggtatggcggtgcactataattacaagtgacgcctgtaatcccagctactcggaaggctgaggcaggagaatcgcttgaacccgggagggaggcggaggttgcagtgagccaagattgtgccactgcactccagcctgggcgacagaacgagagccggctcaaaccaaaaaaaaaaaaaaaaataggagctaggaatgggagaaaaaatgagaggtctgacgacttagtttgacttagaggcttaacactctgcttgcccatttaaacaagatctcagttaataaactggtcttccctacttagcatacaagccaatctgttttttctaaaagtcttcacctttttgacctggtgaacatcaaagtagattgttatttccatatcttttatacaaccaacacctccacctcctaagtgaaagtgctaaagcacaaacactgaaggctaatactagcttgagaatcgtgttggccttctttaatgacaaaagggttaatgtgtacaccagtcccaaaacaccaacagagaaaagacagtgctttggacaaggaaaagttcgcgaagtccaagaaaactaggaactcacaaactcctagggtgaattcagcaggaaaaagcgctccgatgacttctctgagacctgggacagtctgttttgatttgccttttttcttctcctatttcgcgtgcagttaagaagtaatgatcatcgtcccgtgggactaggcgaaatttaacatccctgaagttaaacccgagcagttgctaataaatgtatgaagtttatgtaaagttgattcgtgctggttttttatgctccaaacttctagatttccctcacttactcggggcagcttccactgacgttatcgcacgggcacaggtacaacttcactgggaactccaggcaactgatttgctctgaaatgttaatcaaaggaaacgtgcgtcaatgtaaaggcaaagcttttcccgtgtggatcaaggcgctcaagagcaaggctcgaaagtctggagagaaccagctacgcgcgttaagtggcaaaaggaaaacagcgcagcaactacttttccgagagtttctccactttgctaagacccatacaaaaccagcggcaagtccagagccggagggagaagagccgggcctcggctgagctttgccagcctaagtcaccctaccccagtccgggaaaggggacgcaggcggctaaacactccgattcaaaagcggggcgggcttggcgccgctccgcaaggaaacttcgctcgggcaacccagggaccataactcggagaacagggctgggctcccgggaagacgccgctcagcactggctggaactagcctgtctacctcctctaagcgccgggctgccaacgccgggcgcggggaagccccatctccgggggtccaagccagcgggattgcgcttcccctgtgtcgctgcgcttagggggtgctccgggggtgggccgggggccagcggcccgccaaggacctgttggggaagggacagcccgtttgcctttacctgtcgccgaggtccggagcggcggagcccgtgtccgccgccggtgggcagcgcgctcggtcggctctggcgtccaggacaccaagttgagtgagcgccccacgtagccggcagagcttcattcacacagcccagccggggaggagggggagcgaagcgggcgcgcggctcatgtgacagggcgcctcgcgagtatcggctcagcccagccagcgtctgcgcgtgcgcgccacgccgagctcacacccggcacctctacccagccgagatgaggggaggcccgccggggaggagctgccaggaggagtttcaacttgcgcagccgcagtacgtcggccccgctcgctgccatatttaatgaggactgggcgggcgggtcctatcccagtgctgggcgtgtcagttgcctttgaaaacgcaatgccccattgtgtttcactatttccagcttgcagtgcctttttttgctggggagaaggtttgtccttagaatgaaactgtctatcctgagctttcggcccacagagtaattagtagtagaaatctaatactaataacattagatcacataatttgagctgcttcttatgtgccaggcactctcctaacccctttacttttttcgtctcatttggtgttcacaataaccccgagggttatttctccatttttactcataaaaatacacaggcacagaaaggttaagtaacttgtctaaactcatataatagtaggaataggaatagtgatcaaacgtagtgatacttttaacagccaacttgatgtttccagcaacgctgcaaaaactatactgcagttgttagtactgtattatctccatattaatcattacaaaacagaggctcagaaaagctgaagtcacaggactagtacgtggtagaactgggaatccaacctaggtctaacttactccaaagcccttaccctaggtttgaaagaaacagcacaccgttttgcagaagagaaaacttaggccaaatggggtgcactgactcacttaagatgatccagctaattagttcttggcagacctgagactggaatccatataatccaagtaatctaactagaaccagggtactctactgcagtgaacaatttggaatgcctactttggacaagctaagtggtcagggatttaaaaacccctatcctagcccaatcagcataaggctaccggggacaaatttgtaatccgacatagtcaggctttgacccattgcaatatgagagactgcacacggtaggcatttcatcaaacagaaaaacatggagtcattataggattggagagaagagtggagtttaggtgaattttaaacaaagcagtgtttttggtaagctcaaagcaaagcagtactgtcatttggggtcaccatcaggtctgaactgcaaagtgaacccagagttgtgtttccttgggaaccacaaaataaagatagatgtggaatgttgtgtccagataccccttatctgaagctctgcacctgggttggaaattgaggctgcttctctgtgtcaaagaaacttatgtcctccagatgcatgtgggatgtttcattcttactgatacgatttcaagcagaaaagtttctgataatctacgattttagagaacaaagtctctcagtgaataaaaaagtggtggtcactgaaataaaaacatcgttaccactttacagctgcaatatgtccgccaaagaaatattgttctctgttaaatttgcatctggttttatctgtgtgttattccggcctgatgaatggccggatttttattttttcagtccaaaatttttttgctttctgagctggtaacattcagtcccttccttcaggcactcatggtgtatgggatagccacaaataactagaaaatatcagtacaggcctctaataaaggtaaatccaagtggaggtaacaccgttggcaaaggtgagcaggcaggaagttatatgtgaggacccgtgagtagtcctatgtggttgaagtttagggtaaggaagtacaggggaattgtggaagataatacccagaaggtaaattggggcccaattttggagcatcctgaatattggactaagatttatacctaattcaaaaagtgactgagaaagaattgaggtttctgagcaaggcaatcctcttttggaatt

SEQ ID NO: 1563266 - DNA, 4001 bp, Homo sapiens
aaaaggaagtgtgcacttgtcatatcacaggtgactctcataatctggataacatgttgaatatgcaactgatgacaaactggtaaattacagatggcagaaattctaaagcccgcctgatgaattgatacatacgatagaaagaatatgtgtatatgttcccaaatggcagaaatcttatgaaaaaacatgaaatgctttatagtgatcaacttttcgagttgtgacaagaaaactcggtggaatcaccaaatatccatggattaagaaggaatttctcaaaacctgtacttgggacaacctgactcctgggttcaggtggtcgtgagaaaaccagtcaggagctggaaaggcttaagaacgaaagtcaatctccacctgactactcaagagatttgcttggttctaagaggaggaaatcatgaacttgggagagaatggggcagcttaaaaaatcacatttcaaatctggagtccaagcagaaatagtaagaaagaaaaaaaaataatacctattgtgggttgaagaagtgactcaccagaggaccacctactgagaatctctggggttggacaactatttttttaataagctctccacgtggcccttatacaaaccagaaattgtgattccctaatttaaatgatacacagcaacaagttaaaggcaaatgaccttggcaagtctctctgagaagttttcacggtacttcaaaaagagaaaagtggggaaattctcttgctaaattcaaaagaacctgtgccatagccataagtaccatctattacctatcacattaagttaatgtccccagtttgaatttaactggtcttgtggttttgttggagttgaaagcataagtttactttggttttatggttgtacaagatcaataatcacaaggagtttactttgtatgcttcagtaaacactagggctctgagatttttttcttttattcctttaacagaaaaccatttacttttcttagttatgaatatcctgcattaaggaaaaaaccataaaagagagattatatgggaaaggaagatctttgacatttattttgccaccttcctccaagtttgttttcacctctcttcagaggcatttatatcccttttagctgtgaggatcctttgcgactatttactatagtaagataaatcactaaatacaattttttaaatttaggataaaaattatgtgcaagcaccaacatggcacatgtatacatatgtaacaaacctgcacgttgtgcacatgtaccctagaacttaaagtataataaaaaaattatgtgcaagatgtcttcaaaaataaatttaaaaatgaaactctatattgccaacagaaaccagattcagtcacatccagggctgaagaaaggaaagaatagaaagaatatgtatcttcaatttcttcccctgtatttcctaacacttacccatgtgccatcttttgtcttacctctcggtgcctatcccggtctcgagacttctctctcacccaatcaattgtattgaaatcatcataggtccctacaccagggattggctcctccaagaagtccatgatcctatttgaagaacctattcctccaccattgtacgacttgtcctctgtattgaacaagaaatagacattagtacttcagaaattcttaacatttttaatacattctttttggttccaaaaggcgggcccttaaactatcagatgactacagttggggttgataaagaaatacagtcacctggtaggaacatccattacattcagaggtttctgtggtgtaggcacaaaatgatgagtggctaaaggcagtgtgaatggaaagcaacagatgagagtgacagtacaaagagagacaggagttgatgtgcaatgggaaaggatttatgaaacaaaagacaaaaaggaggttggagcagcttaggtatttcagtttatggaagggagacaaaagggtcaaaggcacttgcagccatatcacatcaagaaccattttacatttataaggcaataattcaatcctatgaagtggtttttgcctggctggggactccaaataaagcatgtgggcctcttcacgagttaagttggctggaatgtacaaatttcccttcaataggtataagacttgatctctgatgtaacaggcttgtaggaactctaagtatgtcagcacagtctaagatttacaagcagagatttaaagaacagtgtatgattcagtgatgaaatgtccctccctgatccttcaactgcaagaaacatatccacctgcccacccatcatagtcccttatctactttgctttgggtacttctattacaattacttttgtgcatgctttatcttcctttctagactacaagctctttgctggtagcctgatgtctgattcatcgttcccttctctacagtgtctagcacatatccaagaatcagtatatatcagctgaaccaaaatttgtttgatgaacggtgggaatgggggagaaagttttaaactcacaagctatactcacacaaggcttaaacttgattcaaaatatttcagcaacatcatctgatggaataagattttgctattaaacacaaaatacaaaacagtactgaggaatctatgcaaatgcacactggggaaaagtgcagagtaatgccatcatttaattcacccagccaaagctcacatttgcagcaccaaccttggcagggacaaggcttcctccagactgtttggtaatgaatccctctgcagaggaggccaaagtgggcctgagctgactccctctcctcccatctgcatccccatcttcactgtaaactccaaacagacaactttagcaatgtcatggggaaagtttgaaggaacaccccaagctgtacttacaattggtttaccaattgtaagtcttctgaatacctaagtcagcatgcctttcacaggcaaggtgcacatttgaaagaaaaagctctgcagagtccaaatcatctgtagggtgggggcggggtgggggtggagtggaaaaggtgaacaagttaatcttaaaccccaaccaaagtcctttccatatcttcattcgtacctgactgtaaaatggatggctgctgaatcaccagcccagcatttcctatcatgtcagtgtcatactgataaagatgaaagctgatgtgtttcttgagagcttagagggaaaaagccagctaggaaatgagggcagaaagaggataaagtatgtgtgtgtggaggtgggggagggcaagctgtttcaattctcaagtccaatgctgacatgaacacatgacaccaaacaaccagatatttactttttaaggcaggttaatgctccagttgaatttgctctggtttaagagttctcctttcagaaggggaaaaataggattttgtgaaactgattttaaaaatcatctgatagctatctaatgatacactatatatcaaatgaggcccccacctttaaggatattaaggcaaaatgaagatctgcaacagcttctagcaggaaagaaagaatcctattacatcactaggtaacatgagcaccgcatcatcctcctttgtagtctggtttccttagaaacgcaattgtcaggcccctctcaaagagcaggcagtgattagaatcctacaacagactgcttgcaattctccagatcccctgctcccggggggcatgcttcagtccttggtcaggctcaagtctgcttaccttcaatcacagttttctttttttctgcctcaaggaagaaataaccttggcagcccgcatttggtcattcaggttggggagcttttacaaaagaagccccagtctgaagtgctttagaagggcacttgctgcattctctgcctttcacagcaacaaacgccacctaaagaactaccagtgttccctggcggtcagaatgtgatgtcactgttggagtcacgtgaccagacctttggaccagcctgggagaaaggaagatt

SEQ ID NO: 1563267 - DNA, 4001 bp, Homo sapiens
gcagatgaggaagctggtggatttggtgagttcgagcccttgtgacgtgtgttcacatgcagccacatgcattaacagtgaccaggtcacttcccagagagcccctgacctcagtccaaaggtgcagatctgagatagcatcctcacagttttgccaacatttgattccaacagagagcagatccaagctttctgtggcaattggaaagatgaggagaccaaagctcagagtgggcaagggatctgggcaggccccacagccagtgtgtggcagtgctggtgcttgaggcctcgtctcctggcaccttactccagtgctctcccacccacccgatctccctgaatctttgctgctccagtagaacactgtcccctggagagcctccaaacaggtgctggaacagaggcagggaagcaaacaacccgcaggactctgtctgcttgtttttcaaccagaaccaagagagaccccttgttgaggggtgggtattgggggttgctgggtcccagagatgtctaaggtctcttcaagatcattttacctgcagctttctgacctctagtacagaggaggaagttatctagccatgtactttgagccacatgctagcttttgctttggacaggctgctggtggggcaacggctgctgaggtcaccaaggctgaatccaagttccatcaccctgtcaggtaagcttctggcatgaagctccaaacttgacatagatccattagctctttgaatcttcacaaaggtcttgtgaagcaggagaggggaggaattgctatctatgatcgctgtttcataggagagaaaactggagcccagagaggttaagggactttgccaaggctgtcttttctagaggcattgttaacgatgcccaagaatgatcccccatggatgggtcagtgaaataatcctcagtggaaggagatggggccatagggctggagaattcttggctagaagctttctggggtaggtagcaggtggagtcagagccataagtgacagatgctggggctggcccccgacccaaccactataggtccataagggtttaccttcctgcgtggggccactttgtaacaatgcagaaggttctgttacaaaactttctttcttcctttccctctgacctcattgttgcagccaagagaaggggtttaggggccagcttctttcttggccctactggcccctctgcacatatgacacctgttaggggccatgtttcttctctgtccacaggctcttctggcctaaatcccgctccttcgactatctgtacagtgctggggagattttactgcagaactttcctgtccaggcaaccatcaacctatacgaggactcagacagcgaagaagaagaggaagatgaagagcaggaggatgaagaagagaagtaggaggccaatgaaaaggggccagaagggtgtgtgagggtaccagggtccataccctacagcgccacagctcatcccccttcctcacccctaacctatccaaatggaggcagccagagtctgattggggttcagtttgtctggcaagttttcacagacatcagttagccggaagtattagtccagcagatagagctttctggactgaaaattgggtcatctagctgcccagctcaccctggcttacctgaatggcctgtgagctcaggcctcttgcatctcattgtctgggctgctgttgtgttgaccatgggagggttctaggagctctagaaggaaggcttgctgaagcccccaggaagcagagcagggcagggaatgcccttgtggagggaagtagtcattcctcaggccctttgactccctagccttcccaggtggccatgtagtcccgtctctctgtggaaagcctgacttctggcttcaccccaaggaataccaacagcagatccatgcaaggttggggtgcctttttgatgagtcttacaggaagggaaggcagtgtgtagagaatcggcttgctctggggatgcctccccattttgcctgctgtccattgaagtctgtgtgttggcatgagatgaatcaggagaaaaataaactggatggtgttttcctttttcttggaactgtgctgatttcttaactgaactctgcccatattgtgaagccatgggcagaggttcagagaccagctcaaggccaattcattgcttttcctacctgaggtcagttgacaagtttttcttcatggggttgtagggctggagacccagcatggggccaggccctctccatcaatttgtgaaatcagacttgattaaactgcaaggatggcttggaaagggaacaaaaaggtcccaaagggcagcttgtaagttgggagtagggatgcaggttagaggggaaatgtgacaggtgcagcctcatttgagcctcagagatggctgtgtgcatgtggggaggagggctactaggacctagcaatttttttcctcaattccctttatatttaccacagctcagaccctcatgcttacccttgctccaattactcttcgactaaattttttttttttttggcctccagctgtccctttgtgattcatcttccacactgacaaccagattagaccacatcatgactttgccaacacttttgggcttatctttttttttttttttttttttggtcacagatccccttgagaacctgtggcttctctactcagaaaaatacatttgttcacaccacacgcacacacacacacacacagtgctatatcttcacaaatcaagtacttaacttgatattctaggcctttcagttgtctgggttttgcctgtctcttgagactcatctctcaactcttgaagtttacactgcctctctttgaatgtggcatgctttctaacacctctgtgtgtgtccttaaccctgtctggaatgcctttccactttcgcatgcctaggaaactctcattcatctaacagaaccagctcagacacccctgctgtaggaagcctccccagacatcccaggcaccaggttgggtgcccccactcattcagagcctcccctaccatagcatttgcctcctttcctatacagtaacctggggctgtatttgatattcccatatgacttcattgcacagaacactgcctggcacaaaggaggtgctcaggaaatgttgaaagagaaaagattctcaaatcttctgaaagtagctcttggtggaaccaccattgttcccccaacttgctggcttcctggtttagctacaaagggaaaagggtaatgtcatttcattcaggagcaaaacgatgaccatctttcttttccttctccctcagcatgagacaggctgcttcagttctaagccctagctgggacttccctgcattggacacaaccttgagtaagccaccaaactcacacactggtgccatctattggtcaaaatttaaccttgttctttaattaaggcttccaggcagttgacctttgactgcattaattcttttagtccattctgtttctgtttgtaagtaaagtggaatctaccatgtgctagcagtatgaccttgggccagttacttatccactctgagtctcagtctcctcgtctgtaaaatggggctaataatacttcctttcagagttattgtgaggattaaatgatatatgtaaagtacttagcatgccccctggcacatagtacaaaccctcaataaatggtagtagtcataataatagtagtcttagtagctgctattgctgattttataaaggaaatgatcttataggccagagtcagctaatgacgatttactcaactaataactgatttgtcagttatcaccacttgatcttcctggcaccatttgatggtttaccggtaaaagcatcttttcagtgtttattccaaaatgaaaaaaaaaaaagaaagaaagaaaccgcccccccaaaaaaaaaaacaaaacaacaatagaggcgaagtgtggctccctggaccactgtcta

SEQ ID NO: 1563268 - DNA, 4001 bp, Homo sapiens
taaacccctggaggctgggaaagattgaggcactttagaaaaaaaaaaaaaaaggtttggtgggttttctgtgtgtgtttttttttttctgtcaaaaactccactccagctgggcttttgtgtggtgacctctgtgaacccaggagaggccttgtggggagggggatttggcccaagaaggaattcagaacattccagctttgagggtggtgagaggagggggctctgtcccaccaattaggtgtccctggctagcagccctgaagcccagcagggagtaagctgcataaacacagccctggtgagccagtgcccaagcagccctgcatggcctgcagctccatagacttttctactcagcttgattctctggcaggccctcagccctaccccacccctaaggttggtcccaaggctcaagggcaaacatgggtactgtaggttcagactctgagttcaaagagcaggtcctacaaggtggaactgagtaggccagcataaggacagggctctcctttttaccacacatggcagtgccatgcactatgtcatttaagcctctcaaaagtgctgtgaaggccgtgtgcagtggctcacgcctgtaatcccagcactttgggaggccgaggcgggtggatcacctgaggtcaggagttcgaaaacagcctggccaacgcggttaaaccttgtctctactaaaaatacaaaaattagctggatgtggtggtgcgcacctgtagtcccagctacacgggaagctgaggcaggagaatcacttggacccaggaggcggaggttgcaatgagccgagatcataccactgcactccagcctgggtgacagagtgagactccatctcaaaaaagcaaagcaaacaaacaaaaacccaaacaacaacagaaataaaaccaaaccaaaacaaacaaacaaaaaaacatgctgtggagtagtagagcgcagtgactggctttactctcccaacgcaaaaaagctttctagttttttctaagtagaaaaatactagatgctattgaaaagaattcagaaaatgaattataaagaagaaaatagaggtcctcataatgccaccagccagaaataatcattgctaacattttgatgtattgtagaagatatcgatgggatttgttttataaaattgaatcacactatacctacagtttatgtaaccttacatcatttgtaaataacatatcgtggacctatttccatgtcaattaaaacacagaactacatcattctgtcatggctgcactgcattctatcatataaaatatgatttatttaatcgtaaactactagacgttttgttattttcattttcactataacccagcatctttgcacataatactgacaaagtcttaagaatagaattgctaggtgaaagagtgtgcatgttttaaaggccaatacaacatgttacaaaaataagacagccattactatttccagatgaggaaacctcggcccaatgagatgaaaagagttgcccaacatcccaagttgagcagtaatagttagacttggaatctaggtctgtagatatctagcttggcaaactttgcagtgtacaacaccaactccctcccaaggattcccatgtacaaatgataaggccacggttcattgaacacttgctaggtgccaggcactgtgctgaggtgtttcctatccatggtctcactgtgctagtacagagcaaggcctgggtaccaaacctggccacctctagagcttgcctcatagtcattatgcttgactctatttttcaagtcatatcaaagcaaacagtcggatttgttgcctagggtgaactcagtgaagcaaaccagaaatcatcctccttcccaaggcggcccatccctaccttgcaggtacaaatggggcactgatcccctggcagtgctcctgagcaagggtctctccagggcactccctcttggcaggctgggacacgctaaaagggcagccatgcctgagctcaggcctggggagtctttgggcatgaaagcaagcaaggctgaaggggtgggagggataccaggctaatcctctaaccaactatgtgacctcaggcaagcctctccattttcttttcccaggcttcacccagccgaattcccaaggctgggtgaatgaatgtgaatgcattttgacaagtagaaaatgctgattgaatgcagaatgtagtagaggggcaccttatcagttcatagtgactgtgcaattgaggataggaaaaggcagaatcttaggggcaggtgccagggcggatgaggagactgtgttggcaggatgtggtttccagattggcaatcattcaaggactgggttctaacactgtgtttccttcaggtcggcattgtcagatcctggtggaatcatgccaaatactatgactcctcagtgttgagcctaggaggttctttagtaatccttctgccaagacccctgctgagatccaaagagcttagatgggtgcgggaatggagagggggctgaaagaacaggaaagaatagcagtctgagaaaagcagcatttagttcaggagacaagtgagtagggagagaataaagggagggaaataagagtatgggaagaggtggtttgggggaagagaaaaggagaagagagaaaaagggtctttgaggaagaaaatcaaagagagctctgtagaaagcaaggtcttgaagggcagggaggaaatgatgctatgaaaagaggagtctagaaggagaagtaagagactctaaggaagagggtgtagggatggactctgggagaaggagttagggtctagggcagagagagacttagagacatttcaccctcactgttccaccaaaagaagttcttgtcacagttaccaatgaccgcatgtcaccaaatccaatggccactttttagtccttaatttccatgacctctatgcaacattcaatgcccttgataaccttgtcttccttgaaatactttctcctcttggcctctgtgataacaacactcctctggtttccctcttatctttctgggtacttcttcattggtacctctgcctctgccagacccttaaatatgggcacttctcaggagcctgacctaagtcctcgttcctcactctgcattcccattctgggaagtctcatttatcctctgtggtttcagttatcctctatcatctgacgacttccaaatcatcattttcagcccagacttctctgggcttcagacctttatatactggcatctccatttggatagctgaaagttgtctcaaatgcaacatgtccagggtcttgctctgttgcctggactggaatgcaagtggcatgatcacagctcacaataaccttgaactcctggactgaagggatcctcctgccttagccttccaagtagctgagactacaagcatgtgccgccacgcccagctaatttttataatttttttgtagagatggggtctcactatattgcacaggttagtctcaaactcctaggctcaagccagcctcctgcttcagcccctcaaagcgctgggattacaggtgtgagccactatgcccagcctcaaaattgtatccttgatttccctttgaactgaaatcagtcctccttcagtcttctccctttgagaaagccaattgtttaagccagaaacctcagagttagccttaattccactttctctgaccctcattgtatcagacctgtaaatctttcccattctacctccaaaatttagcttttttgtccatctgctggtttcgacttccactccccttagcatcatctctcaccgggatgcaatacccttctgattttcctatttctccttttggctttctacagtccattctccacatagtagtatgatttggcccctacctagctctccaaactggttttgtactactctcctcactccccactctcccgactggcttcctttcagtttctcaagcctacaatgctc

SEQ ID NO: 1563269 - DNA, 4001 bp, Homo sapiens
gtcaagaaaatgccattactgaggcttggaatctctagagtctgacttggcatagcagcatgcccaggcaggaggaagaacaagttattggagcttattcaagtgatagaaatggccccatggagggggggttcagctttccaccagagttaggaagaccagctaaatggcgaatggttgggtggtgagacaggctggattcagccaggtttttgtttgtctgatgagcagtagaggtgagggcagacagggtcctggtgttagaatcaaaagatctagcttcttgttgtgtcagttctgcctagaacctgctgaggaagtcctatagcttctctaggccctagtttgtcatctccaagatttttagtctcaaataaaggcatggggacaggaagccactttgacaaatatagaagactgaagagctgttattagaagcagccagttttaatagaagcctctctttgagggatcctcctagaagtcaagtactggctgcgttggaggtacagaggactctaggccttgtcagctgaatttgtcttctgggcatagggccaacatactccatggcccaaggactgggcaagaaagtttaacttaggatccttacttaatcttccctagtggggagattggagctgcaggagaggattaggagggtcaagattgaccgcagctcctgacttaaccccttctcacctaggtactttccctgctattctccccatctcttgctccaagagtcttgtgcatggtactctttctttggcagtaccctcctaagactacatgggacagggcacttggggttcccaggctcaaggaaggaactgatgtggccttctgggggtgatgatggccaccacagccctcttctgtcagtcagcctcatttctatatcccttgatctcactgcccctcataagaatctgagacacttgcccccttctctgaaactcacttccagctgccaagggcactagtaggtggcaaagccattcccttgaggccctactttcttgaaagtttgtccttagagcagttcatctttccttctacatcaattgattgatggcagttcagagaattgcaactggattgagagattttcttattgtttgaaaaagaagttgatttttgtcctgatcatcaaagtaaagcattctcactttagaacactggaaaacacagaaaggcagaatttagaaaacaaaaatcgcctacgatctccccggccataagtgctgtgaatgttttggttccaactgcattttcaaagagggcacttgaagagagtaatacctcagtcgaaagaaggaatttctaatgacagacttgcagaccagtgagggagagtccttgaaggacctcatggggaaactttatgacttcacttaggaacccaccttctgctacctccctgagccttcatgccaaggagggcactggagctggctgtgagggagtgccccttctgccactcctcagtcccctacacttaggcagaggggtaaactgtggctcccttcctccaatttttatcccagtccttttaagcccccaaaccagaaaatatctgatttggagagtgctttctctggtcctgaagttttaaagatttgaacctttgtgatagctttgagggaacaaataccaccaacccaaatgccaccggagtttcccctcccatacccttcactcagaaacccaaggtggcccagcctggctccaccatggggtgaatggatagtgactaggaaggaagagtgcccacctcggtgaatttaaaaggcagcaactatatcaggatggagatacttacagggcagttctttgcagagccttggagggggagatgcccctggagagggagaaagggatcctgagggaggggagcgaagtacaaggggccacgggctgaggtgataaaggatttctaatcgttaaccacagctttgcaaaatccatctgcaaatctgagccgtgggtcagagacttattacagatcagaattaaacccctggaggctgggaaagattgaggcactttagaaaaaaaaaaaaaaaggtttggtgggttttctgtgtgtgtttttttttttctgtcaaaaactccactccagctgggcttttgtgtggtgacctctgtgaacccaggagaggccttgtggggagggggatttggcccaagaaggaattcagaacattccagctttgagggtggtgagaggagggggctctgtcccaccaattaggtgtccctggctagcagccctgaagcccagcagggagtaagctgcataaacacagccctggtgagccagtgcccaagcagccctgcatggcctgcagctccatagacttttctactcagcttgattctctggcaggccctcagccctaccccacccctaaggttggtcccaaggctcaagggcaaacatgggtactgtaggttcagactctgagttcaaagagcaggtcctacaaggtggaactgagtaggccagcataaggacagggctctcctttttaccacacatggcagtgccatgcactatgtcatttaagcctctcaaaagtgctgtgaaggccgtgtgcagtggctcacgcctgtaatcccagcactttgggaggccgaggcgggtggatcacctgaggtcaggagttcgaaaacagcctggccaacgcggttaaaccttgtctctactaaaaatacaaaaattagctggatgtggtggtgcgcacctgtagtcccagctacacgggaagctgaggcaggagaatcacttggacccaggaggcggaggttgcaatgagccgagatcataccactgcactccagcctgggtgacagagtgagactccatctcaaaaaagcaaagcaaacaaacaaaaacccaaacaacaacagaaataaaaccaaaccaaaacaaacaaacaaaaaaacatgctgtggagtagtagagcgcagtgactggctttactctcccaacgcaaaaaagctttctagttttttctaagtagaaaaatactagatgctattgaaaagaattcagaaaatgaattataaagaagaaaatagaggtcctcataatgccaccagccagaaataatcattgctaacattttgatgtattgtagaagatatcgatgggatttgttttataaaattgaatcacactatacctacagtttatgtaaccttacatcatttgtaaataacatatcgtggacctatttccatgtcaattaaaacacagaactacatcattctgtcatggctgcactgcattctatcatataaaatatgatttatttaatcgtaaactactagacgttttgttattttcattttcactataacccagcatctttgcacataatactgacaaagtcttaagaatagaattgctaggtgaaagagtgtgcatgttttaaaggccaatacaacatgttacaaaaataagacagccattactatttccagatgaggaaacctcggcccaatgagatgaaaagagttgcccaacatcccaagttgagcagtaatagttagacttggaatctaggtctgtagatatctagcttggcaaactttgcagtgtacaacaccaactccctcccaaggattcccatgtacaaatgataaggccacggttcattgaacacttgctaggtgccaggcactgtgctgaggtgtttcctatccatggtctcactgtgctagtacagagcaaggcctgggtaccaaacctggccacctctagagcttgcctcatagtcattatgcttgactctatttttcaagtcatatcaaagcaaacagtcggatttgttgcctagggtgaactcagtgaagcaaaccagaaatcatcctccttcccaaggcggcccatccctaccttgcaggtacaaatggggcactgatcccctggcagtgctcctgagcaagggtctctccagggcactccctcttggcaggctgggacacgctaa

SEQ ID NO: 1563270 - DNA, 4001 bp, Homo sapiens
aagtactcaataaattattggttcctttgaaagttattatttaattcaacattttctcatccatgtgtgacttgctaaagtttcctgtccagattaccacccaaatatgaaaagtctatgaagataaacacataggtgaaagccaacaattgatttcaggagtctaattgagttgaatgaacagttcagacaaagggaacactttagttacccagtgaagagacattacttctgatttggaattggtaaatgtaaaaagccagttaggaaattacagctcatttatatcctatctgagcagttatatgttttgctacaacccagagatagaagaagtcgctcttatgcccgatagtttagcaaacacttaattgcattacctagcactgcaggaattcaagggtctttctcttacaattttgaaaagacaggttgatgatgtccttggtgtatatatgtgacaagctgttaaataatctaactggctgtaaaagcattacttttgccaataggtatttaacttaacatttggtaagtatatcttattttatgtctttgtaagccatcagggagctgtatagttttagaggcaagttacttaaactttaatgccttagtttacctatctagaaatgatgagaacaacattataatattgtaataactaaaagttgtaatgaagtagtaataactactactatcactactactactgatgatgctagtactatacaagcaccattaataacaacctatctcctaagttgttaggactaaattaggtaacatatgtaaagtatttagaaaagagccaggcacaatatgagtttgttattgttcttattatcctgaatactatccaatagtcagtgaaaataaagggaaaagctacacagttaatgtaagcgaggatttagtaagctgtttaatttctactgggaataacccatataaatttttctttcttgatgagctaatttggaaacacatgttcctttctcttgatttaggggttttccaaagtgcttttctgaaaagttgacatgttaaaaaaaaaaaaaaacaactccatggcagaccaaaaagaagaagcagagcattctaaaatgtccccctcctcacataacaagcacacagactcctgttttttttctcccagtgtccatgtgaccctgctgtgatgtttgtccattgtagaagtttagaaagttctgtctaggctatgtgtgggaatggagttctcaggtcattctcggccctctcctccacccagtcaggccttccaaaacctatctcataaaacacagattttgagacttggaaagcccttaaggatcatcttgtcatgctccttcattgtatagatggagaaaaaaaagtctggagagaaggagggatttttctaaggttatataggaagccattaagaatataatttagtcgctcactacaaaccagtctagtgcttttccaccatatcaccttgcctttttcagaagagatctgttttcctgttgtcatctaagaacagtcacacacccgggcattcttctagaactcagagtaggaaaataatcacaacattctttcctatctctagcccaaatgtggagaatttttaaagacattggacttcagtgtcaaaaactaatatattctacatgcagttattataactggaaaacttacctttacaaaaagctcaatctcagggtccacttgagtgccgggccgcaggcctgacatctttgtctttactgccagttgtcagcctcctgcctcctgtagagtccacaatacttgtagactcttttctcaattttatccaaagactcaagtaatgttggtgctttaagaagaccgtctagcttgtagtggactgagtcagacctggagccagtctcttctctcaagaggtgtgacgcagaaaattctagatgcttaagtgcagctcttgaaatcgttttccttcttcctcgtgatctaacatttaaatcaaggaggagccaaaggggtgtgtataaactgcctggctagaagggtgggggtgtttccagagaggcttcaatgccatgagtcagcacaggagaaacacatgcacagaaacacacacatgcagtgctagtttctatatatcaagcagaccagatgttttctagagcctccctttgagacctgggctccatgcccagaaaagggcctcttattggtgttcctgtaacttgaaagcacttccaggaaaagggccagaaatgacttggatttttattattgaaaaggatgtttatccagtgatactgtctaaaagagggttaaaaaattgtacttcattaaatgtttccacccccaatcctactgctcacacagccagatttctgttctgggttgcaaatttcacttctctctacaaccagggaatgttcactggggtggttgagtctgggggcttgtttagtgtgccccacctagttctttatttcttggaagcttggactggaacagatcacttccttgttttggcgtctgtatcaggaaccatgattagttctgtatttctgcttgtcaaccctgggaacagcagtaaaaccagtcaaactgaatgtctctgtgagatcactctgtgtctgcaatgtttctgacagctgtatctgatgcctccaggggctgggagggggaccccgggattaacaaacctctttggtgggaagagtctcttcctgcttggagccaaactgaacatagatccatcagttgggcaccactgtgatcccctttctataacaccaagcattccccatgctcatatgggctgtacatgcacctgccattgccctgtgtaaagatttacaggataagaggctcttgaaaaaacccagcctgctccatacctgtaggttctagggaaggagtggctgatatgtaggtgagtgttcttctggatgagggaaacacctcatgattccccaaatggtttgaaaagtgagaagaaaattgtgctggacatctgctgagccaaccttaatggtgagttttgtactggctatttggcaggacctggtgtctgccttgtttagctatattttcactctattaatcatactctgttcattcactccaaaggcaatcaatgaatgtcaactctgtgccaggatgctgatccattcactgagattggcagcacaggacagccagttcgggaggacaacaggaattcaactttaagcatactcagtctgaggcctcctcacctttccccactccctatatctaactgctacaaaatcttgtcacttctacatcctgaatattttaaaaaatccatccacttctctttgccccatgactactccaaatttcaagccagcaatattcttttttaattgatttaaaaatttttattttaaaagaccaaatggttgcatgaccctcgactctcatgggaaaaccacaacccaccaccaccacagcaacaacaacaaacagcctaatgacctctgtatgatccctaataaattgccaaagtaaggagatgaaagttctctttttttcttgatgctcacagtgtttaaatattgtatttaggataatttacatgccataaaatttgcatatttaaagtgattttataaatttattgggtggtgcaaccatcactacaatctaattttagaacatttgcatcacgtcagtgacatctttcttacccatttgtaatcaatcttcattaccactcccagtattaggcaaccattaatctactttctgtacctatggatttgcctattctaaatatttcatataaatgttgtgttaatccatttttgctttgctataaagaaatacttgaggctgaataatttataaagaaaagaggtttaattggttcatgattctgcaggctgtacagaaagcatggtgccagcatctgcttctggtgagagcctcaggaaggtagagtgggagcatgcatctcacatgatgaaagtgggaggaagagagaa

SEQ ID NO: 1563271 - DNA, 4001 bp, Homo sapiens
caattaataaactcgtccaattacaatgagtgaaattaccaagaacacaggcccaggcctgtgtatgagtcctgagtctgtcacttactagctttgtgaccttggacaagttaacgtctctccacctcagtttcctgaggtgtaaaatgagaattaaagaacatattaatcatgatagtctttatttagcatttcctatatgtttacatatattgactcatttaattttcacaatcttcatagggcgctatgaggtgggcagaattattatcatccccacttaaaggtgaggaaaagaaaggcacagagaagttaggtaacttgctcaaggtcacacagtggggaagttgttgagcttgactccaaatggggcagtttacatgtaccaggcatataaatgcttagtatctagcatataataagcttgccataaatgttaataattttgttctactccagttaaatgcctggagctgtaaaaggcagccatgagcattagaaaagttagtgaacctcattctggaatatgagattgactaccgccgataacaaacaaaaggtatttttcttcttgaaagtgcctaaaggcactatatcccatcaccaaatgttaatgtcataataataagaacagccgttcctgctccatgaggacggggcatactagccacaaacagtaactgaaaataacatatgatataaaattgaaacaagagaaaatttagacaggtccaatgtaactgcacacgaaaattttccaaccttcatcatgatcaaattaattatagaaagatgtgccatgtgatccttacagatcgttaggtaaaaacggaggctgctggcgtgcacattacagatcgttgcactggatggggaccctatgtgtggggagacttgggttggaactgacttgggagaaaagagcaaagcatcaacacttcaagtagcaccttgggaatgttccctttccagtactgccatacctgcctggcttcaaaactacacaaagtagaaaaccaaatcaaagacacgaacacggacgggctgtggaggcggcacggcatatattgtgctttgatttagaatcgctttcaaaatccacgtgtgattcctagacttgtgagttggaagatctgtacttttatccttggcacgtttgacatacctcgaaataaaaattacttttacatatatttttactgtctgatatcatcgagacaaggagacccgaggaaacttgcattctggatacctaatgtgatacatccgaacttgaataaaaactgaagttctccatttccccttccctgtatccaacaaatagctacctaaaagcctttgtagaaagtagcagcagccaagcttaagagtgatactttttcagatacagtataacactgtttctgcaaaaggttactcacatgaatataatgtttcttgggctaattaatccgccttgagaacagctaggctaaaacttccaggtctcccaccctgggccactcaagccaggatcgcgacgtgagcccggggtgagccgaggggcatcccgggccgaggtcactcgaaccgaagttatgaggcgcgggccggcaaccggaagtggtccagggagagttgtacgagattcgggggctgtgacttggaaataaaacaaaataaaataaaaccttaactgttttgggactgactttcaaaagagcgtccccctggctcaagaggccggcgttcgcggagatgtcgtcttaaagggctgtcccccaagcgtgtaggccgcgcacgggtctccttagcgggcgggcaaaatgggcgccggtactcgggaggcgcctgcccaggcgcccgggcgccgctcacagagtacgtccgcctgcggccccagagcgccgcctccctgccgcccccgccgcccggcctgacgcccggaccgcggccggccaccgccctccgccccgacggccacgcctgccccaaaccgcgcgggcgtttcccaggtgctgctgggcgggccccgcccccgtgccccaaggcccgcccccgcgcgccagccgcgcgcccgctgccccctcctcgcccccacagccccgcccccacagccccgcccgctccctaagccccgccccctaggaacccgcgcgccgaaggccaggcctgggcggagcgcacagcgctgggcgctggggaggctgcgccgcagcacccggttggtcaggaccaagtgggcccgaggcggacgtgagaagggtcgggccaagatggcggtgcaggtggtgcaggcggtgcaggcggttcatctcgagtctgacgctttcctcgtttgtctcaaccacgctctgagcacagagaaggaggaagtaatggggctgtgcataggggaggtgagtaggtctgttagcctggatggaaccctgctgagcagtcccagtgtgtccccggggtgggtgccggcagctcccagggctgcggaggccacaggcatcctcgatttaggtccttggacaccctttacatagctctgtcgcggggagccccgtttcttctggccgcctgacacttgtttagtctcctgcgagcccccggcggtctgtacaggccccgggagccttgccctttctcctgtagcctggggcttctctttagatctgcgcttttcgcccggttgaccaaaactgcaaggcaggtcagaaagacactggagtataatgaggatgtccgggtattacgacgcagcagctgaccacagttagagccccttgcctcgcctcgagtcttctgtctagggagcagagatatcaaccaaagcatttgaagggtatcgaagagcctaacagaaggtgcggggcttgaaggaagcaaaagtttccgctgcattgtgttgaggaggggccgaagaggatgaggaaatacagtttagctgtttacagtctaaagtaattctccagtctttcataccatgtgcgtgaacacatgacctaattgtcatataatctgcatccatatatgtcaaacaaacgtaatgtgatcaataatgttttttgctttttcccactctagttgaacgatgatacaaggtaagactgtatttgtttactcatatcttataatctctaagtcattgttaacctaaaattatggcgactttggcagtattgtgtccggatcgtgtcttaaattaattaccattatcactccggggctcccttaatgatacaaccttgaactttggtttctgccttacctcctattcagttgagatatgggataaacatcttaataagcattatcataattgttgcgttttaggggtgagacagagcctcactctgtcgcccaggctggagtgcagtggcgcgatctctgctcactgcaacctccgcctcccaggttcaagcgattctcatacttcagactcccgaatagctgagattacaggtgcccgccaccacacccggctgtcttttttttttgtacagacggggtttcaccatgttggccaggctggtctcgaactcctggctcaagcagtctgcccacctcgacctccccaagtgctggaatttcaggcgtgagccaccacacctggccttgctcagtgtatttcatgttctgtctccccttaaatgccagtgagatatcagtaattttcttagtgacagagagcatatacgtttagaggcatttccccattgatccattccttcacgtaaattgacagtgacattgcctttcctcctgatggacctcagtgatctcagagatccccagtagcttcaatacttgacgtggtgaaacctttcggtaacattttaatttaaacttcaaatcataccatagtatacttctcaagcccacctccttagttcccaggattccaggaatttagctttgtccattataactttatacactcagccacttgtgcatgtgtcccagattgcttctaacagatagagtgcagctctagcctcaattcagtttccctcctcttctttggtctctgc

SEQ ID NO: 1563272 - DNA, 4001 bp, Homo sapiens
cccatgacccctgctccttctgtaccaggaaacagacccgtccctgagcctgactgcctgcacaccctcccctttgccagaaactgccccctcatgctgcttgctggaaacaaggcagtggggctggtgggtctcatgtatacaccctctccaggaaacctcaagtcccaaggctccagctaccatcatgtcaaatcagctcctcctcaaagttacccacctctgaaaggggcctgccctcttcccagtcactcaagctggaagcctggtgtcaaccgtaactccttgtttcctttatcacatccaagcagcctctgccctgagtagattgtccccacaaaaagcgtcaaagttctgtccacccattgccctccaaccccaaggccctggactggtctcaagccttcaacatggctctccaggcctgctgcagtggactccagatggctcagtgttcactggggtctggactggaggtgggcgcatgatcaccagggtttacattacaggtaaagctctcagggggatgtgtccatccccatatcatgagaacagagaaaaaagctaagggtagagctctggggagctgcaaccatgaaagacagctgaggggctgggtgagtgaaggagaatgaggctggggatgtgagaaacatgagggagttcccagggaaggcagaactttcaggaagggagctgtctgcaaggccaatgcccccctcccatatcaggaagataagtgttctatgccgggtacttcttccccctgagatgagagctggagcgggcactgggtggaacaatagaggcctcgctggggaccttatcaagagtagcgtcaaggagtggtggtcaaacagagcttgtttcatgaagtttcaagcgaggagtaggaggggacagacaagagatagagcacatagctcagtctttctaagagactgagcaagaaaaagaggaaagatagagtgggaactggaggaggatagggggctgacaaaggttctctgtcttgctgttgctgttattttctatgtcaagaagataataaagcaagcttaaaggttttgaggaggaattcagtagataataaaaatatgtgtgcttgtgagccactccagttgaggctgaagcccatgaaacatgggtggaatgggaaggttcaggtaccagaggaagtgacaggagacaaatccaggacaatgggaaggggttgctgagaaacaggccacaagacagttgaagggattcactcttgcaaaaccccagtgttctaagtgaaatgggagggatggggggatctcatcttcagagacaccaggcagcagtaggtgcagactttggaggccagaacgtttgcaatagctgctgcaaggacagacaggagataccaaacaagtgcgaggacaagaaaaggcttggcaaggaagatgacagaccatgtacctaccaaagagaacagagatgggcaacagatcttagatgagcagtgggattctcaaggagggtggtttaacaacctagagtaaggcatgattatttggtaaaaagtccaaacacagtcaaggtggagttgtaggcctcttttctccttatccacaagttgagcagccagcccaggactttaaagaaaaaccagcctagtcaaggagtttattgaaagaattttgaggaaaattccttcctagagaagtcaagtcagagagagaaggaacaagttcatcatatagccaagattagaagtttcagttcatggcccattcattcactcatctatctcacacacatccccaagacacctactatgtgccaggtcctttgctgggtgctgagtttagaaagaagtgtctggcagtctcgagctcagtggtggtcccagagtaagagatagacaggaacacgatttatcccaagtcacttctctgtccatgttctattgtgtttctgagcagcatctaacagtttatccacgccatctttcttgaaataatagagtctactcccttcgttctcctcctcctcactggccacttctcagtgttctttgaagaggcctcctcttcttctccaactctaaatgtcggagtgtcccaaactcagtccttcaatggacttcttgtcttttctctcttcatcacctccttctccagtctcatggctttaaatacgtctgtatgttgatgacttgcaaactcttaacaccagttcaacctatcccatggatagtaatttacctccctcacataaccacttggattttgaataggcatctcaggctccatatgtccaaaagtgagttatcttcccctcaaaagcttatccttccataatcatctgcatctcagtaaaggcaaagccatactcccagttactcaggtcacaaacctcagcatcatccttgactcctctttttttcataccccatggactctacatatatgcaaatcatatgggctctaccttcaaaacatacctcttatccaatcactttttatctccaccattaccacgttaatcaaagctaccaccttttctcagtgcctggaacatagtaggtgctcaataaataagttttaaatgagtagtctatgcatggtccctgcatttttcccagtccattactccctctctttttactttcattgcacagcataagattctgctatatcaattatttgattttaaaggaacatgcaacacttttcctcttagccaacatggggtaacagggatcatatttttcctccagaatgaaacaaccaaacatagaaaaaatatgcgacacaacagttttcaagactataaacgttaggcaacaaaggatagctattcctaagagacaggagccaaatgtgaatctggtgactgccccagattactcctttgtgagagtttccagacgatggcacagaggggaatgcaggtggaacttgatggatgactccctgggttagggacacagagaacagaatgaaaggagaccaaagcagctaaagtttgcagaacagggtactgcagaggagagagctgcacagagagagctctggagacctgcaaagagtctgtcccaagtattcatctgagtgcttatttgcacacactgatgagggggttacccacagcttaggaaagaaccatccccccaaattaggcattacagttcccagctctcacacagggcctggaatagtgtctcatgccaccagtcaaactggaaacctagtggttcatgggctattgggtagagtgcctagaaggggcttgcctcactcatgaggaataactggtcctttcactgagcactgttctagtcctactgaaaaatcttaaaagcaagacccaaaaggatcaaactctttccattaacttcacaccagaacaagcctcaagaatgtttctagaaatacaaaaacacacagcacccaacaaagtaaaaatcacaatgtgtggcatccactcagaaattatcagccatgcaaataaattctcaataatgaggaggcaacaatctatcaattgaaataaacccagaattgacacagatgtacaattagtacacaagaatatgaaaacagctaatacaactatattctatatgttcaaaaagttaagcagggccatgaaatatataaaaagatccaagtcaaatttctaaagatgaaaactacaatatttgagatgaaaattacactatatgggattaacagaagatcagatattgcagaagaaggaattagtgaacatacagacaaacttattttaaaatgaatttacagtatttatttagacaataaaactatccacaatgtagcacagagagaaaagacaatcagaaaacaacaatagcagcaacagcaacaacaaaaggcaaagcgtcagtggaaactacaccaaggcatgtgagtatcaaagtgcccacatccactgataatagggaaatcgtaaaagttgcccgagaaagaagacacattatgcactgaatcacaaaagtacagatggca

SEQ ID NO: 1563273 - DNA, 4001 bp, Homo sapiens
tcaattcactcacatttgtactgcttagcagttacaaagcagtttccacatattagaaaagaaaagcaaagtaaatgaggaataaaggggcaagtaagggaataaaaggaaagcaaaataaagaaaaatccacaagaataagcaagcggccaaaaaggctggggaaaagaatgagcaaaaaaaatcagtttctccctgtcactctcaatccctcccaatcacctcacctttcgttctaaattatctggagcttagaaagtctgactgttaagtaagcccaagaaggggctccttcatcgtaggaacgggcattttcagcgataataagcctttggtccctgactgatctacctagagtttgctcaggtatgacctcgagcaaagcgctaacatttcccaagtgtggccacgcatcctttattccattccatcccatccatcccctcttcaattcccaaaatcttagggaagagttgggcctgaggatccaaggggttggtgggtgggggagtcctctacaagccccttaactcagacaacagagggaggtagtgagacaggaaagcccagggatcagaaaaaaagctcacgtttgcgattaggagggtgagtgtctataactgtggttattataaatcgccagggacaaaagggggaaccttcaagatggaagaaatgtgaaggtacctgaatgcgcatcaccttacatctggcgttgagcccttaataaaaagccgtgaggtccaaaacctcgactggcttgaaagggagaaagcagagaaggcaaaggatgcgaggggatgcgctggaggcagcccagagacagcagcaaggatgctgtcccaggggaagcatgatgtcctcaccctcaaagtagcacatacccccaccctgggcatcctcagccaaatctgggtgtggggggatgccaggctccgaatgggggcggccgcgtcctgaccccattatgtgggctaaaagttgcttgggagagttggcgctggggaaggcacctggcaagggcggccgccgagggggcgtcagctttcccaggaacaaaggggccaggaaagggcgaccaggggagcaggtcctgggggagtccaccctgagctgggagataagggtcgccacgtcctcctggcccgggggcagtaaggggagaggggagtacgcaagatgcgccggtattctgcctcccgacttcctgcctccaacggggtggcgcccgctgccctctagctctctggccgctccgcgcccctctagctggagacaaaaggagaccggggaccccaggcccctgccagtcctggaggacccccgccccgacgcgtacgacgatccgccagtggaagccgcggtggcgggctctggcgcggcgggcgccccctcctaacctcgcactggtgccccgcgccccagtgccgcctcaccctccccgcagcgggcattacctttcatccagtccactacttgactcggagaccatttgctcaccggttccattatcagagccatgggtacggggtcggttccgtgcagagcgcagagctcagacacaaaacgaactcagcagcccgagctgctctcaggtggggtcccttgctggccgcagcctccctgggcgggcggcgcggagaaagcggcttttgtgtgtcgggtctcgcggctgtaacgtcttttagccaaccgccggcaggaacggcgacagggaggtaaacgtgcaggagtcgtggctccgcgccgggtctgctcagttcccgctaaggcggcggcggcggcggctgctgctgctgctgctgctgctgctgctgctgctgcctccgccgctccgctccggtctccgtccctagggagcttcagttcatagcttgagttgctgaggggtcgcgtcgccgagggaagcagcctctgccgcacgccctcagccaacttgcccgctcgcctcacgcgcgggagtgaagccccgagcacgactagctgcccggcggaaatgacgaggggcctcctgccacccaaaatatctctccgcagccctcgggtgcggggcgcgcgcgccacgagccccccgcccgctcgctgccgcgcggtcccgcccccagggccgacggcaggcgcgcgaggcgcgtgcgcgtgcgcgtgccggcacgaggccggagcccagggtctgtctggcaggcagacaggtgccagcagctcgcagcctggcgttcccgctctgggggccgtccgggaacagaggcgcgcgaagtgcgcgtgcgcggcggcggaggcggtggcggcgcgaggcagagccagagcccggggtcggtcaatcaggtgcgggcggctggagcatggctttgtgaggcctctgaggggacccggcggtggcggccacggcgggacgggccgcccaccagttgaactccgacagctgaggcggctgaggaggtatccgcggccccaccaccgaggggagggggacaccactgagcgcggggcttacagcgagagcccgggctttcctggctctcgctttcgccctcgccctccccgctgctgagtgggctccggaggtgattcccgagacccgcgtacgcctgcagagacggaggtgtggactgccgtggacgagaacggggctccgcctgccagaagcgcagcgatgatgaggcaggagggctagtgctgtcggatcttccccgggtgatgagcgggtcctgggaagtcaggcgttgaggctgtcacctgccagctgctggttgtggtgatcctgagacaggttctgccccaagtaccattttaaagggctctgtttcaggttttgggccaactcctctaaagtacctattttagagaagtcattttgtgtttgatattcttatatattaataagaaccgaagggcaacaatgggatttaaaatgagtgacaaattgtagacatgatttttcaaaactcattttcttcaaaaaccatacacaggctactatgcaacggttagtaaaatacagtttgcctaatgaggcttcactttaaaagacaaatattcctagagtgtagatgctaactctctgccaccgttataggcgttttctctatcattcttaaataggtccattaagtaaaagaaactttttaaataagcattccagtaatgtcaataggttttgccagttcctatggtaacccattttctctagtccaattttataagatgcagaaatgtcacgttctttaaccggcatgagttgacgacacccttcccccccacacacacacacacaaacagctgaaaccacagtagttaaaatattgtgacgtttttaactgctgatttcaatgctagtgatagcgaacaagtaaaatttaagatggcctgtatttaggcttctttatttttctaactatccaaacttagaagtatatgcagaattttggaaagacatttagaaaattatctagacaagcctacattcagaggacacagatacaacaccttactttcacaatccagatcgtggttgtgacttacaattttttcttggctgaccaggtgtgaaaggtattgtattttggagtgcttacattccagtagagtctaagaacattacatcaatgtttctagaaaagaccgttttcagtgtcagtaattgaaggagtagctttatatatatatatatatatatgtgtgtgtgtgtgtgtatatatatgtgtgtgtatatatatgtatatatgtgtatatatgtatatatagtgtgtatatatgtgtgtatatatgtatatgtatatgtgtatatatgtgtatatatgtatatatgtgtatatatgtgtatatatgtatatatgtgtgtatatatgtatatatgtgtatatatgtgtgtatatatgtatatatgtgtatatatgtatatatgtatatatgtgtatatatgtatatatgtgtatatatgtatatatgtgtatatatatgtgtatatatgtgtatatatgtatatatgtgtatatatgtgtata

SEQ ID NO: 1563274 - DNA, 4001 bp, Homo sapiens
tagttgtcatctggtgcaaatttgttaaaagtaacatcaaaaaacatatatatatttaatcaaacatctacaaaatctttgtccctgggccaaatgccagaaacagagggcaccaagaagatgtttttaaaatgaactattttcaacagcacaattgcagttttatccaagtctgtagccctattgactggctaaaccttacccccattaagatgctctgcatcaaaaaagcatttttaaatcatttgtctactttgatggaagaaaattatggcatgcatagtaaaaatatttgatatgcatggtttttcagcaaatttgctattataattatgttgtgctcagagtaatatgaaagttagttttcatacaccgggtacacaccttcagaaggatagaaagaggacatgtgatttgaggcatgctaagtgctatagggaagctagacagctaacttaaaagtggacccagatgagctgtaacatagcagctgcttacaaagaattgacggtcactcaaccatgtgaaggcctaagccatgatctcatattaaacagtttttaaaactatccataatgatcactcaaataaatttaaataatttgtcacacacttattcttcagaggttatatgaaattaaagatgatgggcttcaggctggagaacattttctctcacaaagccattcatttttttaacatctggccctcatccccaataggacagtgggtgggactacccagatacccttctaagagatatactgaggtttgaattctacattcctaaaactgaatggagctttttgctgctatttcacatgtacctcctcccccactttcctttaaactggaacactgattctcctttgaaaaaggagtattttcctttgaataggtgatgggcaaattctcaatttgttcagatgccttggtaggtttaaaaaaaagtaaacaaacaaaaaaacccataatttagaaaaaacaacaacaacaaaaagacgcaaaagacctgaagcctgagactttacctcactcttcttggtatgttgccttagcatttcatttgtaacaaggatgtcaaaagggaaaaggaggtcagtggcttgaatgacctgaggtgggggtaggttcctgttgcttaaggaaagagcaaaggggacgaacttcactgaggcgctaaaaacactttgatggaagctggattttcgaagagccaaaatattaaactacagacaaaattcaaagagtgggctgggtacaagtagtgaaaaggttagtcgccaggcagggaaacacccgacggtggagggaggggaggaaaagttttaaatacccaccacagcctagtgagcctttaattagcgtcccccacttctgactttgctcttgcccccggaggagctagctgcagggaagcaagcagccctatttttaagcacttaaacctctccgttggacttcagaaggcttgagttaccggtgttgcaaataacgtttcttcctaaacatgagaaagcaaatttgaattccctagtcaacgccaaaaggaagataaagggaccccccccccaaaaaaaaggtaatttcagcgtgaaagagcggtgatgggcgcgggggaggggaggaaggacttaccgcagcctctgcaggctgcccccaaagactcagggccagtaagaacaagccggcagccaggctgactccacgcagtttcattcttctccggctcccgcagctccttcagcacccgcacgaaattcccggctggctctaaccaattgacataatcttgagggtttatatggagagagctagagccggagagggacagtgaggcttgggtgaagagaaagaagctttttaagagtggaagaaaaaaaaaagaagaagaagaaggagctactcttccttcccccctcccctccccaaagccggtctctcaggagaacttttcccttctgtccagacttgcaaactttttcttcactcaattcctacagatctactttcctccctctcttccccgtgcaaggcccccctcctcaccagcacaagggaatttgagtatcactccgccacagttttagactgcaccggcaacctgcgagggagtgacgctcagttatttgggggagggaaacttccagactagttgactgagcaccatgagtccaaccgggaagcttttctattcgttcatttgcaccttccgttgatactacttttctaggctcagttccaatctcattggtgtgcgtaccaaagccaattacaaatagatctaaactgggactatttttttagcggatggatctcagaggggccgtgctttttattgttactcattagaaacaaattttggtcggtgctccctgggctgctggtcttctttaccttccagctgctcacagaacagagagtttctacatacaagcagaagatgtgaaaatattgggaataaataaagtatatgcttataaacaagtaagaaaataagtatatgtgcgtgaatactttatgtgtgttatatacgtataagatctgggagcattcagcaggtattggtaattattctatggtattatgttattataatacagctatatctctgtttagctgcattgaatcctataattaatgcctcctatattgagctaatgtaaaaggtattgactctcattgtagttgtgtttcagaaagatttagggcagggaattaaataaatttagtgcagtgtttcttagaattaatataaacacttaattggaaatatttaaatagagttgatggcagctgaatcgatatctcccatataaagacttgaatgttcctttgataattctgatatatagattttttttaaagtaacaaaagaactagaaaatactttctgcggactccttggagaatcttcaagaatttgatgaagaattcttcacaacatttctatcttcctagaattaaccactttagagtctttcaaggttttggatctatttcacgagggcccactcatccttaggttctgcttagctcagagtggatttacaactccagaaactgtctccccttcccaatagcctagtgtactatcaatttgaatcagtgttgtatgcatttgggcatgtgtgcaagggcactttcgggcccatctgtcttatgtgggaatagtatgcctatgtctctttatgtgtaacctaacagtaaagttgaaagtatatgatgcacagttgcttaggtcttagcgtataggtctctaaggggctgtgtgtgaagctgtggagatacttagggctgttgtgtggaaaggtgcctgaaagtgagaaagactaccggctgcccaaggtaggggggatgattgacagcagacagccccgcccctttcccctccattctttcctctcctgctgcatggaactatctcctgagtgctgcaagttgtaacgggcaccgctgagcctgtttccctttggagcacttcttatctagaagcagtgtttagtttcttccaaactgggccacttcgtccacctactctgttctgagtaaggaaacagcctccaagcatcagcagagcccagatgagcacgggccgcggagccgcttagcagtctcccgggacccagctccggaggagccgcaagcatgcaccctgggtgagctgttgctgccccgagctcccctcctctttcttacttcgggttactttgccaggccgggactatactggtacttctgtcactgcagagaaattgggagcaggcatccaaaagggttcggggggcgacaggcagacgcacgaccccgaagcctagagagcccattactcaccctccctcccatttcaggttgtggctgctcctggttacgttgtgcctgaccgaggaactggcagcagcggtgagtctcttctcacgacccttttccgtccccctcctttgaccctctaaccatccccatctctagtatttatgttagggggttgcagagagtttcac

SEQ ID NO: 1563275 - DNA, 4001 bp, Homo sapiens
gatctgtagtgtttttcccaaaagtacactgaataaaatcagccagagtctaaaaataaaagttttgcttgagggtattctgcccatgcatgacacttttacaagtggcaagattcctggatgaattgttaactaatcaaatcttggcattttcaattaatgtagttattgagcctcaaggtaatacataactaaacttgtatattgaaggaataagatggagaagtacacagagtcttagatcaatatctttgcttacgaagtccagaatttacttacataggaactgatattgagttaaggggtcacaagatgttggtattcaagttttctggcatcttcctctctttacaagaaaaatagcttcactctggtattttcttaaagacatcatatgccaagataaaataatccattttttcataaacacattgggtgatttattaggttgaattacgtatggccctataatagtatttaaaaatatttaaaatattaaaaagcagagccaatcagttaaaatgatcaaaacccacaagataaatatttggaatatatattcatctctcatctatatagggaatggctttgggtatcattaagaatttttaaaaaaaatacagcagtgaaatagtactcaacaattgaacaacttcgtattcaaactcaacagtttttatttctgccagcttaagtagctagtgaaactggaaaactgcagcatctttgattatttgggtcactccatctttgtgaaattatcctagtaattccactggagatttcaatactttctgggacccattaaacttttcttgaccaaaagtcttcagaaatttctttacctgcagtccctagttgatttgatagatgacatctaaacagcctatgaaatgttaactttgatttttttttctattataacagctttatcttttaactttctggtgatgcagaaacgagtaacacgacacatcagacagaaattgaacatcacctagtggtatcagttcaattcaggtagttaaagaatccagatgttgtcacctggtactgtcaaacgactctaagcatgtacttaagtttcatttccatagcatctgcggcactttgaagttccactccttgtgctctcctcccactctcaaactagtgtgccaattcaagttcttgaagaccagggaaaattatgtttcttctgccgtggagattgatgctagtcatcttaagtcgtctggggaagaggctcagaaatgtgtgcatcttgtgtcttccacttttattttcccaacccgttacgaagttttggaagatatcttggtcccaaaaacactgacttgacactgtgctattcctctcaagaatctcattaactcccattagaaaggggagtggtgtggactccgtctcgtggtgaaactctctgcaaccccctaacataaatactagagatggggatggttagagggtcaaaggagggggacggaaaagggtcgtgagaagagactcaccgctgctgccagttcctcggtcaggcacaacgtaaccaggagcagccacaacctgaaatgggagggagggtgagtaatgggctctctaggcttcggggtcgtgcgtctgcctgtcgccccccgaacccttttggatgcctgctcccaatttctctgcagtgacagaagtaccagtatagtcccggcctggcaaagtaacccgaagtaagaaagaggaggggagctcggggcagcaacagctcacccagggtgcatgcttgcggctcctccggagctgggtcccgggagactgctaagcggctccgcggcccgtgctcatctgggctctgctgatgcttggaggctgtttccttactcagaacagagtaggtggacgaagtggcccagtttggaagaaactaaacactgcttctagataagaagtgctccaaagggaaacaggctcagcggtgcccgttacaacttgcagcactcaggagatagttccatgcagcaggagaggaaagaatggaggggaaaggggcggggctgtctgctgtcaatcatcccccctaccttgggcagccggtagtctttctcactttcaggcacctttccacacaacagccctaagtatctccacagcttcacacacagccccttagagacctatacgctaagacctaagcaactgtgcatcatatactttcaactttactgttaggttacacataaagagacataggcatactattcccacataagacagatgggcccgaaagtgcccttgcacacatgcccaaatgcatacaacactgattcaaattgatagtacactaggctattgggaaggggagacagtttctggagttgtaaatccactctgagctaagcagaacctaaggatgagtgggccctcgtgaaatagatccaaaaccttgaaagactctaaagtggttaattctaggaagatagaaatgttgtgaagaattcttcatcaaattcttgaagattctccaaggagtccgcagaaagtattttctagttcttttgttactttaaaaaaaatctatatatcagaattatcaaaggaacattcaagtctttatatgggagatatcgattcagctgccatcaactctatttaaatatttccaattaagtgtttatattaattctaagaaacactgcactaaatttatttaattccctgccctaaatctttctgaaacacaactacaatgagagtcaataccttttacattagctcaatataggaggcattaattataggattcaatgcagctaaacagagatatagctgtattataataacataataccatagaataattaccaatacctgctgaatgctcccagatcttatacgtatataacacacataaagtattcacgcacatatacttattttcttacttgtttataagcatatactttatttattcccaatattttcacatcttctgcttgtatgtagaaactctctgttctgtgagcagctggaaggtaaagaagaccagcagcccagggagcaccgaccaaaatttgtttctaatgagtaacaataaaaagcacggcccctctgagatccatccgctaaaaaaatagtcccagtttagatctatttgtaattggctttggtacgcacaccaatgagattggaactgagcctagaaaagtagtatcaacggaaggtgcaaatgaacgaatagaaaagcttcccggttggactcatggtgctcagtcaactagtctggaagtttccctcccccaaataactgagcgtcactccctcgcaggttgccggtgcagtctaaaactgtggcggagtgatactcaaattcccttgtgctggtgaggaggggggccttgcacggggaagagagggaggaaagtagatctgtaggaattgagtgaagaaaaagtttgcaagtctggacagaagggaaaagttctcctgagagaccggctttggggaggggaggggggaaggaagagtagctccttcttcttcttcttttttttttcttccactcttaaaaagcttctttctcttcacccaagcctcactgtccctctccggctctagctctctccatataaaccctcaagattatgtcaattggttagagccagccgggaatttcgtgcgggtgctgaaggagctgcgggagccggagaagaatgaaactgcgtggagtcagcctggctgccggcttgttcttactggccctgagtctttgggggcagcctgcagaggctgcggtaagtccttcctcccctcccccgcgcccatcaccgctctttcacgctgaaattaccttttttttggggggggggtccctttatcttccttttggcgttgactagggaattcaaatttgctttctcatgtttaggaagaaacgttatttgcaacaccggtaactcaagccttctgaagtccaacggagaggtttaagtgcttaaaaatagggctgcttgcttccc

SEQ ID NO: 1563276 - DNA, 4001 bp, Homo sapiens
taagcatgtacttaagtttcatttccatagcatctgcggcactttgaagttccactccttgtgctctcctcccactctcaaactagtgtgccaattcaagttcttgaagaccagggaaaattatgtttcttctgccgtggagattgatgctagtcatcttaagtcgtctggggaagaggctcagaaatgtgtgcatcttgtgtcttccacttttattttcccaacccgttacgaagttttggaagatatcttggtcccaaaaacactgacttgacactgtgctattcctctcaagaatctcattaactcccattagaaaggggagtggtgtggactccgtctcgtggtgaaactctctgcaaccccctaacataaatactagagatggggatggttagagggtcaaaggagggggacggaaaagggtcgtgagaagagactcaccgctgctgccagttcctcggtcaggcacaacgtaaccaggagcagccacaacctgaaatgggagggagggtgagtaatgggctctctaggcttcggggtcgtgcgtctgcctgtcgccccccgaacccttttggatgcctgctcccaatttctctgcagtgacagaagtaccagtatagtcccggcctggcaaagtaacccgaagtaagaaagaggaggggagctcggggcagcaacagctcacccagggtgcatgcttgcggctcctccggagctgggtcccgggagactgctaagcggctccgcggcccgtgctcatctgggctctgctgatgcttggaggctgtttccttactcagaacagagtaggtggacgaagtggcccagtttggaagaaactaaacactgcttctagataagaagtgctccaaagggaaacaggctcagcggtgcccgttacaacttgcagcactcaggagatagttccatgcagcaggagaggaaagaatggaggggaaaggggcggggctgtctgctgtcaatcatcccccctaccttgggcagccggtagtctttctcactttcaggcacctttccacacaacagccctaagtatctccacagcttcacacacagccccttagagacctatacgctaagacctaagcaactgtgcatcatatactttcaactttactgttaggttacacataaagagacataggcatactattcccacataagacagatgggcccgaaagtgcccttgcacacatgcccaaatgcatacaacactgattcaaattgatagtacactaggctattgggaaggggagacagtttctggagttgtaaatccactctgagctaagcagaacctaaggatgagtgggccctcgtgaaatagatccaaaaccttgaaagactctaaagtggttaattctaggaagatagaaatgttgtgaagaattcttcatcaaattcttgaagattctccaaggagtccgcagaaagtattttctagttcttttgttactttaaaaaaaatctatatatcagaattatcaaaggaacattcaagtctttatatgggagatatcgattcagctgccatcaactctatttaaatatttccaattaagtgtttatattaattctaagaaacactgcactaaatttatttaattccctgccctaaatctttctgaaacacaactacaatgagagtcaataccttttacattagctcaatataggaggcattaattataggattcaatgcagctaaacagagatatagctgtattataataacataataccatagaataattaccaatacctgctgaatgctcccagatcttatacgtatataacacacataaagtattcacgcacatatacttattttcttacttgtttataagcatatactttatttattcccaatattttcacatcttctgcttgtatgtagaaactctctgttctgtgagcagctggaaggtaaagaagaccagcagcccagggagcaccgaccaaaatttgtttctaatgagtaacaataaaaagcacggcccctctgagatccatccgctaaaaaaatagtcccagtttagatctatttgtaattggctttggtacgcacaccaatgagattggaactgagcctagaaaagtagtatcaacggaaggtgcaaatgaacgaatagaaaagcttcccggttggactcatggtgctcagtcaactagtctggaagtttccctcccccaaataactgagcgtcactccctcgcaggttgccggtgcagtctaaaactgtggcggagtgatactcaaattcccttgtgctggtgaggaggggggccttgcacggggaagagagggaggaaagtagatctgtaggaattgagtgaagaaaaagtttgcaagtctggacagaagggaaaagttctcctgagagaccggctttggggaggggaggggggaaggaagagtagctccttcttcttcttcttttttttttcttccactcttaaaaagcttctttctcttcacccaagcctcactgtccctctccggctctagctctctccatataaaccctcaagattatgtcaattggttagagccagccgggaatttcgtgcgggtgctgaaggagctgcgggagccggagaagaatgaaactgcgtggagtcagcctggctgccggcttgttcttactggccctgagtctttgggggcagcctgcagaggctgcggtaagtccttcctcccctcccccgcgcccatcaccgctctttcacgctgaaattaccttttttttggggggggggtccctttatcttccttttggcgttgactagggaattcaaatttgctttctcatgtttaggaagaaacgttatttgcaacaccggtaactcaagccttctgaagtccaacggagaggtttaagtgcttaaaaatagggctgcttgcttccctgcagctagctcctccgggggcaagagcaaagtcagaagtgggggacgctaattaaaggctcactaggctgtggtgggtatttaaaacttttcctcccctccctccaccgtcgggtgtttccctgcctggcgactaaccttttcactacttgtacccagcccactctttgaattttgtctgtagtttaatattttggctcttcgaaaatccagcttccatcaaagtgtttttagcgcctcagtgaagttcgtcccctttgctctttccttaagcaacaggaacctacccccacctcaggtcattcaagccactgacctccttttcccttttgacatccttgttacaaatgaaatgctaaggcaacataccaagaagagtgaggtaaagtctcaggcttcaggtcttttgcgtctttttgttgttgttgttttttctaaattatgggtttttttgtttgtttacttttttttaaacctaccaaggcatctgaacaaattgagaatttgcccatcacctattcaaaggaaaatactcctttttcaaaggagaatcagtgttccagtttaaaggaaagtgggggaggaggtacatgtgaaatagcagcaaaaagctccattcagttttaggaatgtagaattcaaacctcagtatatctcttagaagggtatctgggtagtcccacccactgtcctattggggatgagggccagatgttaaaaaaatgaatggctttgtgagagaaaatgttctccagcctgaagcccatcatctttaatttcatataacctctgaagaataagtgtgtgacaaattatttaaatttatttgagtgatcattatggatagttttaaaaactgtttaatatgagatcatggcttaggccttcacatggttgagtgaccgtcaattctttgtaagcagctgctatgttacagctcatctgggtccacttttaagttagctgtctagcttccctatagcacttagcatgcctcaaatcacatgtcctctttctatccttctgaaggtgtgtacccggtgtatgaaaactaactttcatattac

SEQ ID NO: 1563277 - DNA, 4001 bp, Homo sapiens
gctgtttttttttttcttcctgtccaatttaaggggcaggttcttatcgttttaaagagcctccaaaggtacttacatatataatgaaaagctagggagcctgaggcaggagaatcacttgaacctaggagacggagattgcagtgaaccaagattgagccactgcactccagcctgggcaacaagagcgaaactttgtctcaaaaaaaaaaaaaagaaactgcaatgttgcccattcactagcaatgaatatttctacatggtacaatgggttacttcatgatagttattagaccattatcagatcttctaactgtcttacatagctttcccttttcatcttttagtcacaccgggataggcaaatttacaaatatttcataatatattctgctccagaaaagataaaaagtgggcatgtgaattccacgctgaaaaaaaaacaaaaaacctttcctgaggtacaaggtggccctatttgctcaaagagcaaagaaattaagactaccaaaaaattctgcaacatctcataacttcaacacactcatgtaactctggtggatttcatcagacctctcctctgtgacaactgtttaattaccacacattggtgatctcatataatcctcaacaaccccatgaagtaggcattatttacaaattacttattttacaaagaaggaaactgaggttgagagaggctaaatcatatgcccaaagtaaaagagataataaatgctactttgggaatatgaaaatagtccagctaatattttgtggttattttcaaagttgcttaagagtttaggacacaatctaataatatcctccaatgattctattaagtgaaaatcaaaagatggctaaacaaactaaatagtaattacgggtcaccttcattgtgtaacaactgcccacgttactcaaggtcaccttcggtgcaaatcaagtatgaaaattaatttgttctcctcaatctattgcattttctctacataatgctggtctcaaaactccctgtacctgcccaacctttggataagaaaaaaatgaccacgattgccttcaggacagctaacattgttttgtttttgttttcgagacggagtcccgctcttgttgcccaggctggagtgcagtagcagtcttggctcactgcaacctccgcctcccgggtacaagcgattctcttgcctcagcctcccaagtagctgggattacaggcgcccaccaccacgcccggctaatttttgtatttttagtagggacggcgtttcactatgttggccaggctggtctcgaactcctgacctcaggggatccgcccgccttggcctcccaaagtgctgggattacaagtgtgagccaccgcgcctggccagctaacattgttaatccacaaataacttcaaagctgcatcgataccatttgggttgtttccctgcaattaaaccaggtgaagagctagatttacagtttccgtctattacagtaataggaattggagaagatatttttctatacagggttaggagtaaacatatccccaaagctaaaatgtaggacatcacttaaggaacgaggtgtctaccaagaatgtccttccctgaaatcaaaggttactgaagaattaaaaagcagggctagactatcactccgataacagaaagagagctggaaaccgaaacagaaatactgggtgataaagccaatgctaaggacatcatcccaatgacttgggacgagatgggagacagacagcattcaagattagaaggccgagatgttcgtaaaaggaaagcacacgagaggccgcgaggacacattgatataaggttgttgtaaatgatttgtcataatttttgctcaccttggagacgatttagtgcgcttttgaccaagggaaacatcgtgaaggtgaagctagaactgcggcaatacagctgctgctttggtgccaattcgcttcaggtacccttgaagtgagctgaaaaacaaaatggctttcagccgggatccgtaatgagatttgacgaaatctcgcgatacctgtaaaacctatagtaattgcaatcccttttcccgcgaggaaaaataaaggccttttgggaaatgtagtttccggctttataaaatgacgtatggtgggtggtatctaatgaagaatgaaagaactccttgaagccaggtttagagctctatagagggcagccgagagacagatcttcgaccgaatcgtctaaggaactagcttcaaaatggcgttcaagttccacaagcttcggtttagtatctccacactagctctttcttctttctgttcccccaaaacttcctttacttctctcattttttttgtctgctattactactatactaattggcttagcttttagttttcaaataacgtcaagtttagagaaaagttgcaagaacagtaaaaacttctgtaatatgtagataaatacgtgataaaataactttggaaagctattggccgggcgcggtggctcacgcctgtaatcccagcactttgagaggccaaggtgggcggatcacgaggtcggagttcgagaccagcctggccaagatggtgaaaccccgtctctactaaaaatacaaaaattagccggcgtggtggcgcgcgcctgtcatcccagctactcaggaggctgaggcagaataatcacttgaacccgggaggcggaggttgcagtgagccgagaacgtgccactggactccagcctgggcgacagagcgagactacgtctcaaaaagaaagaaagaaaagaaagctgttaggcctggcgcggtggctcacgcctgtaatcccagcactttgggaggccgaggtgggcggatcacgaggtcaggagatcgagaccatcctggccaacatggtgaaaccccatctctactaaaaataccaacaattagctgggcgtggtggcatgtgcctgtaatcccagctactctgtagactgaggcggcagaatcgcttgaaccagggagtcggaggttgcagtgagccaagataccaccactgcactccagcctggtgacagagcaagactccgtctcaaaaaaaaaaaagaaaagaaaagaaaagaaaaaaaagaaagaaaagaaatggcaacacggcaaaaccccgtctctactaatatacaaaaaattagctgggcatggtggcacatgcttctaatcccagctactcgggaggctgaggcatgagacttgcttgaaccggggaggcggaggttacagtgagccaagatcgcaccactgcactctagcctgagacctgtcccaaaacaaaaaaaataaaatacatacagttcagtggcattaatggcattcacattgttgtgcaactatcaccattattcatctctaagactttttcatcgtgtaaaactaaatgctttgattatacattttgactattgaaaatattaacattattccaaaagtcaaaactaaacagactagtgtacttagagaagtgtcattccctcccctaactgttgcattccatttccaccaattcctataggtaaccgatttcattactttctggtttatcttgtgtgtttccttttgcaaaaataggcaaatacctgtatgttttcttatttctctattttatacaaatgtagcataaaaatccattatcattttacataagtcttcctcattccttttttacagctgcaaaatctgtggtgtatatgtgctatagtatattcagtcaatctcctatgttggaatatttaggtagtttcaagaatatttcaatttcaataatgctgaaatgaataactttgtgcacacatattttcatattgctggatgtctctctccaaggtaggttactagaagtgggattgctggattaaaggataaatatatgtgtagtttttttagatattgccaaattatagatgttgtaacgttttgccttcccaccagcaacgtattaatataaagggtgcctgactc

SEQ ID NO: 1563278 - DNA, 4001 bp, Homo sapiens
tttggtagggtcttccacttgcacattcaggataactatgagattcattgttcccttctacattctgaaataggtttgtatataagaaatatccagtgttaggaaggggaacatcacacaccggggactgttgtggggtggggggaggggggagggatagcattaggagatatacctaatgctaaatgacgagttaatgggtgcagcacaccaacatggcacatgcatacatatgtaacaaaactttatgttgtgcacatgtaccctaaaacttaaagtataataataataaaatttaaaaaaaaagaaaattgctaaaagggtagattttaagtgttctcactacaaaaaataaagataagtatgtgagacaaaaaaaaaagaaaaaaatacatatgtaaatacacacacacacacacacacacacacaaaagaaatatccagtgttcattgtgaatatactagtatatttatcacatatatttatgtcactcaactatgttaagactggtttttcaataaacataatatgtgatatctaaaggcgtattgccctctgaaatgtaattacatcacaaaactatgtacttaagtttattattactcattaaaaattaaacgttccctggaattgcacaagaaggctatatgtattctgttaaacctctcaatatttattatttaatgtttggacatatgtttggaaatagtcaacaatcatatgtctttcttatttaatctttttttttaaataactcagccaaatgactgtgtttaccaccgagtctgctgttttcttctgttttctggtatttttaaagtatttagtgttctatacttcacttacatagagcattataaatatatgtattaaatataaacactaaaaatatatatacattaaatataaattttaatatatattaaaaataaaccaaaatgcttcagtgtatgtatacacacacacacacacaacatttcactgtttgttatacagaaaaccaaaatcattttttccacaaagataaatgtagatgtatatgcctgatagcttttaaaattataatgtttaaaatccttaaaataaatgacatttgagttgataatcagggccctgaagaagcacaatattacactttattctaaataccagggttgtgttttcaaatattctcttctgaccaagatttttacataatgacctgttgagaatcaaaagatacatatggagttttaaaagaacctgactgttttgaatctttctaaatcagttttgattatcctttatattgaaagtagtttatttgtattctatttatactgtatcctccaatgcccacatgctctggagaaagacatgcattacttctaacaaaactttaaatattttacactaaattacattaatgactcatcagctcaatcagacttctttatgtaaatgtcccatctttccctgctgacaaacccctccaatatacaagttcacttcacctcagatgaaagagcttcaactaacatatgccttctgattcccatgcactcatgactggccagaaatccccaccatatcctaatttcttcaattgagggaccttatcttctgtttctttcaaatttgttagttttactttaaaatgattgcatcactcaaaatgttgtgacaaatgaaaccaggaacttttctgcatatgttcatatcaaacatatgtgaacatattaaatccctgacccagagcgacaactctcagaataagatctacatcaacaaatgataaatcaagaaaccaaagctaactttaaaataatttcttacgtatattctaaaatggatacacaagctaagaagcacttactaagatcccttatgctttctctttcactttcaactcacagtttatcttcattctcattcgtcaaaatccttaggaaaggtgtgcttcacggggtcctgccttcttgaccccttttcttctgccctctacctctccacttactcctgtttcacagttcttttgactctgcatcacaatgcccacaaaacatggaaacctagcaacctagaaccctcttcagactgtagggggagggaataactgaaatggcaaattcaaaatcttctttagatggcaggcaaagagttaaggctgggaacacccatgagtttataactcttgccgtatcacacacaaaatcctaactatatgcaatattcccaatattgaaacagtgtgaagacaggattgccagatgtaatacaagacaccagtaaaatttgaatttcttataaacaatacttttttagtataaatatgtaccaaatatgataacatattgagaggtgacaacatgctggcagctctcgcagccctcgctcactctcggcgcctcctcggccttggcggccactctggccgcgcttgaggagcccttcagccccccactgcaatgtgggagcccctttctgggctgcccaaagccggagccagctccctcagcttgcagggaggtgtggagggagaggctccggcgggaatcagggctgtgcactacgcttacaggccagcacgagttccgggtgggcgtgggctcaggggacccgcactcagagcggccggctggcctgcaagccccgggcagtgaggggcttagcacctgggccagcagctgctgtgctcaatttctcgcagggccttagctgcctccccaaggggcagggcttgggacctgcagccctccatgcttgagcctccccctcctctgtgggctcctgtgcagccccagcctcccccacgagcgctgctccctgctccacagcgcacagtcccactgaccacccaagggctgaggagtgcgggcacacggcgggactggcaggcagctccacctgcggcctagtgcaggatccactgggtgaagccagctgggctcctgactctggtggggacttggagaaccattatgtctagctaggggattgtaaatacaccaatgggcactctctatctagctcaaggtttgtaaacacaccaatcagcaccctgtgtctagctcagggtttgtgaatgcaccaatcgacactctgtatctagctactctggtggggacttggagaacctttgtgtcacactctgtatctagctaatctagtggggatgtggagaacctttgtgtctagctcagggattgtaaacacaccaatcagcaccctctcaaaacagaccactcagctctctgtaaaatggaccaatcagcaggatgtgggtggggccagataagagaataaaagcaggctggggagccagcagtggcaatacgctgggctccccttccacgttgtggaagctttgttctttcactctttgcaataaatcttgctgctgctcactctttgggtccacactgcttttatgagctgtaacactcatcgtgaaggtctacagcttcactcctggagccagcgagaccacgaacacaccagaaggaccgaacaactccagacgcgccgccttaagagctctaacactcacggcgaaggtctgcagcttcactcctgagccagcgagaccacgaacccaccaaaaggaagaaactccgaacgtatccgaacatcggaaggaacaaactccagacacgccgcctttaagaactgtaacactcaccgcaagggtccgcagcttcattcttgaagtcagtgagaccaagaacccaccaattccggacacaatatgtttagggattttttttttttttttttttgagacagtgtctctgtcacccaggctggagtgcagtggcacgatctcgggtcactgcaacctccgcctcccaggttcaagcaattgttctgcctcagcctccggagtagctggggctacaggggctcgcaactgctcctggctaaattttgcatttttagtagagatggggtttcaccacattggccaggctggtctccaactcctaacctcgtaatccgcctgcctcagcctcccaaagtg

SEQ ID NO: 1563279 - DNA, 4001 bp, Homo sapiens
tagataaatggtaatgttagatagatagaattatatagatgatgatagaaatagttagacagacagacacagatagatagggatgggtaggtagatggatgaatcaatggacaggtgggtgtataggtggaagacaagtggatgggtgggtggatgggtgagtggatggatgaataaatggatgaacagatacacaggtgaatgggtggatgggtggatggatgcatggatagatggatacatagatgtgtacatggatgggtggatggatggatggatgagtggatgaaagtgtgggtgaatgcataggtggatggatggtttgatgggtgggtggatggatgtgttggtggatggatggatagatggataagtggatgaaaggatgggtgggtggatgagtgagtcagtggataaataaatggatgaacagatacataggtgaatggatggatggatggatggatggatggatgcatggatagatggatacgtagatgtgtacatggatgggtgggtgggtggatggatgggtggatggatggatggatggatggatggatggataagtggataaaagtgtgggtgaatgcatggatagatggatgtattggtgggtggatgggtggatgggtggatggatggatggatggatggatggatggatggatggatggataagtggataaaagtgtgggtgaatgcatggatagatggatgtattggtggatggatgggtggatgggtggatggatggatggatggatggataagtggataaaagtgtgggtgaatgcatggatagatggatgtattggtggatggatgggtggatggatggatggatggataagtggataaaagtgtgggtgaatgcatggatagatggatgtattggtggatggatgggtggatggatggatggatggataagtggataaaagtgtgggtgaatgcatggatggatggatgtattggtggatggatgggtggatgggtggatggatggatggatggatggataagtggataaaagtgtgggtgaatgcatggatagatggatgtattggtggatggatgggtggatggatggatggatggataagtggataaaagtgtgggtgaatgcatggatggatggatgtattggtagatggatgggtggatgggtggatggatggatggatgtattggtggatggatgggtggatgggtggatggatggatggatggatgatagatgggtggatgggaggatggatagataacagctgggtggatggtggatggatggatgagtgaatgaaaggttgggtggacggatggctgggtgggttgatgggtgggtgaatgtatgagtggatgaatcgtttgatagatgggtggatggatatattagtggatggatcaatgaataatagatggatggatagtggatggatgggtgattaatgggaaaagatagatgagatacattgatggatagattaaaaatgaatatatctaccaatcaatcaatcaatagatagacacacacacgcacacatacagttcctagttctggccaccgaaagctcatataagcagtggatattccgggagcaataagtatacttaatattcatgtatttacttataaatatgttttgtcccagctacttgagaagctgaggcaggagaattgcttgaacccggaaaaaaaaaaaaaaaaaaaagaaaagaagaaagaaacctccatgctcattgtttaagttttacaaaataaagagtgcctggttgcaaagcaaaccacaaaccaaaatacaacaagaagagggtgtttaaataattacctgctcctccttgccccaaagccatccagcctcccagcagaaagacggcagctccccacagcagaaccagccgccccatgcctgaaacaggagtggagagtgaggtcctcagggacctacaacgaacagatcactcatgactcataagcagaggtcaccatcgattttaaaaagtcagaaaggaaactagggaaatgattacaggcaggaagcacagtgacagttgattttcaaagatacacttgtcaagaacacacacacacacacacacacacacacacacaatcaatccaggatcaggactgccacgcacactgctgagctgagccctccccttccctccccctcccccatctcctccccctcccctccattcccttccctccctccccctcccctcccctcccctccattccctccccactcccctcccctcccccttcccctcccctctctttccttcctttcccttcccctcccctcccctctcccctccccttccccctctcccctccccttccccctcccctcccctcccttcccttcctttcacttcccctccccctcccctctcccctcccctccatcccctcccctcccctcccttcccttctgcctctcccccaccccctcctccctcccctccccctcccccttccctttcctcccctcccctcctcctccccacctcccctccccctcccctcccccttccctcccctcccccttccctcccctcccttcccttcctttcccttcccctcccttccccttcccccccaccccaccccctcccttcccatccccctcccatcccctcatcttttgtccccctcccttcccccaccccctccacctatcccctcccctcccctccatggatggtatatggatggatggataagtggatgaaaggatgtgtggataggtgggtggatggatggataaatggatgaacagatacataggtggatgggtggatggatgcatgcatagatggatacgtagatgtgtacatcccctcccctcccttcccctcccccctccccccaccccctcctccctcccctctccctcccccttccgtctcctcccctccccctcccctctcctcccctccccctccccacctccccttcctttctcttgcttttcctttctttttttttgagctggagtctcactctctgtcacccaggctggagtgcagtggcacgatcttggctcactgcaacctcctcctcccgggttcaagcgattctcctgcctcagcctcctgagtagctgggattacaggcgcccaccaccacgcctggctaatttttatatttttagtagagatggggtttcaccatgttggccaggctggtctcaaactcctgacttcaagtgatcggcccgcttcagcctctcaaagtgctgggattataggcgtgagccaccgtgcccagcttttctttcctattctttgagacaaggtgttcgtctggtacccacgcaggagtgttgtggtgcaatcaggactcaccacagcctcaaacagcttggctcaagcaatcctcttgcctcaacctccctagtagccgggattacagatgcatgccacccaccctgctgatttttgtatttttcatagagacggggtttcaccatgttgaccaggctggtctcaaactcctggactcaggtgatccacccgcctcgacctcccaaagtgctgggattataggcgttagccaccgcacctggcctgagctttgcttgaaagcatatcacagagcagcctggccaacatggcgaaaccctgtctctactaaaaaaaaaaatacaaaaattagccaggcgtggtggcacgcacctgtaatcccagctactcaggaggctgagacggggagaatcgcttgaacccaggaggcagaggttgcagcgagccaaggtcacaccattgcactccagccttgttgacagagcgagactctgtctcaaaaaaaaaaaaaaaatatgacatgctaactttctaagcccggaattcttgctctctgctaaatgatgagactcgtggatgagtgtgcagttgtgtggtcagtgttctgtgatatactctgcacccaagctgggctggacatccagagacttcatagttcatctgtcttcagacaaacgcagagt

SEQ ID NO: 1563280 - DNA, 4001 bp, Homo sapiens
acggtttcattgtaattccttacatacaaaatggaggagaaaaaatttgatcctgtcaaagggtacagaaaaagctttttaaagacatttaatgagtttatggaaaaaagaaaatatttatttaacctatattcaaagagcacttccatttcctaaaatcaacagcaaacatacttaaatgtcaaatgttcgaagaactatcattccagtcaggaacgagaagtagatgtagcctattatctctacgtttgaaatcaggattgagacacaaaaagctataagtatcaaaatgagtaagtggtatgaatattggaaaaacatgtaatgtttagtgataataccattatcgatcttgaaaattcaaaggaaaaggcatgtggaatattcaagtgcatcggccttcagaatgaggtgtgcaacagattactacagcaaaatcaaaatcttcacctcacgaaagcaataactaactacagcaattaatagacaatatgccatttgcaatagcaataaaatccaagaattacctgaatagaagtctaataaaaatgtataagctgcttatagaggcaactatcgaagtatactgacatattcaggaaaaaatagcttgacatacatagaggagtataacatattcattcatggggaacacaacagtgtaaaaatgtaaactcagcttaaattatttacaatttagtgccttacctgtagtcgccgacattacaagcaaatttgggctgctgtgctctgcttcccaaatcaaccctgtaaatttatagaatggaaacagaaagtaaaaaaccagtattagcaagaaaatctacacaacaaaacagggccagtccagggtgagactgaagaccttgttgagctggtacttgtgtgtgacacttgccgtgtcggttagagggggttagcggcagggatgttggggaggtttgtagcctgcctagacggcagataacagaatgggtagaataaaagttttaaaatttccacttcacttcattgcacaatctgaggcagctcctgaaaacacgatgccaagagccctaggtaatagcaggacaccaggaaaattgggtttgttaaggcagcatggctccagagttctgctaataacaacctgaaaccaacatagtgggagaggaattacgtttaaaaaaaaattccttcaacagaacacaaagactggaatagaagtagattaggatagtaagagtgaacgatgcatactaagggtaggtgttagttcgtagaaataaatatatatatcgctacctacatatatacttggaagatatgtaaaccgtatttcttcaattcagtgaataaatcatttaggaccaaaggtttgccaagtgtagctctggctggagaggagctcccgtgggaaagtgtctgtcttcttccagaggtcaatacgatcgtgggagctcccgccctgcagggagctcctggcctgggacccgcagccattctctacaaggggtgcagctgtgcaaatgcacagacgttacagaaacagagtatctcctgccaatcacttcatccaacagccaggagtgaggaagaggaccctcttgagtgaggactgagggtccaccctcccccacgtagtgggaccacagaatccagctcagtccctcttgtcagccctggtaaacttaggcaataatgtcaccccgaccacacccctcccccagtgccacttcagggggactcagagtcagagacttggtctgaggggagcagacacaatcggcagaggatggcggtccaggctcagcctggcatccaagtcaggaccttgagggatgaccaaaggcccctcccacccccaactcccccaaccccaccaggatctacagcctcaggatccccgtccctatccctacccctacccccaacaccatcttcatgcttacctccacctccatctggatccccatccaggaagaatccagttccacccctgctgtgaacccagggaagtcacggggccggatgtgacgccactgacttgcgcgttggaggtcagagaacagcgagattctcgccctgagcaacggcctgacgtcggtggagggaagcaggcgcaggctccgtgaggaggcaaggtaagatgccgagggaggactgaggcgggcctcaccccagacagagggcccccaataatccagcgctgcctctgctgccgggcctggaccaccctgcaggggaagacttctcaggctgagtcgccaccacctcaccccgccaccccccgccgctttaaccgcagggaactctggtgtaagagctttgtgtgaccagggcagggctggttagaagtgctcagggcccagactcagccaggaatcaaggtcaggaccccaagaggggactgagggtaaccccccgcacccccaccaccattcccatcccccaacaccaaccccacccccatcccccaacaccaaacccaccaccatcgctcaaacatcaacgggacccccaaaccccgattcccatccccacccatcctggcagaatcggagctttgcccctgcaatcaacccacggaagctccgggaatggcggccaagcacgcggatcctgacgttcacatctgtggctcagggagggaagggggtcggtatcgtgagtacggcctttgggaagcagaggatgggcccaagcccctcctggaagataatggagtccggagggctcccagcatgccaggacaggggcccaaagtacccctgtctcaaactgagccaccttttcattcggccgcgggaatcctagggatacagacccacttcagcagggagttggagcccagccctgcgaggagtcaaggggaggaagaagagggaggactgaggggaccttggagtccagatcagtggcaaccttgggctgggggatcctgggcacagtggcctaatgtgccccatgctcattgcgacttcagggtgacagatttgcgggctgtggtctgaggagtggcacttcaggtcagcagagggaggaatcccaggatctgccggacccaaggtgtgcccccttcatgaggactggggatacccccggcccagaaagaagggatgccacagagtctggctgtcccttattcttagctctaagggaacccgatcagagatagctccaattggcaatgtcatttgtaccacaggcaagaggttggggaaccctcagggagataaggtgttggtgtaaagaggagctgtctgctcatttcagggggttgggggttgaggaagggcagtccctggcaggagtaaagatgagtaacccacaggaggccatcagaagcctcaccctagaaccaaaggggtcagccctggacaacctacctgggagtgacaggatgtggctcctcctcacttctgtttccagatctcagggagttgaggaccttttcttcagagggtgactcaggtcaacacaggggcccccatgtagtcgacagacacagtggtcctaagatctaccaagcatccaggtgagaagcctgaggtaggattgagggtacccctgggccagaacgctgacagagggccccacagaaatctgccctgcccctgctattccctcagagagcctgggcaaggctacctgctgaggtccctccattatcctgggatctttgatgtcagggaaagggaggccttggtctgaaggggctgcactcaggtcagtagagggaggctctcaggccctagcaggagtagtggtgaggaccaagcaggctcgtcacccaggacacctggactccaatgaatttggacatctctcattgtcctttgtgggaggatctggttatgtatggccagatgttggtcccctcatgtccttctgtaccgtatcagggatgtgaattcttgccatgagagtttctttggccagcaaaagggcggtattaggccctgcaaggagaaaggtgagggccctgagtgagcacagaagggaccctccaccccagtaga

SEQ ID NO: 1563281 - DNA, 4001 bp, Homo sapiens
tggcaaggcccttaattcagtctgtagggagtcgggggagatgaagaggtggtgtgaatcgcccatctgagccagggaagccaggaaggcagagccagacttggggactggcagtgtgcaagaaaaggagcgacagcctgtgtccaggccagaaagctctccttctattacactatcgatctggttttcttcctggatgctgcctgtgtgtgaaagcaactgctgctctctgtgcctacctgcctctgttagtagggaaaatggtcatggtcagcggatgctcacttctgctcaccttggatcacttctactgaagggatggtttgacaacaagaagacaggaagaaacttttggggaggatgaatatatttttcaccttcactgtggttgtggtttcatgggactaaacatttctcaaaactctttgatttgtttctcagtacttaggagaaaaagtaagcagaaaaccaggaaggatatagatgacctgaaaagcaccattaactactctgactaaataaaacaataagaaaagcaccgcattcaacaatagcagaataaacaatcctctcaagtgtgcatgaaatatctcccaagatagatggtattctgggccatcaaacaaagcttacaaattgaaaagaatagaaataatagatagcctcttcttaggccataatataattaaactcaaaaccaaacaccaagatatctgaaaaatgcccaaatattggaaattttaaaataagctcctatataacctatgggtcaaagagggagtcccaggagaattttaaaaatacattaagttgaatgaaagtaaaaatgtacatacaaaaagtgggattctgctaaagtgtgtccttgagggaaatatatagcatattttaaatgtttatattagaaaatgaaatctaaaatcaataaccaaaagtttcaccctaggaaaccaaagaacgaagagcaagttgaattagagaaattgtagaggatgcccccctcccttcccacactcccacctctttccccttactccctacccctaccatttgagacacacagacacacacatcattttgcaacatgttcactttattttcatcaccatggggcacactctttggggtgtaaaatgtactctacaccctgttggctatttatctggggttagacctctggagacttttcagatagacttgaagtctctggccttgcccgggaattactggctgtccgaagagagactggagaaggtggtggtctccttgcccttgtggtcccgctatggctcattttgattgagttcctcgttcggctggtcagagtggctggatagtgttggcccactccattcctcaggtttttttgaagcggcggtcttttagggagagccttttgttcctggaacttccttgatgggtcccttttcccttccgggttgtcttgggaacctagaaggaaacagggagatcaaagaagggcactggtttggggaagaggatggaggaggggtgagaacaggggcttcatagagaaatggtgcaggctggggtgggggttgtgccaggggaggacagggtaggagtcagagcttgggtgggccgttcactttgatagggcttctgggccagggttgagaggatgccttccacttcctcgcctctttggtgttggtgggtggttgttggacaatgggctggaggctcgtggtttcctggacatcttcaccagaccagtgtctctcaacagtctactccagtccacctggtctctccaagcctcccccaggacagtgaaggcaggccagcaggctagaaactcacagcgcatttttatgttagtcttgtggtagaattccttttccaggaaaccttggtcttttctcttaacaccttcaactaattggatgaggcccatccacattatggaagttaaactgctttacttaaaatcaactgattgtaaatgttgatcacatctacaaaataccttcacagcaacatctagactactgtttgaccacacagctgagcagtatagcctagacaagttgacacatagtactagccattgcacatatcttgcaccatacagaaatgtaactcaaaatgaactacagactttaaatgtcaaaattactttttttttttctaggaggaaacaaaaaaaaattgtgtcacctgaagttatgtcttaagtcagctcaggctgccataacaaaatgccattgagtgagtagctaaaacaacagaaatttattttttttctcacagttttgaagtctggaagtcctagatcaaggactggcggggttggcttctggtgatggccttattcgtggcttgtagatggccctttattaatctgtccattcttggcctttcctctgtgcatgtgcagagagagagagaaagaaagagagagagagagagagagagagagaaagagagagagagagagagagagaaaggtcatgtaggcacaaaagtactttcttctgtctcttctcccttcttataaccaaactaattctatgggatcaaggtcccacccttatggcctcttttaacattaatcacttccctagaagcctcatctccaaatacagacaccctggggctgagggcttcaaaatatgaatttggtggaggacataagcattagcaaagaatagacacacagattaataaaacagaatagagctcagaaatagacctgcacgcatatagtcaggtgattcacaacaaaggcaataatggtgaaagtacaggttttccaacaaaaggtgtcggaacaattagacacctatacacaaattataataacctggacatatccttacatattccatgaaaactaactcaagatacatcataggtctaatgaaaaatgcaaaaacaatacaacctctataagaaaacataagagaaaatccacataactttgagtttggtgatgagtttttaaattcaacaccaaaagcatgatcaaggaaagaaaaatttgccaagttgattttattaaaataaaaatcttatgctcttcaaaggacaatgttaagagaatgaaaacagaagccacagactagcagaaaacatctgcggtacacatatgtgataaagaacttgtctctacaatatatgcgaattcttaaagctcaatgatagaaaaaatgaaaatagtcaaagatctgaacacacactacacaaaagaagatatacacatggcaaataagcataataaaagtactgagcaccctttggcattagataattgtgtactaaaatgggataccactgcacacctatcagaatgtccaaaatccatagaaaaccaaaacaaagaatacaagaccaagaacaattgccagcgaagatgtggagcaacggaaactctccttcattgctggtagaaatgcaaaatggcacagccactttggaaggcagtttggcgttttcttaaaaaaatgaaaatagacttagcacaagattcagcagccatactcaatcaatttacccaattgatttgaaaacttatgtctacataaaaatttgtatatgaatgtatacaatagcttatttcataatcaccaaaaatagaagcatccaaaatgtatttcatttggtgaatggatatatatatatatatatatatatatatatatatatatatataaccagacattgatactactcctcaatgaaaaggaataagttccaagccacacaaagttatacatgactcttcagttcattatgctaagtgaaagaaaccagtctaaaaaggctacatagtataagattctatttatatgacattctggaaaatgcaaaattataaagatgaaaaacctatcagtggtggccatggggtttatccgacaagcacaagggaatttatcagggcagtgaaactggtatgcataatactgcaatggtggttccgtgcttgctttggtctgaatatttgtgttgccacaaaattcatctgctgaattacc

SEQ ID NO: 1563282 - DNA, 4001 bp, Homo sapiens
gtggcaaggcccttaattcagtctgtagggagtcgggggagatgaagaggtggtgtgaatcgcccatctgagccagggaagccaggaaggcagagccagacttggggactggcagtgtgcaagaaaaggagagacagcctgtgtccgggccagaaagctctccttctattacactatcgatctggttttcttcctggatgctgcctgtgtgtgaaagcaactgctgctctctgtgcctacctgcctctgttagtagggaaaatggtcatggtcagcggatgctcacttctgctcaccttggatcacttctactgaagggatggtttgacaacaagaagacaggaagaaacttttggggaggatgaatatatttttcaccttcactgtggttgtggtttcatgggactaaacatttctcaaaactctttgatttgtttctcagtacttaggagaaaaagtaagcagaaaaccaggaaggatatagatgacctgaaaagcaccattaactactctgactaaataaaacaataagaaaagcaccgcattcaacaatagcagaataaacaatcctctcaagtgtgcatgaaatatctcccaagatagatggtattctgggccatcaaacaaagcttacaaattgaaaagaatagaaataatagatagcctcttcttaggccataatataattaaactcaaaaccaaacaccaagatatctgaaaaacgcccaaatattggaaattttaaaataagctcctatataacctatgggtcaaagagggagtctcaggagaattttaaaaatacattaagttgaatgaaagtaaaaatgtacatacaaaaagtgggattctgctaaagtgtgtccttgagggaaatatatagcatattttaaatgtttatattagaaaatgaaatctaaaatcaataaccaaaagtttcaccctaggaaaccaaagaacgaagagcaagttgaattagagaaattgtagaggatgcccccctcccttcccacactcctacctctttccccttactccctacccctaccatttgagacacacagacacacacatcattttgcaacatgttcactttattttcatcaccatggggcacactctttggggtgtaaaatgtactctacaccctgttggctatttatctggggttagacctctggagacttttcagatagacttgaagtctctggccttgcccgggaattactggctgtccgaagagagactggagaaggtggtggtctccttgcccttgtggtcccgctatggctcattttgattgagttcctcgttcggctggtcagagtggctggatagtgttggcccactccattcctcaggtttttttgaagcggcggtcttttagggagagccttttgttcctggaacttccttgatgggtcccttttcccttccgggttgtcttgggaacctggaaggaaacagggagatcaaagaagggcactggtttggggaagaggatggaggaggggtgagaacaggggcttcatagagaaatggtgcaggctggggtgggggttgtgccaggggaggacagggtaggagtcagagcttgggtgggccgttcactttgatagggcttctgggccagggttgagaggatgccttccacttcctcgcctctttggtgttggtgggtggttgttggacaatgggctggaggctcgtggtttcctggacatcttcaccagaccagcgtctctcaacagtctactccagtccacctggtctctccaagcctcccccaggacagtgaaggcaggccagcaggctagaaactcacagcgcatttttatgttagtcttgtggtagaattccttttccaggaaaccttggtcttttctcttaacaccttcaactaattggatgaggcccatccacattatggaagttaaactgctttacttaaaatcaactgattgtaaatgttgatcacatctacaaaataccttcacagcaacatctagactactgtttgaccacacagctgagcagtatagcctagacaagttgacacatagtactagccattgcacatatcttgcaccatacagaaatgtaactcaaaatgaactacagactttaaatgtcaaaattactttttttttttctaggaggaaacaaaaaaaaaattgtgtcacctgaagttatgtcttaagtcagctcaggctgccataacaaaatgccattgagtgagtagctaaaacaacagaaatttattttttttctcacagttttgaagtctggaagtcctagatcaaggactggcggggttggcttctggtgatggccttattcgtggcttgtagatggccctttattaatctgtccattcttggcctttcctctgtgcatgtgcagagagagagagaaagaaagagagagagagagagagagagagagagagagagagagagagagagaaagagagagagagagagagagagaaaggtcatgtaggcacaaaagtactttcttctgtctcttctcccttcttataaccaaactaattctatgggatcaaggtcccacccttatggcctcttttaacattaatcacttccctagaagcctcatctccaaatacagacaccctggggctgagggcttcaaaatatgaatttggtggaggacataagcattagcaaagaatagacacacagattaataaaacagaatagagctcagaaatagacctgcacgcatatagtcaggtgattcacaacaaaggcaataatggtgaaagtacaggttttccaacaaaaggtgtcggaacaattagacacctatacacaaattataataacctggacatatccttacatattccatgaaaactaactcaagatacatcataggtctaatgaaaaatgcaaaaacaatacaacctctataagaaaacataagagaaaatccacataactttgagtttggtgatgagtttttaaattcaacaccaaaagcatgatcaaggaaagaaaaatttgccaagttgattttattaaaataaaaatcttatgctcttcaaaggacaatgttaagagaatgaaaacagaagccacagactagcagaaaacatctgcggtacacatatgtgataaagaacttgtctctacaatatatgcgaattcttaaagctcaatgatagaaaaaatgaaaatagtcaaagatctgaacacacactacacaaaagaagatatacacatggcaaataagcataataaaagtactgagcaccctttggcattagataattgtgtactaaaatgggataccactgcacacctatcagaatgtccaaaatccatagaaaaccaaaacaaagaatacaagaccaagaacaattgccagcgaagatgtggagcaacggaaactctccttcattgctggtagaaatgcaaaatggcacagccactttggaaggcagtttggcgttttcttaaaaaaatgaaaatagacttagcacaagattcagcagccatactcaatcaatttacccaattgatttgaaaacttatgtctacataaaaatttgtatatgaatgtatacaatagcttatttcataatcaccaaaaatagaagcatccaaaatgtatttcatttggtgaatggatatatatatatatacatatatatatatatatataaccagacattgatactactcctcaatgaaaaggaataagttccaagccacacaaagttatacatgactcttcagttcattatgctaagtgaaagaaaccagtctaaaaaggctacatagtataagattctatttatatgacattctggaaaatgcaaaattataaagatgaaaaacctatcagtggtggccatggggtttatccgacaagcacaagggaatttatcagggcagtgaaactggtatgcataatactgcaatggtggttccgtgcttgctttggtctgaatatttgtgttgccacaaaattca

SEQ ID NO: 1563283 - DNA, 4001 bp, Homo sapiens
aagccaggaaggcagagccagacttggggactggcagtgtgcaagaaaaggagcgacagcctgtgtccaggccagaaagctctccttctattacactatcgatctggttttcttcctggatgctgcctgtgtgtgaaagcaactgctgctctctgtgcctacctgcctctgttagtagggaaaatggtcatggtcagcggatgctcacttctgctcaccttggatcacttctactgaagggatggtttgacaacaagaagacaggaagaaacttttggggaggatgaatatatttttcaccttcactgtggttgtggtttcatgggactaaacatttctcaaaactctttgatttgtttctcagtacttaggagaaaaagtaagcagaaaaccaggaaggatatagatgacctgaaaagcaccattaactactctgactaaataaaacaataagaaaagcaccgcattcaacaatagcagaataaacaatcctctcaagtgtgcatgaaatatctcccaagatagatggtattctgggccatcaaacaaagcttacaaattgaaaagaatagaaataatagatagcctcttcttaggccataatataattaaactcaaaaccaaacaccaagatatctgaaaaatgcccaaatattggaaattttaaaataagctcctatataacctatgggtcaaagagggagtcccaggagaattttaaaaatacattaagttgaatgaaagtaaaaatgtacatacaaaaagtgggattctgctaaagtgtgtccttgagggaaatatatagcatattttaaatgtttatattagaaaatgaaatctaaaatcaataaccaaaagtttcaccctaggaaaccaaagaacgaagagcaagttgaattagagaaattgtagaggatgcccccctcccttcccacactcccacctctttccccttactccctacccctaccatttgagacacacagacacacacatcattttgcaacatgttcactttattttcatcaccatggggcacactctttggggtgtaaaatgtactctacaccctgttggctatttatctggggttagacctctggagacttttcagatagacttgaagtctctggccttgcccgggaattactggctgtccgaagagagactggagaaggtggtggtctccttgcccttgtggtcccgctatggctcattttgattgagttcctcgttcggctggtcagagtggctggatagtgttggcccactccattcctcaggtttttttgaagcggcggtcttttagggagagccttttgttcctggaacttccttgatgggtcccttttcccttccgggttgtcttgggaacctagaaggaaacagggagatcaaagaagggcactggtttggggaagaggatggaggaggggtgagaacaggggcttcatagagaaatggtgcaggctggggtgggggttgtgccaggggaggacagggtaggagtcagagcttgggtgggccgttcactttgatagggcttctgggccagggttgagaggatgccttccacttcctcgcctctttggtgttggtgggtggttgttggacaatgggctggaggctcgtggtttcctggacatcttcaccagaccagtgtctctcaacagtctactccagtccacctggtctctccaagcctcccccaggacagtgaaggcaggccagcaggctagaaactcacagcgcatttttatgttagtcttgtggtagaattccttttccaggaaaccttggtcttttctcttaacaccttcaactaattggatgaggcccatccacattatggaagttaaactgctttacttaaaatcaactgattgtaaatgttgatcacatctacaaaataccttcacagcaacatctagactactgtttgaccacacagctgagcagtatagcctagacaagttgacacatagtactagccattgcacatatcttgcaccatacagaaatgtaactcaaaatgaactacagactttaaatgtcaaaattactttttttttttctaggaggaaacaaaaaaaaattgtgtcacctgaagttatgtcttaagtcagctcaggctgccataacaaaatgccattgagtgagtagctaaaacaacagaaatttattttttttctcacagttttgaagtctggaagtcctagatcaaggactggcggggttggcttctggtgatggccttattcgtggcttgtagatggccctttattaatctgtccattcttggcctttcctctgtgcatgtgcagagagagagagaaagaaagagagagagagagagagagagagagaaagagagagagagagagagagagaaaggtcatgtaggcacaaaagtactttcttctgtctcttctcccttcttataaccaaactaattctatgggatcaaggtcccacccttatggcctcttttaacattaatcacttccctagaagcctcatctccaaatacagacaccctggggctgagggcttcaaaatatgaatttggtggaggacataagcattagcaaagaatagacacacagattaataaaacagaatagagctcagaaatagacctgcacgcatatagtcaggtgattcacaacaaaggcaataatggtgaaagtacaggttttccaacaaaaggtgtcggaacaattagacacctatacacaaattataataacctggacatatccttacatattccatgaaaactaactcaagatacatcataggtctaatgaaaaatgcaaaaacaatacaacctctataagaaaacataagagaaaatccacataactttgagtttggtgatgagtttttaaattcaacaccaaaagcatgatcaaggaaagaaaaatttgccaagttgattttattaaaataaaaatcttatgctcttcaaaggacaatgttaagagaatgaaaacagaagccacagactagcagaaaacatctgcggtacacatatgtgataaagaacttgtctctacaatatatgcgaattcttaaagctcaatgatagaaaaaatgaaaatagtcaaagatctgaacacacactacacaaaagaagatatacacatggcaaataagcataataaaagtactgagcaccctttggcattagataattgtgtactaaaatgggataccactgcacacctatcagaatgtccaaaatccatagaaaaccaaaacaaagaatacaagaccaagaacaattgccagcgaagatgtggagcaacggaaactctccttcattgctggtagaaatgcaaaatggcacagccactttggaaggcagtttggcgttttcttaaaaaaatgaaaatagacttagcacaagattcagcagccatactcaatcaatttacccaattgatttgaaaacttatgtctacataaaaatttgtatatgaatgtatacaatagcttatttcataatcaccaaaaatagaagcatccaaaatgtatttcatttggtgaatggatatatatatatatatatatatatatatatatatatatatataaccagacattgatactactcctcaatgaaaaggaataagttccaagccacacaaagttatacatgactcttcagttcattatgctaagtgaaagaaaccagtctaaaaaggctacatagtataagattctatttatatgacattctggaaaatgcaaaattataaagatgaaaaacctatcagtggtggccatggggtttatccgacaagcacaagggaatttatcagggcagtgaaactggtatgcataatactgcaatggtggttccgtgcttgctttggtctgaatatttgtgttgccacaaaattcatctgctgaattaccaaggtgatggtattaggcagaaggtggggtatttggagaatgactagatcatgagagcagagtcctcatgaatggga

SEQ ID NO: 1563284 - DNA, 4001 bp, Homo sapiens
gaagccaggaaggcagagccagacttggggactggcagtgtgcaagaaaaggagagacagcctgtgtccgggccagaaagctctccttctattacactatcgatctggttttcttcctggatgctgcctgtgtgtgaaagcaactgctgctctctgtgcctacctgcctctgttagtagggaaaatggtcatggtcagcggatgctcacttctgctcaccttggatcacttctactgaagggatggtttgacaacaagaagacaggaagaaacttttggggaggatgaatatatttttcaccttcactgtggttgtggtttcatgggactaaacatttctcaaaactctttgatttgtttctcagtacttaggagaaaaagtaagcagaaaaccaggaaggatatagatgacctgaaaagcaccattaactactctgactaaataaaacaataagaaaagcaccgcattcaacaatagcagaataaacaatcctctcaagtgtgcatgaaatatctcccaagatagatggtattctgggccatcaaacaaagcttacaaattgaaaagaatagaaataatagatagcctcttcttaggccataatataattaaactcaaaaccaaacaccaagatatctgaaaaacgcccaaatattggaaattttaaaataagctcctatataacctatgggtcaaagagggagtctcaggagaattttaaaaatacattaagttgaatgaaagtaaaaatgtacatacaaaaagtgggattctgctaaagtgtgtccttgagggaaatatatagcatattttaaatgtttatattagaaaatgaaatctaaaatcaataaccaaaagtttcaccctaggaaaccaaagaacgaagagcaagttgaattagagaaattgtagaggatgcccccctcccttcccacactcctacctctttccccttactccctacccctaccatttgagacacacagacacacacatcattttgcaacatgttcactttattttcatcaccatggggcacactctttggggtgtaaaatgtactctacaccctgttggctatttatctggggttagacctctggagacttttcagatagacttgaagtctctggccttgcccgggaattactggctgtccgaagagagactggagaaggtggtggtctccttgcccttgtggtcccgctatggctcattttgattgagttcctcgttcggctggtcagagtggctggatagtgttggcccactccattcctcaggtttttttgaagcggcggtcttttagggagagccttttgttcctggaacttccttgatgggtcccttttcccttccgggttgtcttgggaacctggaaggaaacagggagatcaaagaagggcactggtttggggaagaggatggaggaggggtgagaacaggggcttcatagagaaatggtgcaggctggggtgggggttgtgccaggggaggacagggtaggagtcagagcttgggtgggccgttcactttgatagggcttctgggccagggttgagaggatgccttccacttcctcgcctctttggtgttggtgggtggttgttggacaatgggctggaggctcgtggtttcctggacatcttcaccagaccagcgtctctcaacagtctactccagtccacctggtctctccaagcctcccccaggacagtgaaggcaggccagcaggctagaaactcacagcgcatttttatgttagtcttgtggtagaattccttttccaggaaaccttggtcttttctcttaacaccttcaactaattggatgaggcccatccacattatggaagttaaactgctttacttaaaatcaactgattgtaaatgttgatcacatctacaaaataccttcacagcaacatctagactactgtttgaccacacagctgagcagtatagcctagacaagttgacacatagtactagccattgcacatatcttgcaccatacagaaatgtaactcaaaatgaactacagactttaaatgtcaaaattactttttttttttctaggaggaaacaaaaaaaaaattgtgtcacctgaagttatgtcttaagtcagctcaggctgccataacaaaatgccattgagtgagtagctaaaacaacagaaatttattttttttctcacagttttgaagtctggaagtcctagatcaaggactggcggggttggcttctggtgatggccttattcgtggcttgtagatggccctttattaatctgtccattcttggcctttcctctgtgcatgtgcagagagagagagaaagaaagagagagagagagagagagagagagagagagagagagagagagagaaagagagagagagagagagagagaaaggtcatgtaggcacaaaagtactttcttctgtctcttctcccttcttataaccaaactaattctatgggatcaaggtcccacccttatggcctcttttaacattaatcacttccctagaagcctcatctccaaatacagacaccctggggctgagggcttcaaaatatgaatttggtggaggacataagcattagcaaagaatagacacacagattaataaaacagaatagagctcagaaatagacctgcacgcatatagtcaggtgattcacaacaaaggcaataatggtgaaagtacaggttttccaacaaaaggtgtcggaacaattagacacctatacacaaattataataacctggacatatccttacatattccatgaaaactaactcaagatacatcataggtctaatgaaaaatgcaaaaacaatacaacctctataagaaaacataagagaaaatccacataactttgagtttggtgatgagtttttaaattcaacaccaaaagcatgatcaaggaaagaaaaatttgccaagttgattttattaaaataaaaatcttatgctcttcaaaggacaatgttaagagaatgaaaacagaagccacagactagcagaaaacatctgcggtacacatatgtgataaagaacttgtctctacaatatatgcgaattcttaaagctcaatgatagaaaaaatgaaaatagtcaaagatctgaacacacactacacaaaagaagatatacacatggcaaataagcataataaaagtactgagcaccctttggcattagataattgtgtactaaaatgggataccactgcacacctatcagaatgtccaaaatccatagaaaaccaaaacaaagaatacaagaccaagaacaattgccagcgaagatgtggagcaacggaaactctccttcattgctggtagaaatgcaaaatggcacagccactttggaaggcagtttggcgttttcttaaaaaaatgaaaatagacttagcacaagattcagcagccatactcaatcaatttacccaattgatttgaaaacttatgtctacataaaaatttgtatatgaatgtatacaatagcttatttcataatcaccaaaaatagaagcatccaaaatgtatttcatttggtgaatggatatatatatatatacatatatatatatatatataaccagacattgatactactcctcaatgaaaaggaataagttccaagccacacaaagttatacatgactcttcagttcattatgctaagtgaaagaaaccagtctaaaaaggctacatagtataagattctatttatatgacattctggaaaatgcaaaattataaagatgaaaaacctatcagtggtggccatggggtttatccgacaagcacaagggaatttatcagggcagtgaaactggtatgcataatactgcaatggtggttccgtgcttgctttggtctgaatatttgtgttgccacaaaattcatctgctgaattaccaaggtgatggtattaggcagaaggtggggtatttggagaatgactagatcatgagagcagagt

SEQ ID NO: 1563285 - DNA, 4001 bp, Homo sapiens
cccaaagtcctgggattacaccacgcccagcttagagggactccatctagaataggggctgggaacagggaggctgggacaggctgggcagcattccctggaggtcagccattcctgacgcaagatatgtgaacagatcaatactgtttactaaacagaccgaggactgaacagacacagaaacctcctgatgtgttgatatcttcagaacaaaagctttcatagtgtgagaatccgttttgctttaaaaatgataatattgggccaggcgcggtggcccacacctgtcatcccaccactttgggaggctggggcaggaagatagattgagtctaggagttcaagaccagcccgggaaacacagtgaaaccctcgtccctacaaaaatacaaatatttgccaggaatggtggcatttgcctttgacccagctactcgggaggccgagatgggaggattgcttgagcccaggaattcaagacagcagtcagctgtgattgcaccactgccctccagcctggatgacacagccagatgatctcaaaataataataataaaaaatatataatatgtatatatacaatattgattactgcaaaagatagtcatgacaaagatgaatcctttatcagtcacccttgtagtggagcatctctccccacgacttttttcttttagttatctttttttggggacagagttttgctcttgttgcccaggctggagtgcaacggtgcaatctgggctcactgcaacctccgcctcccgggttcaagcgattctcctgcctcagcctcccaagtagctgggattacaggcacacactgccacacctagctaattttttctatttttaataaaggtgtggttttgccatgttggccaagctgatctcgaactcctgagctcaggtgatccgcccgcctcagcctccaaaagtgttgggattacaggcatgagccaccgtgcccggcccccctttactatcttaataagcttgctttcagtttgcaatgtgaacttgcctccagttctttcttgggcaagatcccagaacccgttcttgaagtctggatcaggacccctttctagtaactagtaacaccatcacactccctccccctttcagctctgcgttcatctcttttcatctctttttttttctttttcttttttttgagacagaatctcgtcttgttgcccaggctggagtgcagtggtgcaatctcagctcactgcaagctccgcctcccgggttcaaacgattctcctgcctcagcctcctgagtaggtgggattacaggtgcctgccaccaccatgcccggctaattttgtatttttagtagagacggggtttctccatgttggccaggatggtctcgaactgtcgacctcaggtgatccacccgcctcagtctcccaaagtgctgggattacaggcgtgagccaccacgcccggccgcgttcatctctcgaaacggcttccggatgccacagatagctgtgaattcacgtgataattccgtgctagatactacaccccaacgccctgtagcttagcaatgtacagccaatcattaatcaattgtttttttctgtaaaccaacgagaattcccagcaaacagcttcacagaagccccctccctgtcctccaacaacacctccctctttttattttattttatttttttaattttgcctttaaaaacctgcatataacaaaggcagaagacaactcatatgcaaggttccttggctctcagtcttctgggccgctgtccccacttcggctcgagccaacgtttgaaatcttatgttccagttcagtctctttcttttctatcgacagacacagcagaaacatgtacccgggtgactcgacatgctcaaagaccacagaaggaaagaacttagcttacccccacggcatccgcttcctctccttccacctgcttttcttctctcggagactcccgcttctgagtagctcccttcagagttcctctgtgtcatcatacactccctgcccctccctcccctgcttcctcatttcataggattgggaaacctgtaattgctccgtgagttcattggctcctgacctcgtctccaaagactggcccgtggaacagctcaagtgtgagtcccacacacatctacacacacacacctgcacacacatgtatgtctgcacacacatctgcacacacagacctgcacacgcacacattcccacacgcccgcacacacgtgcacacacactcctgcacacatgcttgcacgcgtgtgcatgtttgcacacacacctgcacacacagacctgcacacacacacatctccacacacctgcacacagtgcgcacgggcgtacacacagctacacacacatctgcacacacacctgcacacatatgcatgtctgcacacacaactgcacacacagacctgcacacacacatccccacacacctgcacacagtgcacatgggcatacacacagctacacacatatctgcacacacatctgcacaaacaagcacactggcacagtcctgcacacacacctgcacacacatacatgtctgcacacacatctgcacacacagacctgcacactcacacatccccactttcctgcaggcacatgcatgtctgcacacacagacgtgcgcacacatccccacacacctgcacacagggcacatgtgtgtacacacagctacacacacacatctgcacacacacctgcacgtacgtctgcacaaacaagcacaatggcacacacacttgtctacacacgcacatctgcacacacacctgcacacacatgcatgtttgcacacacatctgcacacacagacctgcacacacatccccacacacctgcacacaatgcacatgtgcatacacacaactacacacacatctgcgcacacacctgcacacacatgcatgtctgcacacacaactgcacacacatccccacacacctgcacacagtgcacacgggcgtacacacagctacacacacatctgcacacacatctgcacaaacaagcacactggcacagtcctgcacacacacctgcacacacatacgtctgcaaacacatctgcacacacagacctgcacactcacacatccccactttcctgcaggcacatgcatgtctgcacacacagacgtgcgcacacatccccacacacctgcacacagggcacatgtgtgtacacacagctacacacacacatctgcacacacacctgcacgtacgtctgcacaaacaagcacaatggcacacacacacttgtctacacacgcacacctgcacacacacctgcacacacatgcatgtctgcacacacaactgcacacacagacctgcacacacacatccccacacacctgcacacagtgcacatgggcgtacatagaactacacacacacatctgtacacaagcacatctgcacacacacctgcacacatatctgtacacacacacacctgcacacagtgcacatgtgcatatacacaaggacacatgcacatctgcacacacatctgcaaacacacacctgcacacacatctgtacacacacacacctgcatacacatgcatgtctgcacacacagacctgcacacacacgcatgtctgcacacacagacctgcacacacacatcctcacacacctgcacacagtgcacatgtgcatacacacatctgcacacacacacatgcacacacacctacacgcacgtctgtacacacacctccatacacatgcatgtctgcacacacagacctgcacacacacatccccacacacctgcacacaatgcacatgtgcatacacacaactacacacacatctgcacacacacctgcacacacatctgtacacacacacacacctgcatacacgtgcatgtctgcacacacagacctgcacacacacatccccacacacctgcacacagtgcacctatccatacac

SEQ ID NO: 1563286 - DNA, 4001 bp, Homo sapiens
aaaaaaaaaaaaaaaaaatcaaaaactagtcttggcaacatagcaagatctcgtctataaaatttaaaaaaaaaaaaatttaaattagcttggcatggtggtgtatttctgcagtcccagctacttgggaggctggagtgggaggatacttgatcccagaaagctgaggctgcagtgagccgagatcgcgccactgcactccagcctgggtgacagagtaagactccatctcaaaaaaaaaaaaaaatcaaaaactagtcttggcaacatagcaagatctcctctataaaattaaaaaaaaaatttaaattagcttggcatggtggtgtatttctgcagtcccagctacttgggaggctggagtgggaggatacttgatcccagaaagctgaggctgcagtgagccgagatcacgccactgcactccagcctgggagacagagcgagatcctgtctcaaaaaaaaaaaaaaaaaaaaaaaaaagagagacagagaaagaaaaccgcttgaatgagaacaggcaaaggctctttatccagagtgatgtggctctgaacacacttcccaaattatggaaccttggcagtttaatataaagctgaaggaatttgagaaaattgcagaaacagaaagctgtctttgtctgtcttccctgaaccaggtcacaaaaacctggaaatactttcctgaagcagaggccctgacaccctcagtcaagagggtccctcccggaaacgcaaatcaaaaccacaatgagctatcattccacgccagtcacaatggctgctattaagaagtcaacaaacaagaggctgggtgtggcggctcatagctgtaatcctagcactttgggaggccgaggcacgggatcacctgaggccaggagattgagaccagcctggccaacatgacaaaaccccatctctactaaaaatacaaaaaaattagctgggcctggtggcaggcgcctgtaatcccagctactcgggaggctgaggcaggagaatcgcttgaacccgggaggctgagtttgcagtgagctgagattgagccattgcactccagcctgggcaacaagagggagactctgaaaagaaagaaaaagaaagaaggaaagaaagaaagaaagaaagaagaaagaggaagaaagaaacaaagaaggagaaaaaaaaaggagaaagaaagaaagaaagagagagagagagggagggagggagggaaggaaggaaagaaagaaaaacaatggaaggaagaaagagagagagggaaggagggaaggaagaaagagaaagaaagaagggagggacggaagaaggaaggaaagaaggaaacaatggaaggaagaaagagagaaagggaaggagggaaggaaggaagagaaagaaagagaagaaatgaatcaggagggagagaaggatggaaggaaggagagaaggaaggatggaaagagggagggcaggaggaagagaaggaagcaagggagggaaggaaggaaggaaggaaggaaggaacgaaggaaggaacgaaggaaggaaggaaggaaggaaggaaggaacgaaggaacgaaggaacgaaggaaggaaggaacactttggccccatgcagacatgggtcctcatcctggccccatcactacctggatggtcgttgggttaaactgtggaggtatctgagcctccgttttctcatctgtagaatgggtggatgggaattaacagcagaaaaggaggtgagaacaagaggagctctgagcttctggtgggttggctggtgcttattgggtccctcataaacattagagatgaaatgcagatggacccaggtatccagatgggtctccagatgcaggacatctaaacaggggccgcggagaaggttcagccaggtttccatacttacccgatttctctgggatcaggaggaatgctgggtgtggtaactcacagagcagaaggcttgtcaccaggagaagcatggtgctggtcagagagaagggaagagctgcaggagagaaaatatcacacagtgagaaggttgcctctcccaggacattcctggcaggggaccccagggaggtgatttggggaaacaaacccaggatggtggtcagccgctgacctggtcaaatgaggggtcatggccagctgggaaggtctgcagggccattattctgtctcccacatgggattaggacgtggacatctttggcatctcaagatggtcaatctagagtcaagcttccatggttcatgggtcatggctcagctgaccttcatgagggaacccatagctgacactaaaggcaggttctaacacacttcaaggaaattgcagtcactttcattcatttttcatagcttttactttctgttaataattagtggatttggggaaataagataaacgatggctcaggttttcattttcataacttttgttttgttttgctcttttgtactttttttttcttttttgagacaaagtcacgctctgtcacccaggctggagtgcagtggcgcgatctcggctcactgcaacctccacatcccaggttcacaccattctcctgcctcagcttcccaagtagctgggactacaggcgcctgccaccacacccagctaattttttttttttttttttttttttagtagaaacaggctttcaccgtgttagccaggatggtctccatctcctgacctcgtgatccacctgcctcggcctcccaaagtgctgggattacaggcgtgagccaccgtgcccggccctgctcttttatattttttaaaaaatcttgacttttgcaacagctataaaaggaaagtgaaaaaaaaaaaaaaaagaagaggaagaaaaaaagggtgagtacataaaacgacatgaatgaagtttaaatacttatgactaagggaaagaatccactttgagatggctgcagactgagtcattctaacacttggacactgtggaaaagacaaaatcatggaaacagtaaaaagatccggagttggttggcgttgggcagatggagggatgaatacatggacctcagaggatgtttagggcagtgaaactactcttatttgatacttctttatgcaaaaaaggaaaaagaaggaggaggaggaaaggtgcaggaggaggagaaggaggaggaggagaaggaagagaaggaggagtaggaggaagaggaggagaaggagcaggaggagaaggaggaggaggagaaggagcaggaggaggagaagaaggaggaggagaaggaggagtaggagaaggcggaggaggaggagagggaggaggaggagaaggaggaggaggagaaggaggaagaggagaaggaggaggaggagaaggaggaggaggagaaggaagagaaggaggagtaggaggaagaggaggagaaggagcaggaggaggagaagaaggaagaggagaaggaggagtaggagaaggaggagtaggagaaggaggagtaggagaaggaggagaaggagaaggaggagaaggaggagtaggaggagaaggggagctggaggaggaggagcaggaggaggaggaggaggagaaggaggaggagaaggggagcaggaggagaaggaggaggaggagaaggaggaggagaaggggagcaggaggagaatgaggaggaggagaaggaggaggaggagaaggaggaggaggagaaggaggaggaggagaagcaggaggaggagaaggaggaggaggagaagcaggaggaggaggaggagaaggaggaggaggaggagaaggagcaggaggaggaggaggagaaggagcaggagaaggaggaggaggaggaggagaaggagaggaaggaggagaaaagaagctactcggtatgattctacaaatggtggatccatgtcaatatacttctatccaagcccataaggaagaagaagaaaaaggaggaggagaaggaggaggaagaagaagaagaaggggaaagagaagaagaagaaagaagagaagaagaagg

SEQ ID NO: 1563287 - DNA, 4001 bp, Homo sapiens
gaattcgcgcccattcaggttccgcatggcactaagtgctgtctcttggtcttggtattcacagaagccataaccctttggctttcctgtctctctatcgtataccaatctggagagcagaaccaagtgtcaggaacaaatgttacacacatacagggttcctgctaacattgccatgctttaattgggcccactgtaacataaataaccttatatctctgacagcctcacagaaatattttttaaaactttttttttttttttcctgagatggagtcttgctctgttgcccaggctggagtgcagtggcatgatcttggctcactgctatctctgcctcccgggttcaagcaattctcctgtctcagcctcctgagtagctgggactacaggcatgggccaccacggcggctaatttttgtatttttagtagagacaaggtttcaccacattggtcaggctggtctcgaactcctgaccccaggtgatccgcctgcctcggcctcccaaagtgctgggattacaggcttgagtcactatgccctgcctaaaaaacatttttaacgaaaaaaacatattttaggtaagaataaatgtcaattgtatagtgtatcaattatatctcaataaagctgttacaagaacaaaatgtatgtgaaaagtcaccagtaaagaaaacctgccattattactaagagccaaatctgtggtgatttttaagaagctcccaccatgaaggaaaaggggatctcacctgaaactaacaacaggtccaacctcagaaaagatgtccttcaactgctcttcagtagcttcataaggaatgttccccactaaggaagaaaataggtaacattaaaattctgagtttataacatagatctttagtgagaaagtaaacttatatcatcaaatataagactcaaaatagtgttctccaatcccaattccattgtatttcttcagacctcttaacaaaggaaatataccactgaaactaaatacaaaatgtgtaggtactctcaaatgttagttctcagactgatctgacacgtgttagattttccttaactttggtgcaaataaatactttggcactggtatttacctaaagatctgcaagtctcatcagtgactacaaaaaatatcaatgttatttaatataatttttaaaacaggttcctatgtatttccacacatacaacatttaagggagaatgacgatgaatgtagtgaaagatgtttaaaaagtattctgaactactttgtcatgtccctttcaaatggtactctaaaataatcacacgtatttttaaaaacaacttatttcagccaaaaagataattcagaatcgtttcgatcctttttaaaattcctctgaggagatcttaatagttcattcattcattcacttacaagccatctcaggacaccaggtggccgctaccactattgatgcactaaaatgttacagataaaaagcaaaggatgaaagtccttaggagaggacagtaagtggacactaggatctataccctcagcatatagtctgtattctggggcagaggatgagaagtagtacgggacagtgaggagctgttaccgtgagccttctcctctagagaataattgaagctcatgaaaggagaaacgcacagaagctgaacgctagtctaacttccccactgatattgcggaaagcctacgagacctcggcagaatgggaatatctctttgctcatgagtccaccaggttggacgccctacaggataagcagggagaactgcacgtccgaaccgtcagcggctccggtagcgattcatgagatagaaggtgcagaggggagtccctccccgaagcttgactacaacgaattcctctcaccgaacacagaacgtagagaacgatccaccgctgggtctctcacagtcaaacccgccatagctctgttgagtcggcttccggtgcgccaaagcacacttccgtacggagcacaagcccagcgctgagcacgcttccgtacggcgcgtgagccggaagggcctgggcggaacggacgcagagcccctcccctggagacattctgttagccgcaggcgcgagttgcgtccaccggagggctatattctcactcctgagattaactctgttccgagccagatgcaggcgagtccaggctaatttgaagggtttcagcctgcagacttccttcttattaattttctcttaggttgatgcaagtactcctcaaccacaataaaggcgcagcggctttaccatggtaacagggaagtcctttgctgacaactgtggggcttgcattttagttccgccctatcaagggagggaaatgcttgggcccgtcccagcagcgtgcatattatttgctaaacctgttcgtgtgtggagtgagatgaggaaagggcatgccagccgagagaagcatagttaaagaaatgggagaggtaaagggagaacagacctctgtcctcgtgtagtccgtgggttccatgtgcttcgtggtggggcggtgcggcaggggattctggcaggcagagtatcggaaacagaaaacgtcattcatcggtttttccacactttggtgcccacgcgcctgggatatggcatgcagggcaggtcgttgtatcatcccggaaaggcagaccctgccggggttggaggaaatccagggggcacctcaggaggacagggttaggggataagcaaaggaaggagccaagagcgctacctttgagggacttgtccgaaaaaggaagacggtaaaatagccacggaattggaggcatggacgtttttattaattccacatgtattaaaagtatatgggccgggcgcggtggctcatgcctgtaatgccaacactttgggaggccgaggcgggcgcatcacctgaggtcgggagttggagaccagcctggccaacatggagaaccccttttctactaaaaatacaaaattagccgggcgtggtggcgcatgcctgtaatcccagctgctcaggaggctgaggccagagaatcgcttgaacccgggagatggatgttgcggtgatccgagatctgccattgcgctccagcctgggcaacaagagcgaaactccatctccaaaataaaagtatatgaaatatgataaatatttagaaaaaattaataagtgctagtttacaccatgaagcatatcactttaagaagtaattctggtaaagatggaaagtttgagaagagtatacccatttccatgactctagagtcccatttgcaatcactgtgtgaccaagaggacaccttgtgtaatggaatggtccaaaaggagatttacagctctgtagaaggcacagtttcaaagagttttggtgtgtcattgttccgttgtggtgaacttttgctaaatgcatgtacggctgagtatatttctaactcagtgtttggcaaacttacataaacaaaagattaacctggggtctttgagtaagagtatagattcctggggctccaccccagccctatggaatgggactccagggaaagaacttgggaatcgttatatttaaacaagtgccactggcgattcttagggtcaggtaatttgagtagcattgtagttattgaggtagctttatggcagcatttaagacacgcatgctttcttatgaaatttcccttaaagtagttctcaaagttctcaacccttgtggaggagcatttttggaaatgtacagtggcattttcagttgttgcaatgactactgctaggggaagagaagccagagatgataaatggactgccatgtccaaggcagttctacaggatgaacccctccccccactgaatgccaataatgtctctccccttgagaaacacttaatatcagccatattagaccaaatggaccctggatctgaatgctatgttgcactgccagccttgcataaataatttttactttagccttcttacaactgtgtagctgatcccaat

SEQ ID NO: 1563288 - DNA, 4001 bp, Homo sapiens
tatataagtattatatataagtattatatatataagtattatatataagtattatatatataagtattatatataagtattatatatataagtattatatgtaagtattatatatatataatatataagtattatatataagtattgtatatataagtattatatatataagtattatatatatataagtattatatatatataagtattatatatataagtattatatatatataagtattatatatatataatagtaatggcattgggtgattcaaagatgtttcttaaataataaaaagcactacccataaataatacactgactaataaaattaagagaatctgttcatctaaaatacattattgagatcgtgtaaaagcaaaaaagatttatagaagatactaaaattgtatacgtatttttatatatgtacatatatgcctgcgtgcatgtgtatataactcaaatacagaatatatggaaactacaaatccatttttaaaatacaaacatctcagtaaaagctggaggaaaatacctgaaaaggaacttcatgaaagacatagttaaatgaccaataaacacataaaatggtgctcaaaaaaaaaaaaaaacaataaatagctgggtgtggtggcactgcaatccagtctgggtgacagagggagacctcatctcaaaagacaaacaaaaatcaataaataaaaacaatttttttaaaaaggtgctcaatctcattaatcggcagagaaatgcgagtgtagacataaggagagatcactgcacacccatcggagtggctggaatgaaagactaactgtacagcgagtgttcgaatgtggcacagctggaaccttcgaatatttctggacttccattcccacacagacacctgaggctgtggccgaaaggtcagatagagtcccggtgaagagttccttcagaattgagatcaacccaccgaggaaaagcaccccaacctgggtagagacagagttcccaaggtcacgtggcctccctcatggctgacacagagctccctgagtcccaccataggcttagagaatccaaggaacagcaccccattcccccgcagcaccgggagagagcacccaccaccaagacaaagcatccggtaagcgtccacatcgcggataagcagaaccaaagaaaagccaacacatcctagctgagagtgagcgacatccaagggcaaatgtgcctcacggacgacatcagcacccaaggaagagtccctcgcaggttgagataaagcccccgtcagcgatcccacagggcggcgatcatgcgtctgggacacagccacccccaccatgttccatgagaacagatagagtccccaaggcagagcccccgctcaggactgcgactgagtgggaaagaaacagcaccgcacccgaggccgacacaagcaaccaaggcatggcccccacccccgggctcaggtcatttcagtaggaaaagtccctagcatcaccgagacagagcccccaagaaaagccccccggcctcacaacatggctgagacgaggtgcccaaggaaaacgctcccccgcggctgacacaggcgcccatggcggtgtccccagagctgagccacttccccaagggagccctaccacacaccagacagagaacaccacagaaaagactctttctgaggaaaaaggacactttctggggtgaaattaaagcatccagggaaaaactgccccactcacagtccttaagtcctgaccttgctggaggagagacagcagcacctcacaaaatggcagtgaagttgtggcgcctccccactggtggcactttctagaaacctgccctctgggagttgtgggaaatgtgccccctagggcacctgggagtgatgtgcatggggaggcgtctcaccagaagcaccgatcccgtttggtccaaaggggatggaaggaagggaagcagccagccacagtgtgctggcccagccgaacactgggaacctgttgggggcgccagaatcctgaggtgaagcctcgtgccccagagaaccaggaagcgcagccctccccttcgctgactggcgccctctacaggcgaccttcagtaacaactgcacagcaacataagcagaggaacgcagaaccttctcacacagtgggatgaaatcgcctgggtaacatagtgagaccccggctctacagagcaaccaaccaaccaaaaaaaaaaaaaacacacacaaaaattagctgggcatggtggcgggcgcctgtggtcccaactactcgggaagttgaggtgggaggatcgctggaacccaggaggcagaggtagcagagagccgagaacgcaccaccgtactccagcctggccatagaggagactctatctcaaaaaaaaaaaaggaaagaagaaagaaagaaagaaagaaagaaagagagagagagagagaggaaggaaggaaggagaaagaaaagaaagaaagaaagaaagaaagaaagaaagaaagaaaaaaagaaaagaaaagaaaagaaagaaagaaagaagaaagaaagaaagaaacgacaacatcaacaaactgaaatcttcattggatggggttgtgttttaaagtcaaccccaacgggcgctgtggctcgcgcctgtaatctcagcactttgggaggccaaagcagctggaccacctgaggtcaggagttcgggaccagcctggccaacatggtgaatctcgtctcaactaaaaatacagaaaattaaccgggcgtggggcgcgcacctgtagtcccaacagctacttgggaggctgaggcaggagaatcacttgaactggggaagtgaggttgcagtgagctgagatcacaccactgcactccagcctgggtaacagagcgagactctgtctaaaaatataaataaataaataaataaatataaattcaacctctatctgttaaaggtaacagttgttaattgataagaaaaatgagggccacagtgtggtggctcatgcctgtaccccagcactttgggaggccaaggtgggtagattccttgagcccaagagttcaagagtggcctgggcagcatggtgaaaccccgtctgtacacaagatacaaaaattagctgaaagtgtacttgtggtcccagctacttgggaggcttgagaccaggaggcttgagactaggagtttgaggctgcattgagctttgatcgcatagcctgggtgacaaagtgagactgtctaaaaaaaaaaaaaaaaaaaaaaaaagaaagaaaaaaagaaaggaggggaaaccttattatattgcatctattaatcattttaatctggaactttgtatatttttccaccttttttattttttttgagacagagtctggctctgtcacctaggctggagtgcagtgccataatctcggctcactgcaacctccgcctcccaggttcaagtgattctcctgcctcagcctccccagaagttgggattacaggcatgcaccaccatgcccggctaatttttgtatttttagtagagacagtgtttcaccacatcggccaggctggtctcaaactcctgacttcaagtgattcatcttccttggcctccaaaagtgctgggattacaggtgtgagccaccacgccccgcccatttttccactttcataacttattttaagtgcagcaaaatttacttgaattgttcatagtggcaaaaaatattacagcgaaagttttggagttttaatggaacaagcagtttcactcttgacacaattatttggaagggattacttcactggttttgtaattcaaaagttatgtttgtaaaaaaaaaattaaaaatatagccaggcatggtggtgggcacctgcaatcccagctactcgggaggcagaggcaggagaatcacttgaacctgggaggcacaagcttcagtgagcagagatcgagccactgcactccagcctgggcgacaaagggagactccgtctt

SEQ ID NO: 1563289 - DNA, 4001 bp, Homo sapiens
tttgaagggacatgtgtcagcaagctaacacaggaacagaaaaccaaacaccacgtgtcctcactcataagtgggagttgaacaatgagaacacatgggcgcggggagaagaacatcacacagtggggcctgtcaggggttggggggctaggggagggatagcgttagagaaatacctaaggtagatgacgggtcaatgggtgcagcaaacaaccatggcatgtgtcttcctatgtaacaaacctgcacgttctgcccatgtatcccggaacttaaagtataattttaagaaaaggaatattatcgtaatggcattgggtgagtcaaagatgtttcttaaaataataaaaagcactatccataaataatacactaattaataaaattaagagaatctgttcatctacaacacattattgagatcgtgtaaaagcaaaaaagatttatagaagatactaaaattgtatatgtatttttgtatatgtacatatacgcctgtgtgcctgtgcgtataactcaaatacagaatatatggaaactacaaatccatttttaaaatacaaacatctcagtaaaagctgggggaaaatacctgaaaaggaacttcataaaaggcatagttaaatgaccaataaacacataaaatggtgctaaaaaaaaaaaaaagaaaacaataaatagctgggtgtggtggcactgcaatccagtctgggtgacagagggagacctcatctcaaaagacaaacaaaaatcaataaataaaaacaatttcttaaaaaggtgctcgatctcattaatcagcagagaaatgcgagtgtagacataaggagagatcactgcacacccatcagagtggctggaatgaaagactaactgtactgagagtgttcgaatgtggcacagctggaaccttcgaatatttctggactcccattcccacacagacacctgaggctgtggctgaaaggtcagatagaatcccaggaaagagctccttcagaattgcgatcaaccaaccgaggaaaagcaccccaacctgggtcgagacagagttcccaaggtcacgtggcctccttcatggctgacacagagctccctgagtcccaccataggcttagagaatccaaggaacattaccccattccccggcggcaccgggagagagcacctacagataataattttaaaaacccagcaccaagagaaagcatccagtaagcgtccacaacggggataagcagaaccaaagaaaagccaacacattgtaactgagagcgagcaacatccgaggacaaatgcgcctcacggccgacatcagtacccaaggaagagtccaccagaggttgagataaagcccccgacagtgaccccacagggctacgatcatgtgtccggggcacagccacccccaccacgttccatgagcacagatagtgtccccagggcagagtcccccctcaggacagcgactgagcgggaaagaaacaccgccgcacccgaggccgacacaggcaaccaaggcatggcccccaccccccgggctcaggtcatttcagcaggaaaagtcgccttttccatcaccgacagggagcccccaacaagagcccccaagaaaagccccctggccccacaacatagccgagacggggtgcccaaggaaaacgctcccccgcggctgacacaggcgcccatggcggtgtccccagagctaagccacttccccaagggagccctcccacacaccagacagagaacaccacagaaaagactctttctgaggaaaaaggacactttccagggcgaaattaaagcatccagggaaaaactgcccactcacagtcctgaagtcctgaccttgctggaggagagacggcggcacctcacaaaatggcagtgaagttgtggcgcctccccactggtggcactttctagaaacctgccctctgggagttgtgggaaatgtgccccctagggtacctgggagtgatgtgcatggggaggcgtctcaccagaagcaccgatcctgtttggcccaagggggatggaaggaagggaagtagccagccacagcgtgcctgccccagccgaacactgggaacctgttgggggcgccagagtgctgaggagaagcctcgtgccccagagaaccaggaagcgcagccctccccttcgttgactctggcgccctctgcaggcgaccttcagtaacaactgcacagcaacataagcagaggaatgcagaaccttctcacccagcgggatgaaatcgcctgggtaacatagtgagaccctggctctacagagcaaccaaccaaccaaaaaaacgcagacaaaaattagctgggcatggtggcgtgtacctgtggtcccaactactcgggaagttgaggtgggaggatcgcttgaacccgggaggtggaggtagcagtgagccaagatcgtgccagtgcactctccatcccagaccatacagaagactccatcaaaaaaaaaaaaaagaaagaaagaaaaagaagcaacaacaacaacaaactgaaattttcatttgagggggttgttttttaaagtcaaccccgaccgggcgcagtggctcacgcctgtaatgtcagcaccttgggaggccgaagtgtctggatcacctgaggtcaggagtccaagaccagcatggccaacatggtgaatcccgtctctactaaaaatacagaaaattagccaggtgtggtggcacgcacctgtagtcccgctaaggaaggagaccactactactcctgctgccctcctccccctaccttgcctagttcacaagacaggaggaaagaaagaaagcaaaaagttggaaaaaaaaaaaaaaagtaaaataaatagccagacaaccttggcaccaccacccggccctaggagttaaaaaaagtaataataatttcaacccctgacctaaactacttgtgttatctctaaattccagacactgtatgaaaaaaagcattgtaaaacttattgttctgttagctgctgcatgtagcccccagtcacatttcccacacttgctcaatttatcacgactctttcacgtggaccccttaaagttgtaagcctctaaaaaggccaagaatttctttttcggggaactcagctcttatgatgcaagttggctgatgctcccagccgaataaaccacttccttctttaatccagtgcctgaggagttttgtctgcggctcatcctgctacatttcttggtttcctgattaacggacagtcgaggcagccccttaggcagctcatgcctgccctgtagagcatccctgctgggaactctggccagcttgagcgatgcagatcctgagagcgctccggggtaggcatttgcccctgtggaacgccttgtcagagcagtgcacagcaggcccccgcggaggatcaacgcagtggctgaacaccaggaaggaactggcactttaagtctggacatctaaaacttggtaagactggtctttggaacttgccgactccatttgagtggaagcatggccagatcacccacggtgtacctgtaccagccctttggtttttgtttttgacttgacttgaattgcttgataattttagttttgattttgacttgacttgaattgcttgataaaaaggcgtgcctttattggcactttggtttaccttccatggaatggaagacattattaagagacattattgttaattctctcagaatgaacataccaatcatttaaaattccaccgtgttaacaaaattttttctgaaaattgacaaacagataattgttttaagtatgtgcaaatcgaaggtttggtaaagctaagacaatctttaagaaaaagaactaagttggtaaatacacactactaaatatgagatttactataaaggtagagtaattaaaaccgtgtggtattggagcaatgacaggtaaatacaccaagggcagaggacacagaggccagaaacaatctggaaatggaaa

SEQ ID NO: 1563290 - DNA, 4001 bp, Homo sapiens
atatatgtatctgacaacaactgagtggaatccagagtatatccagaactacaaatcaattttaaaagcaaacatcgcaataaaatttggggggaaaagctgaatatgcatatcataagagtcatactcaaatatacctttagtaatcacataaaatatacccggactctgactttactccattccatgaaaatttatttgaggtgaataggagatctagaagaaaacttagaatattatcgtcatggcattgggggaggcaaagattttcacttaaaataataaagagctctagccataaacaagactgattaataagattaagagaatctgttcatctaaaacacattattgagatagtgtaaaagcaaaacagatttgtagaagacattaaaattgtatatgtattttaatacatgtacatatatgcctgtgtgcatgtgtgtacaactgaaacccagaatatatgtaaactacaaatccatttttaaaatacaaacatctcaataaaatttggcagaaaagacctcaaagggaacttcctaaaagacatggttaaatgaccaataaacacatgaaaaagtgctccgaaaaaaaaaaaacaataaatagctgggcgcagtggctcacgcctgtaatcccagcactttgggaggccgaattgggcagatcacttgagtccaggagttcgagaccagcctgggcaatttggcaaaaccccatctctactaaaaaatacaaagattagccaggcttggtggcatgcgcttgtagtcccagctactgaggcacgagaatcgagcgagcctgggagcccaaaaaacaatcaaaaatcgataaattaacacttttaaaaagggtgctcaatctcattaattagcacaaaattgcaagtgtagacataaggagagatcactacactcccaaagagtggctggaatgaaagaataattgcacagtgagttgtgtgcatgtggcgaatctggaaccttcaaacatttctggaccccgattcctgcacagacatctgaggctatggctgaaaggtcagatagaatcccagggaagagctccctcaggactgagaaccaaccaaggaaaagcacccaaccctggggtgagacagagttcccaaggtcagctgggtgccctcgtggctgacacaagagttccccgagtcccaccacaggctcagagaatccaaggaacagcaccccactcccccacagcaccaggagacagcacccacagataataattttaaaaacccagcaccaagagaaagcgtctggtaagcgtccccatcagggataagcagaaccaaagaaaagccaacacatcctagctgagagcgagcaacatctaaggacaaatgtgccccacagccgagaacagcactcaaggaagagtccctcacaggctgagataaagcccgcgacagagagtgaccccatagggctgtgatcatgtgtccagggcacagccaccaccaccccggcccttgaacatagacagagctcccaaggcagagtcccccctcagggctgccaccgagcagggaagaaacacggccacacccgaggctgacacaggcaaccaaggcagggtccccaaccctgggcttaggtcatttcagcaggaaaagcccctcacatcactgagggagcccccaagaaaagccccccggacccacaacatagccgagatggggtgcccaaggaaaacgctcccccatggttgacacaggctcccatggcggtgtcctcagagtggagccactttcccagggaaccctaccacacacccgacagagaacacctcagaaaagacactttctgaggaaaaaggacactttcccgggcgaaattaaagcatccagggaaaaactgccccactcacagtcctgaagtcctgaccttgccggaggaggggcggcagcacctcacaaaatggcagtgaagttgtggcgcctccccactgttgtaactttgtagaaacttgccgtttgggagttatgggaaacgtgccccctcgcgtgcttgggagtgatgctcatggggaggcgtctcaccagaagcaccaatccggaaaggctcaaggcggatggaaggaagggaagctgaccgctttcgcgtgccctcccccagcctaacactgggaacctgtgtggggcgccagagtccggaagagaagttttgcgctcagcaggaccgctggcgccagcgggagaaccaggaagcgcagctctccccttagctgactctggtgctctctacaggtggccttcactatcaactgcacagcgggcagaggcagaggaacacagaaccttctcacacagcgggataaaagggtgaatttggagctgacaggcaaatatatcttgtgatatatttctctggctttgatatcagggtaatattggccgcatagaatgaagtagtgttcctccgttattttttggaagacattgctaagtactggtattatttcttccttaaatgtttgatagaatttgcacgcgaagccatcttggcttggcttgtatttctggggagattttaaattactaattaaatctcttttcatgctatagtcctaagtcgattttctacttattatttatttatttatttattcatttattttgagacggagtttcactcttgttgttcgctcttgttgcccggggtggagtgcaatggcatgatcttggctcacccaacctccgcctcccgggttcaagtgattctcctgcctcagcctcccaaatagctgggattacaggcatgcgccaccacgcccagctaattttgtatttgtagtagagacggagtttctccatgtttgtcaggctggtctcaaactcccaacctcaggtgatccgcccgccttggcctcccaaagtgctgggattacaggcgtgagccactgcacccagcctgtttcttcttgagtcggtaatttgtcttccaagaattttttccattttacctaagttgtttagtttgttggcgtaaagttgttcataatgtattccttttaatttctgtaaggtcagtattaataacccccctttcatttttgattttgataatctgtgtagtcctttctatttttcttggtcagtcaagctaaaagattgttagattttttttttcaccttttcggtgaaccaacttttgatttcattgatttttctgtttcttatttcattgattttcttctactctaattttcatcattcccctccttctgcttgcttgtattaaatacatcagtttaaaacttcaggaataacaaaagatttgtttcgcaaaggaagatttgaaatgttagacatgtagaaatgcttatgatattgcaagtagcagtcatttcgaccagttaaccagaaggaaattcggtgtgctgaaaccaaacaagtgtttttttgtgccgggcttttactgattttgaaaatatcaagtctagtttgtgggaagctgtttattgcatgagcagtttatttttttaatgttttaatatagagaatgcccatgttcactaaatcccacaagtttgtttgtttgtttgtttgttttttaacttaaaggaaagtatgtattaaccagcacatacactatcctctttgtgctttatctctggtaatccttataagagcaccatgagttagatactgttttatgccctttttatggaaatagaatcttagagtgtacatttaagtagctctcccaggtataactagctggaaaagtgacagaacctaggtctctcagattccagagattgcacacacgaatactatatcacactgcttactgctgtgagttcagcagagaattccttgtttatatggaaataacaaaattgatagtatccaggataattggcaacagtttacaaaccctctttacccccactttggtgattttaagtggggtcatctgtccactaaattaaacagatcttaggctggtcacacttctaaaattgta

SEQ ID NO: 1563291 - DNA, 4001 bp, Homo sapiens
ggacgcggggagaagaacatcacacagtggggcctgtcaggggttggggggctaggggagggatagcattagagaaatacctaaggtagatgacgggtcaatgggtgcagcaaacaaccatggcatgtgtcttcctatgtaacaaacctgcacgttctgcccatgtatcccggaacttaaagtataattttaagaaaaggaatattatcgtaatggcattgggtgagtcaaagatgtttcttaaaataataaaaagcactatccataaataatacactaattaataaaattaagagaatctgttcatctacaacacattattgagatcgtgtaaaagcaaaaaagatttatagaagatactaaaattgtatatgtatttttgtatatgtacatatacgcctgtgtgcctgtgcgtataactcaaatacagaatatatggaaactacaaatccatttttaaaatacaaacatctcagtaaaagctgggggaaaatacctgaaaaggaacttcataaaaggcatagttaaatgaccaataaacacataaaatggtgctaaaaaaaaaaaaaaaaagaaaacaataaatagctgggtgtggtggcactgcaatccagtctgggtgacagagggagacctcatctcaaaagacaaacaaaaatcaataaataaaaacaatttcttaaaaaggtgctcgatctcattaatcagcagagaaatgcgagtgtagacacaaggagagatcactgcacacccatcagagtggctggaatgaaagactaactgtactgcgagtgttcgaatgtggcacagctggaaccttcgaatatttctggactcccattcccacacagacacctgaggctgtggctgaaaggtcagatagaatcccaggaaagagctccttcagaattgcgatcaaccaaccgaggaaaagcaccccaacctgggtcgagacagagttcccaaggtcacgtggcctccttcatggctgacacagagctccctgagtcccaccataggcttagagaatccaaggaacattaccccactccccggcggcaccgggagagagcacctacagataataattttaaaaacccagcaccaagagaaagcatccagtaagcgtccacaacggggataagcagaaccaaagaaaagccaacacattgtaactgagagcgagcaacatccgaggacaaatgcgcctcacggccgacatcagtacccaaggaagagtccaccagaggttgagataaagcccccgacagtgaccccacagggctacgatcatgtgtccggggcacagccacccccaccacgttccatgagcacagatagtgaccccagggcagagtcccccctcaggacagcgactgagcgggaaagaaacaccgccgcacccgaggccgacacaggcaaccaaggcatggcccccaccccccgggctcaggtcatttcagcaggaaaagtcgccttttccatcaccgacagggagcccccaacaagagcccccaagaaaagccccctggccccacaacatagccgagacggggtgcccaaggaaaacgctcccccgcggctgacacaggcgcccatggcggtgtccccagagctaagccacttccccaagggagccctcccacacaccggacagagaacaccacagaaaagactctttctgaggaaaaaggacactttccagggcgaaattaaagcatccagggaaaaactgcccactcacagtcctgaagtcctgaccttgctggaggagagacggcggcacctcacaaaatggcagtgaagttgtggcgcctccccactggtggcactttctagaaacctgccctctgggagttgtgggaaatgtgccccctagggcacctgggagtgatgtgcatggggaggcgtctcaccagaagcaccgatcccgtttggcccaagggggatgggaggaagggaagtagccagccacagcgtgcctgccccagccgaacactgggaacctgttgggggcgccagagtgctgaggagaagcctcgtgccccagagaaccaggaagcgcagccctccccttcgctgactctggcgccctctacaggcgaccttcagtaacaactgcacagcaacgtatgcggaggaatgcagaaccttctcacccagcgggatgaaatcgcctgggtaacatagtgagaccccggctctacaaagcaaccaactaatcaaaaaagaaagaaagaaagaaagaaacacacaaattagctgggcctagtggcctcgcacctgtggtcccaactactcgggaagttgaggtgggaggatggcttgaacccgggaggtggaggtagcagtgagccactgcactccagcccaggcggtagaggagaccccatctcagaaaaaaaaaaaaaaagaaagaaagaaggaaaagaaaagaaaaagaaaaagaacaacaacaaactgcaattttcatttgagggggttgtgttttaaagtcaaccccgacccgccacagtggctcacgcctgtaatctcaacactttgggaggccgaaggggctggaccacctgaggtcaggagttcgagaccagtctgtctgaccaacatggtgaatcccgtctctgctaaaaatacagaaaattaccgggcgtggtggcatgcacctataatcccaccagctacttgggaggctgaggctggagaatcgcttgaaccgggcaggcagaatttgcagtgagctgagatcatgccactgcactccagcctgggtaacagagtgagactctgtctaaaaataaaaatcaatcaatcaataaataaagtcaacctctatctgttaaaggtaaccattattgttaattgataagaaaaatgagggccccagtgcggtcgctcacgtctgtaatcccagcaatttgggagaccaagaggggtggattccttgagcccaggagttcaagagcagcctgggcagcatggtgaaaccccatcttaacacaaaatacaaaaattagctgagcgtgtaactgtggtcccagctgctcgggaggcttgacaccaggaggttgaggctgcattgacctttgttcgcaccattgcactatagcctgggtgacagagtaagactgtctacaaaaaaaaagaaagagagaaagaaagagagaaagaaagaaagaaagagaaagaaaaaagaaggaaggaaggaaagaaagaacgaaagaaagaaaggaaggaagaaaggaaggatggaagaaagaagggaagaaaggaagaaaggaaggatggaagaaagaagggaagaaaggaagaaagaaagagagaaagaaagaaaggatggaaggaggggaaaccttattatattgcatctattaatcattttaatctggaactttgtatatttttccaccttttttattttttttgagacagtctggctctgtcacccaggctggagtgcagtggcatgatcttggctcactgcaacctccgcctcccaggttcaagcagttctccttcctcagcctcccgagaagctgggattacaggcatgtaccaccatgcccggctggtatttgtatttttagcagagacggtgtttcacaatgttctccaggctggtctcaaactcctgactttaagtgattcatctgccttggcctcccaaagtcctgggattacaggggagagccaccatgcccggcccatttttctactttcacaacttattttaagtgcagcaaaatttacttgaattgtccatagtggtaaaaaatattacagcgaaatttttcgagttttaatggaacaggcagtttcactattgacacaattatttggaagggattacttcactggttttgtaattcaaaagttatgtttgtaaaaaacttaaaattaaaattaaaaaatatagccaggcatggtggtgggcacctgtactccctgctactagggcagcagaggcaggagaatcacttgaacctgagaggtgcaagcttcag

SEQ ID NO: 1563292 - DNA, 4001 bp, Homo sapiens
ggggagaagaacatcacacagtggggcctgtcaggggttggggggctaggggagggatagcgttagagaaatacctaaggtagatgacgggtcaatgggtgcagcaaacaaccatggcatgtgtcttcctatgtaacaaacctgcacgttctgcccatgtatcccagaacttaaagtataattttaagaaaaggaatattatcgtaatggcattgggtgagtcaaagatgtttcttaaaataataaaaagcactatccataaataatacactaattaataaaattaagagaatctgttcatctacaacacattattgagatcgtgtaaaagcaaaaaagatttatagaagatactaaaattgtatatgtatttttgtatatgtacatatacgcctgtgtgcctgtgcgtataactcaaatacagaatatatggaaactacaaatccatttttaaaatacaaacatctcagtaaaagctgggggaaaatacctgaaaaggaacttcataaaaggcatagttaaatgaccaataaacacataaaatggtgctaaaaaaaaaaaaaaagaaaacaataaatagctgggtgtggtggcactgcaatccagtctgggtgacagagggagacctcatctcaaaagacaaacaaaaatcaataaataaaaacaatttcttaaaaaggtgctcgatctcattaatcagcagagaaatgcgagtgtagacataaggagagatcactgcacacccatcagagtggctggaatgaaagactaactgtactgcgagtgttcgaatgtggcacagctggaaccttcgaatatttctggactcccattcccacacagacacctgaggctgtggctgaaaggtcagatagaatcccaggaaagagctccttcagaattgcgatcaaccaaccaaccgaggaaaagcaccccaacctgggtcgagacagagttcccaaggtcacgtggcctccttcatggctgacacagagctccctgagtcccaccataggcttagagaatccaaggaacattaccccattccccggcggcaccgggagagagcacctacagataataattttaaaaacccagcaccaagagaaagcatccatccagtaagcgtccacaacggggataagcagaaccaaagaaaagccaacacattgtaactgagagcgagcaacatccgaggacaaatgcgcctcacggccgacatcagtacccaaggaagagtccaccagaggttgagataaagcccccgacagtgaccccacagggctacgatcatgtgtccggggcacagccacccccaccacgttccatgagcacagatagtgaccccagggcagagtcccccctcaggacagcgactgagcgggaaagaaacaccgccgcacccgaggccgacacaggcaaccaaggcatggcccccaccccccgggctcaggtcatttcagcaggaaaagtcgccttttccatcaccgacagggagcccccaacaagagcccccaagaaaagccccctggccccacaacatagccgagacggggtgcccaaggaaaacgctcccccgcggctgacacaggcgcccatggcggtgtccccagagctaagccacttccccaagggagccctcccacacaccggacagagaacaccacagaaaagactctttctgaggaaaaaggacactttccagggcgaaattaaagcatccagggaaaaactgcccactcacagtcctgaagtcctgaccttgctggaggagagacggcggcacctcacaaaatggcagtgaagttgtggcgcctccccactggtggcactttctagaaacctgccctctgggagttgtgggaaatgtgccccctagggcacctgggagtgatgtgcatggggaggcgtctcaccagaagcaccgatcccgtttggcccaagggggatgggaggaagggaagtagccagccacagcgtgcctgccccagccgaacactgggaacctgttgggggcgccagagtgctgaggagaagcctcgtgccccagagaaccaggaagcgcagccctccccttcgctgactctggcgccctctacaggcgaccttcagtaacaactgcacagcaacgtatgcggaggaatgcagaaccttctcacccagcgggatgaaatcgcctgggtaacatagtgagaccccggctctacaaagcaaccaactaatcaaaaaagaaagaaagaaagaaagaaagaaacacacaaattagctgggcctagtggcctcgcacctgtggtcccaactactcgggaagttgaggtgggaggatggcttgaacccgggaggtggaggtagcagtgagccactgcactccagcccaggcggtagaggagaccccacctcagaaaaaaaaaaaaaaaaaaaagaaagaaagaaggaaaagaaaagaaaaagaaaaagaacaacaacaaactgcaattttcatttgagggggttgtgttttaaagtcaaccccgacccgccacagtggctcacgcctgtaatctcaacactttgggaggccgaaggggctggaccacctgaggtcaggagttcgagaccagtctgtctgaccaacatggtgaatcccgtctctactaaaaatacagaaaattaccgggcgtggtggcatgcacctataatcccaccagctacttgggaggctgaggctggagaatcgcttgaaccgggcaggcagaatttgcagtgagctgagatcatgccactgcactccagcctgggtaacagagtgagactctgtctaaaaataaaaatcaatcaatcaataaataaagtcaacctctatctgttaaaggtaaccattattgttaattgataagaaaaatgagggccccagtgcggtcgctcacgtctgtaatcccagcaatttgggagaccaagaggggtggattccttgagcccaggagttcaagagcagcctgggcagcatggtgaaaccccatcttaacacaaaatacaaaaattagctgagcgtgtaactgtggtcccagctgctcgggaggcttgacaccaggaggttgaggctgcattgacctttgttcgcaccattgcactatagcctgggtgacagagtaagactgtctacaaaaaaaagaaagagagaaagaaagagagaaagaaagaaagaaagaaagagaaagaaaaaagaaggaaggaaggaaagaaagaacgaaagaaagaaaggaaggaagaaaggaaggatggaagaaagaagggaagaaaggaagaaaggaaggatggaagaaagaagggaagaaaggaagaaagaaagagagaaagaaagaaaggatggaaggaggggaaaccttattatattgcatctattaatcattttaatctggaactttgtatatttttccaccttttttattttttttgagacagtctggctctgtcacccaggctggagtgcagtggcatgatcttggctcactgcaacctccgcctcccaggttcaagcagttctccttcctcagcctcccgagaagctgggattacaggcatgtaccaccatgcccggctggtatttgtatttttagcagagacggtgtttcacaatgttctccaggctggtctcaaactcctgactttaagtgattcatctgccttggcctcccaaagtcctgggattacaggggagagccaccatgcccggcccatttttctactttcacaacttattttaagtgcagcaaaatttacttgaattgtccatagtggtaaaaaatattacagcgaaatttttcgagttttaatggaacaggcagtttcactattgacacaattatttggaagggattacttcactggttttgtaattcaaaagttatgtttgtaaaaaacttaaaattaaaattaaaaaatatagccaggcatggtggtgggcacctgtactccctgctactagggcagcagaggcaggagaatcacttgaacctgagagg

SEQ ID NO: 1563293 - DNA, 4001 bp, Homo sapiens
gcgcggggagaagaacatcacacagtggggcctgtcaggggttggggggctaggggagggatagcattagagaaatacctaaggtagatgacgggtcaatgggtgcagcaaacaaccatggcatgtgtcttcctatgtaacaaacctgcacgttctgcccatgtatcccggaacttaaagtataattttaagaaaaggaatattatcgtaatggcattgggtgagtcaaagatgtttcttaaaataataaaaagcactatccataaataatacactaattaataaaattaagagaatctgttcatctacaacacattattgagatcgtgtaaaagcaaaaaagatttatagaagatactaaaattgtatatgtatttttgtatatgtacatatacgcctgtgtgcctgtgcgtataactcaaatacagaatatatggaaactacaaatccatttttaaaatacaaacatctcagtaaaagctgggggaaaatacctgaaaaggaacttcataaaaggcatagttaaatgaccaataaacacataaaatggtgctaaaaaaaaaaaaaaagaaaacaataaatagctgggtgtggtggcactgcaatccagtctgggtgacagagggagacctcatctcaaaagacaaacaaaaatcaataaataaaaacaatttcttaaaaaggtgctcgatctcattaatcagcagagaaatgcgagtgtagacataaggagagatcactgcacacccatcagagtggctggaatgaaagactaactgtactgcgagtgttcgaatgtggcacagctggaaccttcgaatatttctggactcccattcccacacagacacctgaggctgtggctgaaaggtcagatagaatcccaggaaagagctccttcagaattgcgatcaaccaaccgaggaaaagcaccccaacctgggtcgagacagagttcccaaggtcacgtggcctccttcatggctgacacagagctccctgagtcccaccataggcttagagaatccaaggaacattaccccattccccggcggcaccgggagagagcacctacagataataattttaaaaacccagcaccaagagaaagcatccatccagtaagcgtccacaacggggataagcagaaccaaagaaaagccaacacattgtaactgagagcgagcaacatccgaggacaaatgcgcctcacggccgacatcagtacccaaggaagagtccaccagaggttgagataaagcccccgacagtgaccccacagggctacgatcatgtgtccggggcacagccacccccaccacgttccatgagcacagatagtgaccccagggcagagtcccccctcaggacagcgactgagcgggaaagaaacaccgccgcacccgagaccgacacaggcaaccaaggcatggcccccaccccccgggctcaggtcatttcagcaggaaaagtcgccttttccatcaccgacagggagcccccaacaagagcccccaagaaaagccccctggccccacaacatagccgagacggggtgcccaaggaaaacgctcccccgcggctgacacaggcgcccatggcggtgtccccagagctaagccacttccccaagggagccctcccacacaccggacagagaacaccacagaaaagactctttctgaggaaaaaggacactttccagggcgaaattaaagcatccagggaaaaactgcccactcacagtcctgaagtcctgaccttgctggaggagagacggcggcacctcacaaaatggcagtgaagttgtggcgcctccccactggtggcactttctagaaacctgccctctgggagttgtgggaaatgtgccccctagggcacctgggagtgatgtgcatggggaggcgtctcaccagaagcaccgatcccgtttggcccaagggggatgggaggaagggaagtagccagccacagcgtgcctgccccagccgaacactgggaacctgttgggggcgccagagtgctgaggagaagcctcgtgccccagagaaccaggaagcgcagccctccccttcgctgactctggcgccctctacaggcgaccttcagtaacaactgcacagcaacgtatgcggaggaatgcagaaccttctcacccagcgggatgaaatcgcctgggtaacatagtgagaccccggctctacaaagcaaccaactaatcaaaaaagaaagaaagaaagaaagaaagaaagaaacacacaaattagctgggcctagtggcctcgcacctgtggtcccaactactcgggaagttgaggtgggaggatggcttgaacccgggaggtggaggtagcagtgagccactgcactccagcccaggcggtagaggagaccccacctcagaaaaaaaaaaaaaaaaaagaaagaaagaaggaaaagaaaagaaaaagaaaaagaacaacaacaaactgcaattttcatttgagggggttgtgttttaaagtcaaccccgacccgccacagtggctcacgcctgtaatctcaacactttgggaggccgaaggggctggaccacctgaggtcaggagttcgagaccagtctgtctgaccaacatggtgaatcccgtctctactaaaaatacagaaaattaccgggcgtggtggcatgcacctataatcccaccagctacttgggaggctgaggctggagaatcgcttgaaccgggcaggcagaatttgcagtgagctgagatcatgccactgcactccagcctgggtaacagagtgagactctgtctaaaaataaaaatcaatcaatcaataaataaagtcaacctctatctgttaaaggtaaccattattgttaattgataagaaaaatgagggccccagtgcggtcgctcacgtctgtaatcccagcaatttgggagaccaagaggggtggattccttgagcccaggagttcaagagcagcctgggcagcatggtgaaaccccatcttaacacaaaatacaaaaattagctgagcgtgtaactgtggtcccagctgctcgggaggcttgacaccaggaggttgaggctgcattgacctttgttcgcaccattgcactatagcctgggtgacagagtaagactgtctacaaaaaaaagaaagagagaaagaaagagagaaagaaagagagaaagaaagaaagagaaagaaaaaagaaggaaggaaggaaagaaagaacgaaagaaagaaaggaaggaagaaaggaaggatggaagaaagaagggaagaaaggaagaaaggaaggatggaagaaagaagggaagaaaggaagaaagaaagagagaaagaaagaaaggatggaaggaggggaaaccttattatattgcatctattaatcattttaatctggaactttgtatatttttccaccttttttattttttttgagacagtctggctctgtcacccaggctggagtgcagtggcatgatcttggctcactgcaacctccgcctcccaggttcaagcagttctccttcctcagcctcccgagaagctgggattacaggcatgtaccaccatgcccggctggtatttgtatttttagcagagacggtgtttcacaatgttctccaggctggtctcaaactcctgactttaagtgattcatctgccttggcctcccaaagtcctgggattacaggggagagccaccatgcccggcccatttttctactttcacaacttattttaagtgcagcaaaatttacttgaattgtccatagtggtaaaaaatattacagcgaaatttttcgagttttaatggaacaggcagtttcactattgacacaattatttggaagggattacttcactggttttgtaattcaaaagttatgtttgtaaaaaacttaaaattaaaattaaaaaatatagccaggcatggtggtgggcacctgtactccctgctactagggcagcagaggcaggagaatcacttgaacct

SEQ ID NO: 1563294 - DNA, 4001 bp, Homo sapiens
acgcggggagaagaacatcacacagtggggcctgtcaggggttggggggctaggggagggatagcattagagaaatacctaaggtagatgacgggtcaatgggtgcagcaaacaaccatggcatgtgtcttcctatgtaacaaacctgcacgttctgcccatgtatcccggaacttaaagtataattttaagaaaaggaatattatcgtaatggcattgggtgagtcaaagatgtttcttaaaataataaaaagcactatccataaataatacactaattaataaaattaagagaatctgttcatctacaacacattattgagatcgtgtaaaagcaaaaaagatttatagaagatactaaaattgtatatgtatttttgtatatgtacatatacgcctgtgtgcctgtgcgtataactcaaatacagaatatatggaaactacaaatccatttttaaaatacaaacatctcagtaaaagctgggggaaaatacctgaaaaggaacttcataaaaggcatagttaaatgaccaataaacacataaaatggtgctaaaaaaaaaaaaaaagaaaacaataaatagctgggtgtggtggcactgcaatccagtctgggtgacagagggagacctcatctcaaaagacaaacaaaaatcaataaataaaaacaatttcttaaaaaggtgctcgatctcattaatcagcagagaaatgcgagtgtagacataaggagagatcactgcacacccatcagagtggctggaatgaaagactaactgtactgcgagtgttcgaatgtggcacagctggaaccttcgaatatttctggactcccattcccacacagacacctgaggctgtggctgaaaggtcagatagaatcccaggaaagagctccttcagaattgcgatcaaccaaccgaggaaaagcaccccaacctgggtcgagacagagttcccaaggtcacgtggcctccttcatggctgacacagagctccctgagtcccaccataggcttagagaatccaaggaacattaccccattccccggcggcaccgggagagagcacctacagataataattttaaaaacccagcaccaagagaaagcatccatccagtaagcgtccacaacggggataagcagaaccaaagaaaagccaacacattgtaactgagagcgagcaacatccgaggacaaatgcgcctcacggccgacatcagtacccaaggaagagtccaccagaggttgagataaagcccccgacagtgaccccacagggctacgatcatgtgtccggggcacagccacccccaccacgttccatgagcacagatagtgaccccagggcagagtcccccctcaggacagcgactgagcgggaaagaaacaccgccgcacccgagaccgacacaggcaaccaaggcatggcccccaccccccgggctcaggtcatttcagcaggaaaagtcgccttttccatcaccgacagggagcccccaacaagagcccccaagaaaagccccctggccccacaacatagccgagacggggtgcccaaggaaaacgctcccccgcggctgacacaggcgcccatggcggtgtccccagagctaagccacttccccaagggagccctcccacacaccggacagagaacaccacagaaaagactctttctgaggaaaaaggacactttccagggcgaaattaaagcatccagggaaaaactgcccactcacagtcctgaagtcctgaccttgctggaggagagacggcggcacctcacaaaatggcagtgaagttgtggcgcctccccactggtggcactttctagaaacctgccctctgggagttgtgggaaatgtgccccctagggcacctgggagtgatgtgcatggggaggcgtctcaccagaagcaccgatcccgtttggcccaagggggatgggaggaagggaagtagccagccacagcgtgcctgccccagccgaacactgggaacctgttgggggcgccagagtgctgaggagaagcctcgtgccccagagaaccaggaagcgcagccctccccttcgctgactctggcgccctctacaggcgaccttcagtaacaactgcacagcaacgtatgcggaggaatgcagaaccttctcacccagcgggatgaaatcgcctgggtaacatagtgagaccccggctctacaaagcaaccaactaatcaaaaaagaaagaaagaaagaaagaaagaaagaaagaaacacacaaattagctgggcctagtggcctcgcacctgtggtcccaactactcgggaagttgaggtgggaggatggcttgaacccgggaggtggaggtagcagtgagccactgcactccagcccaggcggtagaggagaccccacctcagaaaaaaaaaaaaaaaaaagaaagaaagaaggaaaagaaaagaaaaagaaaaagaacaacaacaaactgcaattttcatttgagggggttgtgttttaaagtcaaccccgacccgccacagtggctcacgcctgtaatctcaacactttgggaggccgaaggggctggaccacctgaggtcaggagttcgagaccagtctgtctgaccaacatggtgaatcccgtctctactaaaaatacagaaaattaccgggcgtggtggcatgcacctataatcccaccagctacttgggaggctgaggctggagaatcgcttgaaccgggcaggcagaatttgcagtgagctgagatcatgccactgcactccagcctgggtaacagagtgagactctgtctaaaaataaaaatcaatcaatcaataaataaagtcaacctctatctgttaaaggtaaccattattgttaattgataagaaaaatgagggccccagtgcggtcgctcacgtctgtaatcccagcaatttgggagaccaagaggggtggattccttgagcccaggagttcaagagcagcctgggcagcatggtgaaaccccatcttaacacaaaatacaaaaattagctgagcgtgtaactgtggtcccagctgctcgggaggcttgacaccaggaggttgaggctgcattgacctttgttcgcaccattgcactatagcctgggtgacagagtaagactgtctacaaaaaaaagaaagagagaaagaaagagagaaagaaagagagaaagaaagaaagagaaagaaaaaagaaggaaggaaggaaagaaagaacgaaagaaagaaaggaaggaagaaaggaaggatggaagaaagaagggaagaaaggaagaaaggaaggatggaagaaagaagggaagaaaggaagaaagaaagagagaaagaaagaaaggatggaaggaggggaaaccttattatattgcatctattaatcattttaatctggaactttgtatatttttccaccttttttattttttttgagacagtctggctctgtcacccaggctggagtgcagtggcatgatcttggctcactgcaacctccgcctcccaggttcaagcagttctccttcctcagcctcccgagaagctgggattacaggcatgtaccaccatgcccggctggtatttgtatttttagcagagacggtgtttcacaatgttctccaggctggtctcaaactcctgactttaagtgattcatctgccttggcctcccaaagtcctgggattacaggggagagccaccatgcccggcccatttttctactttcacaacttattttaagtgcagcaaaatttacttgaattgtccatagtggtaaaaaatattacagcgaaatttttcgagttttaatggaacaggcagtttcactattgacacaattatttggaagggattacttcactggttttgtaattcaaaagttatgtttgtaaaaaacttaaaattaaaattaaaaaatatagccaggcatggtggtgggcacctgtactccctgctactagggcagcagaggcaggagaatcacttga

SEQ ID NO: 1563295 - DNA, 4001 bp, Homo sapiens; identical to SEQ ID NO: 1563294

SEQ ID NO: 1563296 - DNA, 4001 bp, Homo sapiens
tggacgcggggagaagaacatcacacagtggggcctgtcaggggttggggggctaggggagggatagcattagagaaatacctaaggtagatgacgggtcaatgggtgcagcaaacaaccatggcatgtgtcttcctatgtaacaaacctgcacgttctgcccatgtatcccggaacttaaagtataattttaagaaaaggaatattatcgtaatggcattgggtgagtcaaagatgtttcttaaaataataaaaagcactatccataaataatacactaattaataaaattaagagaatctgttcatctacaacacattattgagatcgtgtaaaagcaaaaaagatttatagaagatactaaaattgtatatgtatttttgtatatgtacatatacgcctgtgtgcctgtgcgtataactcaaatacagaatatatggaaactacaaatccatttttaaaatacaaacatctcagtaaaagctgggggaaaatacctgaaaaggaacttcataaaaggcatagttaaatgaccaataaacacataaaatggtgctaaaaaaaaaaaaaaaagaaaacaataaatagctgggtgtggtggcactgcaatccagtctgggtgacagagggagacctcatctcaaaagacaaacaaaaatcaataaataaaaacaatttcttaaaaaggtgctcgatctcattaatcagcagagaaatgcgagtgtagacacaaggagagatcactgcacacccatcagagtggctggaatgaaagactaactgtactgcgagtgttcgaatgtggcacagctggaaccttcgaatatttctggactcccattcccacacagacacctgaggctgtggctgaaaggtcagatagaatcccaggaaagagctccttcagaattgcgatcaaccaaccgaggaaaagcaccccaacctgggtcgagacagagttcccaaggtcacgtggcctccttcatggctgacacagagctccctgagtcccaccataggcttagagaatccaaggaacattaccccactccccggcggcaccgggagagagcacctacagataataattttaaaaacccagcaccaagagaaagcatccagtaagcgtccacaacggggataagcagaaccaaagaaaagccaacacattgtaactgagagcgagcaacatccgaggacaaatgcgcctcacggccgacatcagtacccaaggaagagtccaccagaggttgagataaagcccccgacagtgaccccacagggctacgatcatgtgtccggggcacagccacccccaccacgttccatgagcacagatagtgaccccagggcagagtcccccctcaggacagcgactgagcgggaaagaaacaccgccgcacccgaggccgacacaggcaaccaaggcatggcccccaccccccgggctcaggtcatttcagcaggaaaagtcgccttttccatcaccgacagggagcccccaacaagagcccccaagaaaagccccctggccccacaacatagccgagacggggtgcccaaggaaaacgctcccccgcggctgacacaggcgcccatggcggtgtccccagagctaagccacttccccaagggagccctcccacacaccggacagagaacaccacagaaaagactctttctgaggaaaaaggacactttccagggcgaaattaaagcatccagggaaaaactgcccactcacagtcctgaagtcctgaccttgctggaggagagacggcggcacctcacaaaatggcagtgaagttgtggcgcctccccactggtggcactttctagaaacctgccctctgggagttgtgggaaatgtgccccctagggcacctgggagtgatgtgcatggggaggcgtctcaccagaagcaccgatcccgtttggcccaagggggatgggaggaagggaagtagccagccacagcgtgcctgccccagccgaacactgggaacctgttgggggcgccagagtgctgaggagaagcctcgtgccccagagaaccaggaagcgcagccctccccttcgctgactctggcgccctctacaggcgaccttcagtaacaactgcacagcaacgtatgcggaggaatgcagaaccttctcacccagcgggatgaaatcgcctgggtaacatagtgagaccccggctctacaaagcaaccaactaatcaaaaaagaaagaaagaaagaaagaaacacacaaattagctgggcctagtggcctcgcacctgtggtcccaactactcgggaagttgaggtgggaggatggcttgaacccgggaggtggaggtagcagtgagccactgcactccagcccaggcggtagaggagaccccatctcagaaaaaaaaaaaaaaagaaagaaagaaggaaaagaaaagaaaaagaaaaagaacaacaacaaactgcaattttcatttgagggggttgtgttttaaagtcaaccccgacccgccacagtggctcacgcctgtaatctcaacactttgggaggccgaaggggctggaccacctgaggtcaggagttcgagaccagtctgtctgaccaacatggtgaatcccgtctctgctaaaaatacagaaaattaccgggcgtggtggcatgcacctataatcccaccagctacttgggaggctgaggctggagaatcgcttgaaccgggcaggcagaatttgcagtgagctgagatcatgccactgcactccagcctgggtaacagagtgagactctgtctaaaaataaaaatcaatcaatcaataaataaagtcaacctctatctgttaaaggtaaccattattgttaattgataagaaaaatgagggccccagtgcggtcgctcacgtctgtaatcccagcaatttgggagaccaagaggggtggattccttgagcccaggagttcaagagcagcctgggcagcatggtgaaaccccatcttaacacaaaatacaaaaattagctgagcgtgtaactgtggtcccagctgctcgggaggcttgacaccaggaggttgaggctgcattgacctttgttcgcaccattgcactatagcctgggtgacagagtaagactgtctacaaaaaaaaagaaagagagaaagaaagagagaaagaaagaaagaaagagaaagaaaaaagaaggaaggaaggaaagaaagaacgaaagaaagaaaggaaggaagaaaggaaggatggaagaaagaagggaagaaaggaagaaaggaaggatggaagaaagaagggaagaaaggaagaaagaaagagagaaagaaagaaaggatggaaggaggggaaaccttattatattgcatctattaatcattttaatctggaactttgtatatttttccaccttttttattttttttgagacagtctggctctgtcacccaggctggagtgcagtggcatgatcttggctcactgcaacctccgcctcccaggttcaagcagttctccttcctcagcctcccgagaagctgggattacaggcatgtaccaccatgcccggctggtatttgtatttttagcagagacggtgtttcacaatgttctccaggctggtctcaaactcctgactttaagtgattcatctgccttggcctcccaaagtcctgggattacaggggagagccaccatgcccggcccatttttctactttcacaacttattttaagtgcagcaaaatttacttgaattgtccatagtggtaaaaaatattacagcgaaatttttcgagttttaatggaacaggcagtttcactattgacacaattatttggaagggattacttcactggttttgtaattcaaaagttatgtttgtaaaaaacttaaaattaaaattaaaaaatatagccaggcatggtggtgggcacctgtactccctgctactagggcagcagaggcaggagaatcacttgaacctgagaggtgcaagcttcag

SEQ ID NO: 1563297 - DNA, 4001 bp, Homo sapiens
gggagaagaacatcacacagtggggcctgtcaggggttggggggctaggggagggatagcgttagagaaatacctaaggtagatgacgggtcaatgggtgcagcaaacaaccatggcatgtgtcttcctatgtaacaaacctgcacgttctgcccatgtatcccagaacttaaagtataattttaagaaaaggaatattatcgtaatggcattgggtgagtcaaagatgtttcttaaaataataaaaagcactatccataaataatacactaattaataaaattaagagaatctgttcatctacaacacattattgagatcgtgtaaaagcaaaaaagatttatagaagatactaaaattgtatatgtatttttgtatatgtacatatacgcctgtgtgcctgtgcgtataactcaaatacagaatatatggaaactacaaatccatttttaaaatacaaacatctcagtaaaagctgggggaaaatacctgaaaaggaacttcataaaaggcatagttaaatgaccaataaacacataaaatggtgctaaaaaaaaaaaaaaaagaaaacaataaatagctgggtgtggtggcactgcaatccagtctgggtgacagagggagacctcatctcaaaagacaaacaaaaatcaataaataaaaacaatttcttaaaaaggtgctcgatctcattaatcagcagagaaatgcgagtgtagacataaggagagatcactgcacacccatcagagtggctggaatgaaagactaactgtactgcgagtgttcgaatgtggcacagctggaaccttcgaatatttctggactcccattcccacacagacacctgaggctgtggctgaaaggtcagatagaatcccaggaaagagctccttcagaattgcgatcaaccaaccaaccgaggaaaagcaccccaacctgggtcgagacagagttcccaaggtcacgtggcctccttcatggctgacacagagctccctgagtcccaccataggcttagagaatccaaggaacattaccccattccccggcggcaccgggagagagcacctacagataataattttaaaaacccagcaccaagagaaagcatccatccagtaagcgtccacaacggggataagcagaaccaaagaaaagccaacacattgtaactgagagcgagcaacatccgaggacaaatgcgcctcacggccgacatcagtacccaaggaagagtccaccagaggttgagataaagcccccgacagtgaccccacagggctacgatcatgtgtccggggcacagccacccccaccacgttccatgagcacagatagtgaccccagggcagagtcccccctcaggacagcgactgagcgggaaagaaacaccgccgcacccgaggccgacacaggcaaccaaggcatggcccccaccccccgggctcaggtcatttcagcaggaaaagtcgccttttccatcaccgacagggagcccccaacaagagcccccaagaaaagccccctggccccacaacatagccgagacggggtgcccaaggaaaacgctcccccgcggctgacacaggcgcccatggcggtgtccccagagctaagccacttccccaagggagccctcccacacaccggacagagaacaccacagaaaagactctttctgaggaaaaaggacactttccagggcgaaattaaagcatccagggaaaaactgcccactcacagtcctgaagtcctgaccttgctggaggagagacggcggcacctcacaaaatggcagtgaagttgtggcgcctccccactggtggcactttctagaaacctgccctctgggagttgtgggaaatgtgccccctagggcacctgggagtgatgtgcatggggaggcgtctcaccagaagcaccgatcccgtttggcccaagggggatgggaggaagggaagtagccagccacagcgtgcctgccccagccgaacactgggaacctgttgggggcgccagagcgctgaggagaagcctcgtgccccagagaaccaggaagcgcagccctccccttcgctgactctggcgccctctacaggcgaccttcagtaacaactgcacagcaacgtatgcggaggaatgcagaaccttctcacccagcgggatgaaatcgcctgggtaacatagtgagaccccggctctacaaagcaaccaactaatcaaaaaagaaagaaagaaagaaagaaagaaacacacaaattagctgggcctagtggcctcgcacctgtggtcccaactactcgggaagttgaggtgggaggatggcttgaacccgggaggtggaggtagcagtgagccactgcactccagcccaggcggtagaggagaccccacctcagaaaaaaaaaaaaaaaaaaaaagaaagaaagaaggaaaagaaaagaaaaagaaaaagaacaacaacaaactgcaattttcatttgagggggttgtgttttaaagtcaaccccgacccgccacagtggctcacgcctgtaatctcaacactttgggaggccgaaggggctggaccacctgaggtcaggagttcgagaccagtctgtctgaccaacatggtgaatcccgtctctactaaaaatacagaaaattaccgggcgtggtggcatgcacctataatcccaccagctacttgggaggctgaggctggagaatcgcttgaaccgggcaggcagaatttgcagtgagctgagatcatgccactgcactccagcctgggtaacagagtgagactctgtctaaaaataaaaatcaatcaatcaataaataaagtcaacctctatctgttaaaggtaaccattattgttaattgataagaaaaatgagggccccagtgcggtcgctcacgtctgtaatcccagcaatttgggagaccaagaggggtggattccttgagcccaggagttcaagagcagcctgggcagcatggtgaaaccccatcttaacacaaaatacaaaaattagctgagcgtgtaactgtggtcccagctgctcgggaggcttgacaccaggaggttgaggctgcattgacctttgttcgcaccattgcactatagcctgggtgacagagtaagactgtctacaaaaaaaaagaaagagagaaagaaagaaagaaagagaaagaaaaaagaaggaaggaaggaaagaaagaacgaaagaaagaaaggaaggaagaaaggaaggatggaagaaagaagggaagaaaggaagaaaggaaggatggaagaaagaagggaagaaaggaagaaagaaagagagaaagaaagaaaggatggaaggaggggaaaccttattatattgcatctattaatcattttaatctggaactttgtatatttttccaccttttttattttttttgagacagtctggctctgtcacccaggctggagtgcagtggcatgatcttggctcactgcaacctccgcctcccaggttcaagcagttctccttcctcagcctcccgagaagctgggattacaggcatgtaccaccatgcccggctggtatttgtatttttagcagagacggtgtttcacaatgttctccaggctggtctcaaactcctgactttaagtgattcatctgccttggcctcccaaagtcctgggattacaggggagagccaccatgcccggcccatttttctactttcacaacttattttaagtgcagcaaaatttacttgaattgtccatagtggtaaaaaatattacagcgaaatttttcgagttttaatggaacaggcagtttcactattgacacaattatttggaagggattacttcactggttttgtaattcaaaagttatgtttgtaaaaaacttaaaattaaaattaaaaaatatagccaggcatggtggtgggcacctgtactccctgctactagggcagcagaggcaggagaatcacttgaacctgagaggtgcaagcttcagtg

SEQ ID NO: 1563298 - DNA, 4001 bp, Homo sapiens
atggacgcggggagaagaacatcacacagtggggcctgtcaggggttggggggctaggggagggatagcattagagaaatacctaaggtagatgacgggtcaatgggtgcagcaaacaaccatggcatgtgtcttcctatgtaacaaacctgcacgttctgcccatgtatcccggaacttaaagtataattttaagaaaaggaatattatcgtaatggcattgggtgagtcaaagatgtttcttaaaataataaaaagcactatccataaataatacactaattaataaaattaagagaatctgttcatctacaacacattattgagatcgtgtaaaagcaaaaaagatttatagaagatactaaaattgtatatgtatttttgtatatgtacatatacgcctgtgtgcctgtgcgtataactcaaatacagaatatatggaaactacaaatccatttttaaaatacaaacatctcagtaaaagctgggggaaaatacctgaaaaggaacttcataaaaggcatagttaaatgaccaataaacacataaaatggtgctaaaaaaaaaaaaaaagaaaacaataaatagctgggtgtggtggcactgcaatccagtctgggtgacagagggagacctcatctcaaaagacaaacaaaaatcaataaataaaaacaatttcttaaaaaggtgctcgatctcattaatcagcagagaaatgcgagtgtagacacaaggagagatcactgcacacccatcagagtggctggaatgaaagactaactgtactgcgagtgttcgaatgtggcacagctggaaccttcgaatatttctggactcccattcccacacagacacctgaggctgtggctgaaaggtcagatagaatcccaggaaagagctccttcagaattgcgatcaaccaaccgaggaaaagcaccccaacctgggtcgagacagagttcccaaggtcacgtggcctccttcatggctgacacagagctccctgagtcccaccataggcttagagaatccaaggaacattaccccactccccggcggcaccgggagagagcacctacagataataattttaaaaacccagcaccaagagaaagcatccagtaagcgtccacaacggggataagcagaaccaaagaaaagccaacacattgtaactgagagcgagcaacatccgaggacaaatgcgcctcacggccgacatcagtacccaaggaagagtccaccagaggttgagataaagcccccgacagtgaccccacagggctacgatcatgtgtccggggcacagccacccccaccacgttccatgagcacagatagtgaccccagggcagagtcccccctcaggacagcgactgagcgggaaagaaacaccgccgcacccgaggccgacacaggcaaccaaggcatggcccccaccccccgggctcaggtcatttcagcaggaaaagtcgccttttccatcaccgacagggagcccccaacaagagcccccaagaaaagccccctggccccacaacatagccgagacggggtgcccaaggaaaacgctcccccgcggctgacacaggcgcccatggcggtgtccccagagctaagccacttccccaagggagccctcccacacaccggacagagaacaccacagaaaagactctttctgaggaaaaaggacactttccagggcgaaattaaagcatccagggaaaaactgcccactcacagtcctgaagtcctgaccttgctggaggagagacggcggcacctcacaaaatggcagtgaagttgtggcgcctccccactggtggcactttctagaaacctgccctctgggagttgtgggaaatgtgccccctagggcacctgggagtgatgtgcatggggaggcgtctcaccagaagcaccgatcccgtttggcccaagggggatgggaggaagggaagtagccagccacagcgtgcctgccccagccgaacactgggaacctgttgggggcgccagagtgctgaggagaagcctcgtgccccagagaaccaggaagcgcagccctccccttcgctgactctggcgccctctacaggcgaccttcagtaacaactgcacagcaacgtatgcggaggaatgcagaaccttctcacccagcgggatgaaatcgcctgggtaacatagtgagaccccggctctacaaagcaaccaactaatcaaaaaagaaagaaagaaagaaagaaacacacaaattagctgggcctagtggcctcgcacctgtggtcccaactactcgggaagttgaggtgggaggatggcttgaacccgggaggtggaggtagcagtgagccactgcactccagcccaggcggtagaggagaccccatctcagaaaaaaaaaaaaaaagaaagaaagaaggaaaagaaaagaaaaagaaaaagaacaacaacaaactgcaattttcatttgagggggttgtgttttaaagtcaaccccgacccgccacagtggctcacgcctgtaatctcaacactttgggaggccgaaggggctggaccacctgaggtcaggagttcgagaccagtctgtctgaccaacatggtgaatcccgtctctgctaaaaatacagaaaattaccgggcgtggtggcatgcacctataatcccaccagctacttgggaggctgaggctggagaatcgcttgaaccgggcaggcagaatttgcagtgagctgagatcatgccactgcactccagcctgggtaacagagtgagactctgtctaaaaataaaaatcaatcaatcaataaataaagtcaacctctatctgttaaaggtaaccattattgttaattgataagaaaaatgagggccccagtgcggtcgctcacgtctgtaatcccagcaatttgggagaccaagaggggtggattccttgagcccaggagttcaagagcagcctgggcagcatggtgaaaccccatcttaacacaaaatacaaaaattagctgagcgtgtaactgtggtcccagctgctcgggaggcttgacaccaggaggttgaggctgcattgacctttgttcgcaccattgcactatagcctgggtgacagagtaagactgtctacaaaaaaaaagaaagagagaaagaaagaaagaaagagaaagaaaaaagaaggaaggaaggaaagaaagaacgaaagaaagaaaggaaggaagaaaggaaggatggaagaaagaagggaagaaaggaagaaaggaaggatggaagaaagaagggaagaaaggaagaaagaaagagagaaagaaagaaaggatggaaggaggggaaaccttattatattgcatctattaatcattttaatctggaactttgtatatttttccaccttttttattttttttgagacagtctggctctgtcacccaggctggagtgcagtggcatgatcttggctcactgcaacctccgcctcccaggttcaagcagttctccttcctcagcctcccgagaagctgggattacaggcatgtaccaccatgcccggctggtatttgtatttttagcagagacggtgtttcacaatgttctccaggctggtctcaaactcctgactttaagtgattcatctgccttggcctcccaaagtcctgggattacaggggagagccaccatgcccggcccatttttctactttcacaacttattttaagtgcagcaaaatttacttgaattgtccatagtggtaaaaaatattacagcgaaatttttcgagttttaatggaacaggcagtttcactattgacacaattatttggaagggattacttcactggttttgtaattcaaaagttatgtttgtaaaaaacttaaaattaaaattaaaaaatatagccaggcatggtggtgggcacctgtactccctgctactagggcagcagaggcaggagaatcacttgaacctgagaggtgcaagcttcagtgagcagagatc

SEQ ID NO: 1563299 - DNA, 4001 bp, Homo sapiens; identical to SEQ ID NO: 1563296

SEQ ID NO: 1563300 - DNA, 4001 bp, Homo sapiens; identical to SEQ ID NO: 1563297

SEQ ID NO: 1563301 - DNA, 4001 bp, Homo sapiens; identical to SEQ ID NO: 1563298

SEQ ID NO: 1563302 - DNA, 4001 bp, Homo sapiens
gagtagctgcgattacgggcgcctgccacgacgctggataaagaaaatgtggtacatatacaccacggaatactatgcagccataaaaaagaatgagttcatgtcctttgaagggacatgtgtcagcaagctaacacaggaacagaaaaccaaacaccacgtgtcctcactcataagtgggagttgaacaatgagaacacatggacgcggggagaagaacatcacacagtggggcctgtcaggggttggggggctaggggagggatagcattagagaaatacctaaggtagatgacgggtcaatgggtgcagcaaacaaccatggcatgtgtcttcctatgtaacaaacctgcacgttctgcccatgtatcccggaacttaaagtataattttaagaaaaggaatattatcgtaatggcattgggtgagtcaaagatgtttcttaaaataataaaaagcactatccataaataatacactaattaataaaattaagagaatctgttcatctacaacacattattgagatcgtgtaaaagcaaaaaagatttatagaagatactaaaattgtatatgtatttttgtatatgtacatatacgcctgtgtgcctgtgcgtataactcaaatacagaatatatggaaactacaaatccatttttaaaatacaaacatctcagtaaaagctgggggaaaatacctgaaaaggaacttcataaaaggcatagttaaatgaccaataaacacataaaatggtgctaaaaaaaaaaaaaaaagaaaacaataaatagctgggtgtggtggcactgcaatccagtctgggtgacagagggagacctcatctcaaaagacaaacaaaaatcaataaataaaaacaatttcttaaaaaggtgctcgatctcattaatcagcagagaaatgcgagtgtagacacaaggagagatcactgcacacccatcagagtggctggaatgaaagactaactgtactgcgagtgttcgaatgtggcacagctggaaccttcgaatatttctggactcccattcccacacagacacctgaggctgtggctgaaaggtcagatagaatcccaggaaagagctccttcagaattgcgatcaaccaaccgaggaaaagcaccccaacctgggtcgagacagagttcccaaggtcacgtggcctccttcatggctgacacagagctccctgagtcccaccataggcttagagaatccaaggaacattaccccactccccggcggcaccgggagagagcacctacagataataattttaaaaacccagcaccaagagaaagcatccagtaagcgtccacaacggggataagcagaaccaaagaaaagccaacacattgtaactgagagcgagcaacatccgaggacaaatgcgcctcacggccgacatcagtacccaaggaagagtccaccagaggttgagataaagcccccgacagtgaccccacagggctacgatcatgtgtccggggcacagccacccccaccacgttccatgagcacagatagtgaccccagggcagagtcccccctcaggacagcgactgagcgggaaagaaacaccgccgcacccgaggccgacacaggcaaccaaggcatggcccccaccccccgggctcaggtcatttcagcaggaaaagtcgccttttccatcaccgacagggagcccccaacaagagcccccaagaaaagccccctggccccacaacatagccgagacggggtgcccaaggaaaacgctcccccgcggctgacacaggcgcccatggcggtgtccccagagctaagccacttccccaagggagccctcccacacaccggacagagaacaccacagaaaagactctttctgaggaaaaaggacactttccagggcgaaattaaagcatccagggaaaaactgcccactcacagtcctgaagtcctgaccttgctggaggagagacggcggcacctcacaaaatggcagtgaagttgtggcgcctccccactggtggcactttctagaaacctgccctctgggagttgtgggaaatgtgccccctagggcacctgggagtgatgtgcatggggaggcgtctcaccagaagcaccgatcccgtttggcccaagggggatgggaggaagggaagtagccagccacagcgtgcctgccccagccgaacactgggaacctgttgggggcgccagagtgctgaggagaagcctcgtgccccagagaaccaggaagcgcagccctccccttcgctgactctggcgccctctacaggcgaccttcagtaacaactgcacagcaacgtatgcggaggaatgcagaaccttctcacccagcgggatgaaatcgcctgggtaacatagtgagaccccggctctacaaagcaaccaactaatcaaaaaagaaagaaagaaagaaagaaacacacaaattagctgggcctagtggcctcgcacctgtggtcccaactactcgggaagttgaggtgggaggatggcttgaacccgggaggtggaggtagcagtgagccactgcactccagcccaggcggtagaggagaccccatctcagaaaaaaaaaaaaaaagaaagaaagaaggaaaagaaaagaaaaagaaaaagaacaacaacaaactgcaattttcatttgagggggttgtgttttaaagtcaaccccgacccgccacagtggctcacgcctgtaatctcaacactttgggaggccgaaggggctggaccacctgaggtcaggagttcgagaccagtctgtctgaccaacatggtgaatcccgtctctgctaaaaatacagaaaattaccgggcgtggtggcatgcacctataatcccaccagctacttgggaggctgaggctggagaatcgcttgaaccgggcaggcagaatttgcagtgagctgagatcatgccactgcactccagcctgggtaacagagtgagactctgtctaaaaataaaaatcaatcaatcaataaataaagtcaacctctatctgttaaaggtaaccattattgttaattgataagaaaaatgagggccccagtgcggtcgctcacgtctgtaatcccagcaatttgggagaccaagaggggtggattccttgagcccaggagttcaagagcagcctgggcagcatggtgaaaccccatcttaacacaaaatacaaaaattagctgagcgtgtaactgtggtcccagctgctcgggaggcttgacaccaggaggttgaggctgcattgacctttgttcgcaccattgcactatagcctgggtgacagagtaagactgtctacaaaaaaaaagaaagagagaaagaaagagagaaagaaagaaagaaagagaaagaaaaaagaaggaaggaaggaaagaaagaacgaaagaaagaaaggaaggaagaaaggaaggatggaagaaagaagggaagaaaggaagaaaggaaggatggaagaaagaagggaagaaaggaagaaagaaagagagaaagaaagaaaggatggaaggaggggaaaccttattatattgcatctattaatcattttaatctggaactttgtatatttttccaccttttttattttttttgagacagtctggctctgtcacccaggctggagtgcagtggcatgatcttggctcactgcaacctccgcctcccaggttcaagcagttctccttcctcagcctcccgagaagctgggattacaggcatgtaccaccatgcccggctggtatttgtatttttagcagagacggtgtttcacaatgttctccaggctggtctcaaactcctgactttaagtgattcatctgccttggcctcccaaagtcctgggattacaggggagagccaccatgcccggcccatttttctactttcacaacttattttaagtgcagcaaaatttacttgaattgtccatagtggtaaaaaatattacagcgaaatttttcgagttttaa

SEQ ID NO: 1563303 - DNA, 4001 bp, Homo sapiens
gcgattacgggcgcctgccacgacgctggataaagaaaatgtggtacatatacaccacggaatactatgcagccataaaaaagaatgagttcatgtcctttgaagggacatgtgtcagcaagctaacacaggaacagaaaaccaaacaccacgtgtcctcactcataagtgggagttgaacaatgagaacacatggacgcggggagaagaacatcacacagtggggcctgtcaggggttggggggctaggggagggatagcgttagagaaatacctaaggtagatgacgggtcaatgggtgcagcaaacaaccatggcatgtgtcttcctatgtaacaaacctgcacgttctgcccatgtatcccagaacttaaagtataattttaagaaaaggaatattatcgtaatggcattgggtgagtcaaagatgtttcttaaaataataaaaagcactatccataaataatacactaattaataaaattaagagaatctgttcatctacaacacattattgagatcgtgtaaaagcaaaaaagatttatagaagatactaaaattgtatatgtatttttgtatatgtacatatacgcctgtgtgcctgtgcgtataactcaaatacagaatatatggaaactacaaatccatttttaaaatacaaacatctcagtaaaagctgggggaaaatacctgaaaaggaacttcataaaaggcatagttaaatgaccaataaacacataaaatggtgctaaaaaaaaaaaaaaaagaaaacaataaatagctgggtgtggtggcactgcaatccagtctgggtgacagagggagacctcatctcaaaagacaaacaaaaatcaataaataaaaacaatttcttaaaaaggtgctcgatctcattaatcagcagagaaatgcgagtgtagacataaggagagatcactgcacacccatcagagtggctggaatgaaagactaactgtactgcgagtgttcgaatgtggcacagctggaaccttcgaatatttctggactcccattcccacacagacacctgaggctgtggctgaaaggtcagatagaatcccaggaaagagctccttcagaattgcgatcaaccaaccaaccgaggaaaagcaccccaacctgggtcgagacagagttcccaaggtcacgtggcctccttcatggctgacacagagctccctgagtcccaccataggcttagagaatccaaggaacattaccccattccccggcggcaccgggagagagcacctacagataataattttaaaaacccagcaccaagagaaagcatccatccagtaagcgtccacaacggggataagcagaaccaaagaaaagccaacacattgtaactgagagcgagcaacatccgaggacaaatgcgcctcacggccgacatcagtacccaaggaagagtccaccagaggttgagataaagcccccgacagtgaccccacagggctacgatcatgtgtccggggcacagccacccccaccacgttccatgagcacagatagtgaccccagggcagagtcccccctcaggacagcgactgagcgggaaagaaacaccgccgcacccgaggccgacacaggcaaccaaggcatggcccccaccccccgggctcaggtcatttcagcaggaaaagtcgccttttccatcaccgacagggagcccccaacaagagcccccaagaaaagccccctggccccacaacatagccgagacggggtgcccaaggaaaacgctcccccgcggctgacacaggcgcccatggcggtgtccccagagctaagccacttccccaagggagccctcccacacaccggacagagaacaccacagaaaagactctttctgaggaaaaaggacactttccagggcgaaattaaagcatccagggaaaaactgcccactcacagtcctgaagtcctgaccttgctggaggagagacggcggcacctcacaaaatggcagtgaagttgtggcgcctccccactggtggcactttctagaaacctgccctctgggagttgtgggaaatgtgccccctagggcacctgggagtgatgtgcatggggaggcgtctcaccagaagcaccgatcccgtttggcccaagggggatgggaggaagggaagtagccagccacagcgtgcctgccccagccgaacactgggaacctgttgggggcgccagagcgctgaggagaagcctcgtgccccagagaaccaggaagcgcagccctccccttcgctgactctggcgccctctacaggcgaccttcagtaacaactgcacagcaacgtatgcggaggaatgcagaaccttctcacccagcgggatgaaatcgcctgggtaacatagtgagaccccggctctacaaagcaaccaactaatcaaaaaagaaagaaagaaagaaagaaagaaacacacaaattagctgggcctagtggcctcgcacctgtggtcccaactactcgggaagttgaggtgggaggatggcttgaacccgggaggtggaggtagcagtgagccactgcactccagcccaggcggtagaggagaccccacctcagaaaaaaaaaaaaaaaaaaaaagaaagaaagaaggaaaagaaaagaaaaagaaaaagaacaacaacaaactgcaattttcatttgagggggttgtgttttaaagtcaaccccgacccgccacagtggctcacgcctgtaatctcaacactttgggaggccgaaggggctggaccacctgaggtcaggagttcgagaccagtctgtctgaccaacatggtgaatcccgtctctactaaaaatacagaaaattaccgggcgtggtggcatgcacctataatcccaccagctacttgggaggctgaggctggagaatcgcttgaaccgggcaggcagaatttgcagtgagctgagatcatgccactgcactccagcctgggtaacagagtgagactctgtctaaaaataaaaatcaatcaatcaataaataaagtcaacctctatctgttaaaggtaaccattattgttaattgataagaaaaatgagggccccagtgcggtcgctcacgtctgtaatcccagcaatttgggagaccaagaggggtggattccttgagcccaggagttcaagagcagcctgggcagcatggtgaaaccccatcttaacacaaaatacaaaaattagctgagcgtgtaactgtggtcccagctgctcgggaggcttgacaccaggaggttgaggctgcattgacctttgttcgcaccattgcactatagcctgggtgacagagtaagactgtctacaaaaaaaaagaaagagagaaagaaagaaagaaagagaaagaaaaaagaaggaaggaaggaaagaaagaacgaaagaaagaaaggaaggaagaaaggaaggatggaagaaagaagggaagaaaggaagaaaggaaggatggaagaaagaagggaagaaaggaagaaagaaagagagaaagaaagaaaggatggaaggaggggaaaccttattatattgcatctattaatcattttaatctggaactttgtatatttttccaccttttttattttttttgagacagtctggctctgtcacccaggctggagtgcagtggcatgatcttggctcactgcaacctccgcctcccaggttcaagcagttctccttcctcagcctcccgagaagctgggattacaggcatgtaccaccatgcccggctggtatttgtatttttagcagagacggtgtttcacaatgttctccaggctggtctcaaactcctgactttaagtgattcatctgccttggcctcccaaagtcctgggattacaggggagagccaccatgcccggcccatttttctactttcacaacttattttaagtgcagcaaaatttacttgaattgtccatagtggtaaaaaatattacagcgaaatttttcgagttttaatg

SEQ ID NO: 1563304 - DNA, 4001 bp, Homo sapiens
tgagtagctgcgattacgggcgcctgccacgacgctggataaagaaaatgtggtacatatacaccacggaatactatgcagccataaaaaagaatgagttcatgtcctttgaagggacatgtgtcagcaagctaacacaggaacagaaaaccaaacaccacgtgtcctcactcataagtgggagttgaacaatgagaacacatggacgcggggagaagaacatcacacagtggggcctgtcaggggttggggggctaggggagggatagcattagagaaatacctaaggtagatgacgggtcaatgggtgcagcaaacaaccatggcatgtgtcttcctatgtaacaaacctgcacgttctgcccatgtatcccggaacttaaagtataattttaagaaaaggaatattatcgtaatggcattgggtgagtcaaagatgtttcttaaaataataaaaagcactatccataaataatacactaattaataaaattaagagaatctgttcatctacaacacattattgagatcgtgtaaaagcaaaaaagatttatagaagatactaaaattgtatatgtatttttgtatatgtacatatacgcctgtgtgcctgtgcgtataactcaaatacagaatatatggaaactacaaatccatttttaaaatacaaacatctcagtaaaagctgggggaaaatacctgaaaaggaacttcataaaaggcatagttaaatgaccaataaacacataaaatggtgctaaaaaaaaaaaaaaagaaaacaataaatagctgggtgtggtggcactgcaatccagtctgggtgacagagggagacctcatctcaaaagacaaacaaaaatcaataaataaaaacaatttcttaaaaaggtgctcgatctcattaatcagcagagaaatgcgagtgtagacacaaggagagatcactgcacacccatcagagtggctggaatgaaagactaactgtactgcgagtgttcgaatgtggcacagctggaaccttcgaatatttctggactcccattcccacacagacacctgaggctgtggctgaaaggtcagatagaatcccaggaaagagctccttcagaattgcgatcaaccaaccgaggaaaagcaccccaacctgggtcgagacagagttcccaaggtcacgtggcctccttcatggctgacacagagctccctgagtcccaccataggcttagagaatccaaggaacattaccccactccccggcggcaccgggagagagcacctacagataataattttaaaaacccagcaccaagagaaagcatccagtaagcgtccacaacggggataagcagaaccaaagaaaagccaacacattgtaactgagagcgagcaacatccgaggacaaatgcgcctcacggccgacatcagtacccaaggaagagtccaccagaggttgagataaagcccccgacagtgaccccacagggctacgatcatgtgtccggggcacagccacccccaccacgttccatgagcacagatagtgaccccagggcagagtcccccctcaggacagcgactgagcgggaaagaaacaccgccgcacccgaggccgacacaggcaaccaaggcatggcccccaccccccgggctcaggtcatttcagcaggaaaagtcgccttttccatcaccgacagggagcccccaacaagagcccccaagaaaagccccctggccccacaacatagccgagacggggtgcccaaggaaaacgctcccccgcggctgacacaggcgcccatggcggtgtccccagagctaagccacttccccaagggagccctcccacacaccggacagagaacaccacagaaaagactctttctgaggaaaaaggacactttccagggcgaaattaaagcatccagggaaaaactgcccactcacagtcctgaagtcctgaccttgctggaggagagacggcggcacctcacaaaatggcagtgaagttgtggcgcctccccactggtggcactttctagaaacctgccctctgggagttgtgggaaatgtgccccctagggcacctgggagtgatgtgcatggggaggcgtctcaccagaagcaccgatcccgtttggcccaagggggatgggaggaagggaagtagccagccacagcgtgcctgccccagccgaacactgggaacctgttgggggcgccagagtgctgaggagaagcctcgtgccccagagaaccaggaagcgcagccctccccttcgctgactctggcgccctctacaggcgaccttcagtaacaactgcacagcaacgtatgcggaggaatgcagaaccttctcacccagcgggatgaaatcgcctgggtaacatagtgagaccccggctctacaaagcaaccaactaatcaaaaaagaaagaaagaaagaaagaaacacacaaattagctgggcctagtggcctcgcacctgtggtcccaactactcgggaagttgaggtgggaggatggcttgaacccgggaggtggaggtagcagtgagccactgcactccagcccaggcggtagaggagaccccatctcagaaaaaaaaaaaaaaagaaagaaagaaggaaaagaaaagaaaaagaaaaagaacaacaacaaactgcaattttcatttgagggggttgtgttttaaagtcaaccccgacccgccacagtggctcacgcctgtaatctcaacactttgggaggccgaaggggctggaccacctgaggtcaggagttcgagaccagtctgtctgaccaacatggtgaatcccgtctctgctaaaaatacagaaaattaccgggcgtggtggcatgcacctataatcccaccagctacttgggaggctgaggctggagaatcgcttgaaccgggcaggcagaatttgcagtgagctgagatcatgccactgcactccagcctgggtaacagagtgagactctgtctaaaaataaaaatcaatcaatcaataaataaagtcaacctctatctgttaaaggtaaccattattgttaattgataagaaaaatgagggccccagtgcggtcgctcacgtctgtaatcccagcaatttgggagaccaagaggggtggattccttgagcccaggagttcaagagcagcctgggcagcatggtgaaaccccatcttaacacaaaatacaaaaattagctgagcgtgtaactgtggtcccagctgctcgggaggcttgacaccaggaggttgaggctgcattgacctttgttcgcaccattgcactatagcctgggtgacagagtaagactgtctacaaaaaaaaagaaagagagaaagaaagaaagaaagagaaagaaaaaagaaggaaggaaggaaagaaagaacgaaagaaagaaaggaaggaagaaaggaaggatggaagaaagaagggaagaaaggaagaaaggaaggatggaagaaagaagggaagaaaggaagaaagaaagagagaaagaaagaaaggatggaaggaggggaaaccttattatattgcatctattaatcattttaatctggaactttgtatatttttccaccttttttattttttttgagacagtctggctctgtcacccaggctggagtgcagtggcatgatcttggctcactgcaacctccgcctcccaggttcaagcagttctccttcctcagcctcccgagaagctgggattacaggcatgtaccaccatgcccggctggtatttgtatttttagcagagacggtgtttcacaatgttctccaggctggtctcaaactcctgactttaagtgattcatctgccttggcctcccaaagtcctgggattacaggggagagccaccatgcccggcccatttttctactttcacaacttattttaagtgcagcaaaatttacttgaattgtccatagtggtaaaaaatattacagcgaaatttttcgagttttaatggaacaggcag

SEQ ID NO: 1563305 - DNA, 4001 bp, Homo sapiens; identical to SEQ ID NO: 1563291

SEQ ID NO: 1563306 - DNA, 4001 bp, Homo sapiens; identical to SEQ ID NO: 1563292

SEQ ID NO: 1563307 - DNA, 4001 bp, Homo sapiens; identical to SEQ ID NO: 1563293

SEQ ID NO: 1563308 - DNA, 4001 bp, Homo sapiens; identical to SEQ ID NO: 1563291

SEQ ID NO: 1563309 - DNA, 4001 bp, Homo sapiens; identical to SEQ ID NO: 1563292

SEQ ID NO: 1563310 - DNA, 4001 bp, Homo sapiens; identical to SEQ ID NO: 1563293

SEQ ID NO: 1563311 - DNA, 4001 bp, Homo sapiens
tttggagttcttcaccttgttttccgcatccttctctttttcttgttctttctcttcctcgcctgcagcatcttgggcctcttcatcccacttttcgggctgagatttagtgacttctttagggaagaataatacacacatggggaccagacattcacagaaaatatagcccaatttataactagcagcggcattcagctactccaccctcaggagaagcaggatagagttaagtaagaaaggaatagctgggcaccttcctactggttttcacaacagttccatggccctcacgttgctgctgcttgatcatttccacagggacactgtatttcccttttttccagtaaatctcccacccaaagcggctgattatttctagttctttggagaagaagagatctgaatcatcgggtccgatctcattctacggtgttttggtcagaactttgttgggaaaatatttgtttacctcaaaagacaaattctatggtgaagctcattggttcctcacccccccgaatgcttcatttttaccaagtgctcctgcatcacttcatcatttgggggatcaactttctacgaatctttacactttgaaaagccatgaactaaaagggatgcctgccatttgcctgttcttttccttggcgcatcccttctgtttcctgcggagctccctcctgaacccctatctacccggccattcatctgcgggctcacaaatggcaccgatgatctcagatctcctatcaaatataggttggtagagggcgacaagttttctcaaaaccacagatgtcgttagagaattgggcttcgactcattgggacacattctgccttaagtttcaggagggccccgactcctgcttcaccacccgaggccccgaccccccttcaccacccgcttcaccagctatgcccgcaccgcggccctgcctagaaccctgggacacacgggtccccgcctccccgctgctgccgctagcccgttccttaccctctggggccgtggcctcctgtgcggtcggttcttctgtggccggttcctctgcgtctggttcctctgtggcctcctctgagagcttctcctctgcggcctcctccgcgggctccctggccatctcggccaggtcagctggcactgcaggctctgggaccgatgcggcctcctggatcaggcccaggccctcgcccgcccgggctgcggcccctgcacccagcctctggggcagcagcagcggggggaggttgccccagaggttgcgcgcagcagcgtgtggccccaccatcaggcggctgagttgacggttctctatgaggatgtggtcgttgtgagagaggcggtggagaagggagtggaccatgtccaggagcacgaagtgaatgcccgacgccgggtagcgacgggcgaccaccgccaagtcgaagttggccgcctcgttcccctcttcctcctcctcttcctccgtcgcgggcccgatatctgagtcctcctcggcgctcccgccccgggggactgcggccaggcctgccgcctgctcaccctcctcctccccgaggccttccacgggccctgcgactccgaccacctcggccgcaggcaccacgtcgctgctgtcggggccggagtcgccgccctcctggttaccagctccggccgcctcggcctgtgctccctcctggcttaccggggcctcctggtccccttgggtcgggtgtcggtcccctgtggcagacatgacaccagcagcgcctcaactggggtggcgagcgggctgaggcgaccacggtgaagacggtgaccactgaggtggctacggccgaggggaggcgaggagctggccgctgagggaataagagtctctctctttattgagggaataagagtctgtctcagacgacaccctaagatgggaagggcagggagcgaatcctagaaacctcccaccaaggctggcctgagaggacttagacaagttgggaaagattctggttggcaggcgaaagggggcgggaccggaagggtcaacgaggggctctcagtgagccctaagctcatttgctgaaaacttcagattgacatgttctatgtccaatgaatgatcaaggcccttaagctctagaactgagaatccagaatccagagctttttcttttcttttcatagtgttgctctgttgcccaggctggagtgcagtggcaagatctcggctcactgcaatccccgcctcctgggttccagtgattctcctgcctcagcctcctgagtagctgggactacaggtacatgccaccacgcctggctaggttttgtatttttagtagagacagggtttcaccatgttggccaggatggtctcgatctcctgaccttgtgatccacctgcctcagcctcccaaagtgcttggattacaggcatgagccaccgtgccaggccgagctctaccttttctatgaggccttagtgtccaaggctacccctttaggtccacacaagtcctgcccttttaattttatgattattagcaacactatagtagtcccatgtggaggcaccctggagcatgggaactgcaaggcggtcacagagttcacttatttccacctagtaatggctcatgccagtagagatagtgtcataaaaatgttatatagttcatagctaagcagtagtgaaaacctcccaagagacataagaatttcactgagttaacgtagttaaagctacttagaaaagaatgtgcagagttgaaatggatgcagtcatcactgagtgttgaggtggtaaatgacagacactggaaggtgtttaatgaatcctgccaaattcacttcaaacctccaaataatggggaaaaaaagagatactttttttaaaaggaccaggtcatctcataagagctaagcatcaaaaacaccaaaagtgcctgggggtggtggctcacgcctgtaatccagcactttgggaggccgcactttgggaggccgaggcaggcagatcacctgaggtcagtagttcgagaccagcatgaccaatatggtaaaaccctgtctgtactaaaaatacaaaaaattagctggacatggtggtgcgcgcctgtagtcccagctactcggaagggtgaggcaggaaatttgctggagcctgggaggtggaggttgcagtgagccaagatggccccactgcactccagcctgggtgacagagcgagactcagtttcaaaaaaaaaaaaaaaaaattagtaatatatgcaatattattttcacacttgcatcacatattaaatcagactagccgtattacaagtgctcagtagtcacaacacacagctctaaagatgagccccatctctctcttttcaaaaattgttttaaacttgtcattttacttgatttttggctgcagtgaaagaatttcaaagagtcttaccaaatggcggaaagtaatatctttcaatgaaggtatggtgggccaaaacaaagacgtaaaggagagatttgagttaagattacttattgaaaaatcttcccacgtttcagtttattcatttaaaacaaacttttattttttaacttgaacactgtcacatacatccatgaaagttagatgtcactggatatcacttttgatgtaacgaactttggaatgatatgtgttacaattcccacaggcatctggagaaaaagataaaaacaatgaacaacagagtcttctttcttttcctcccaactgtgggatgaaatgagagatgataaacaatagtacaacattaaccagcaccagtgactttctaaatagaagaaaatggccagctctgtgtatatctgcaacatttgtgtgctatatcttaaacaagtagagaagcccatcttttccttttgtaactcacgagcttggatatcagggtgcttgtggaactgaaggtttcagtcaaatgatcacaccaaccttgtctgcctagcactagaaaagcttgttgcttttgtttttac

SEQ ID NO: 1563312 - DNA, 4001 bp, Homo sapiens
tttggagttcttcaccttgttttccgcatccttctctttttcttgttctttctcttcctcgcctgcagcatcttgggcctcttcatcccacttttcgggctgagatttagtgacttctttagggaagaataatacacgcatggggaccagacattcacagaaaatatagcccaatttataactagcagcggcattcagctactccaccctcaggagaagcaggatagagttaagtaagaaaggaatagctgggcaccttcctactggttttcacaacagttccatggccctcacgttgctgctgcttgatcatttccacagggacactgtatttcccttttttccagtaaatctcccacccaaagcggctgattatttctagttctttggagaagaagagatctgaatcatcgggtccgatctcattctacggtgttttggtcagaactttgttgggaaaatatttgtttacctcaaaagacaaattctatggtgaagctcattggttcctcacccccccgaatgcttcatttttaccaagtgctcctgcatcacttcatcatttgggggatcaactttctacgaatctttacactttgaaaagccatgaactaaaagggatgcctgccatttgcctgttcttttccttggcgcatcccttctgtttcctgcggagctccctcctgaacccctatctacccggccattcatctgcgggctcacaaatggcaccgatgatctcagatctcctatcaaatataggttggtagagggcgacaagttttctcaaaaccacagatgtcgttagagaattgggcttcgactcattgggacacattctgccttaagtttcaggagggccccgactcctgcttcaccacccgaggccccgaccccccttcaccacccgcttcaccagctatgcccgcaccgcggccctgcctagaaccctgggacacacgggtccccgcctccccgctgctgccgctagcccgttccttaccctctggggccgtggcctcctgtgcggtcggttcttctgtggccggttcctctgcgtctggttcctctgtggcctcctctgagagcttctcctctgcggcctcctccgcgggctccctggccatctcggccaggtcagctggcactgcaggctctgggaccgatgcggcctcctggatcaggcccaggccctcgcccgcccgggctgcggcccctgcacccagcctctggggcagcagcagcggggggaggttgccccagaggttgcgcgcagcagcgtgtggccccaccatcaggcggctgagttgacggttctctatgaggatgtggtcgttgtgagagaggcggtggagaagggagtggaccatgtccaggagcacgaagtgaatgcccgacgccgggtagcgacgggcgaccaccgccaagtcgaagttggccgcctcgttcccctcttcctcctcctcttcctccgtcgcgggcccgatatctgagtcctcctcggcgctcccgccccgggggactgcggccaggcctgccgcctgctcaccctcctcctccccgaggccttccacgggccctgcgactccgaccacctcggccgcaggcaccacgtcgctgctgtcggggccggagtcgccgccctcctggttaccagctccggccgcctcggcctgtgctccctcctggcttaccggggcctcctggtccccttgggtcgggtgtcggtcccctgtggcagacatgacaccagcagcgcctcaactggggtggcgagcgggctgaggcgaccacggtgaagacggtgaccactgaggtggctacggccgaggggaggcgaggagctggccgctgagggaataagagtctctctctttattgagggaataagagtctgtctcagacgacaccctaagatgggaagggcagggagcgaatcctagaaacctcccaccaaggctggcctgagaggacttagacaagttgggaaagattctggttggcaggcgaaagggggcgggaccggaagggtcaacgaggggctctcagtgagccctaagctcatttgctgaaaacttcagattgacatgttctatgtccaatgaatgatcaaggcccttaagctctagaactgagaatccagaatccagagctttttcttttcttttcatagtgttgctctgttgcccaggctggagtgcagtggcaagatctcggctcactgcaatccccgcctcctgggttccagtgattctcctgcctcagcctcctgagtagctgggactacaggtacatgccaccacgcctggctaggttttgtatttttagtagagacagggtttcaccatgttggccaggatggtctcgatctcctgaccttgtgatccacctgcctcagcctcccaaagtgcttggattacaggcatgagccaccgtgccaggccgagctctaccttttctatgaggccttagtgtccaaggctacccctttaggtccacacaagtcctgcccttttaattttatgattattagcaacactatagtagtcccatgtggaggcaccctggagcatgggaactgcaaggcggtcacagagttcacttatttccacctagtaatggctcatgccagtagagatagtgtcataaaaatgttatatagttcatagctaagcagtagtgaaaacctcccaagagacataagaatttcactgagttaacgtagttaaagctacttagaaaagaatgtgcggagttgaaatggatgcagtcatcactgagtgttgaggtggtaaatgacagacactggaaggtgtttaatgaatcctgccaaattcacttcaaacctccaaataatggggaaaaaaagagatactttttttaaaaggaccaggtcatctcataagagctaagcatcaaaaacaccaaaagtgcctgggggtggtggctcacgcctgtaatccagcactttgggaggccgcactttgggaggccgaggcaggcagatcacctgaggtcagtagttcgagaccagcatgaccaatatggtaaaaccctgtctgtactaaaaatacaaaaaattagctggacatggtggtgcgcgcctgtagtcccagctactcggaagggtgaggcaggaaatttgctggagcctgggaggtggaggttgcagtgagccaagatggccccactgcactccagcctgggtgacagagcgagactcagtttcaaaaaaaaaaaaaaaaaattagtaatatatgcaatattattttcacacttgcatcacatattaaatcagactagccgtattacaagtgctcagtagtcacaacacacagctctaaagatgagccccatctctctcttttcaaaaattgttttaaacttgtcattttacttgatttttggctgcagtgaaagaatttcaaagagtcttaccaaatggcggaaagtaatatctttcaatgaaggtatggtgggccaaaacaaagacgtaaaggagagatttgagttaagattacttattgaaaaatcttcccacgtttcagtttattcatttaaaacaaacttttattttttaacttgaacactgtcacatacatccatgaaagttagatgtcactggatatcacttttgatgtaacgaactttggaatgatatgtgttacaattcccacaggcatctggagaaaaagataaaaacaatgaacaacagagtcttctttcttttcctcccaactgtgggatgaaatgagagatgataaacaatagtacaacattaaccagcaccagtgactttctaaatagaagaaaatggccagctctgtgtatatctgcaacatttgtgtgctatatcttaaacaagtagagaagcccatcttttccttttgtaactcacgagcttggatatcagggtgcttgtggaactgaaggtttcagtcaaatgatcacaccaaccttgtctgcctagcactagaaaagcttgttgcttttgtttttac

SEQ ID NO: 1563313 - DNA, 4001 bp, Homo sapiens
tttggagttcttcaccttgttttccgcatccttctctttttcttgttctttctcttcctcgcctgcagcatcttgggcctcttcatcccacttttcgggctgagatttagtgacttctttagggaagaataatacacacatggggaccagacattcacagaaaatatagcccaatttataactagcagcggcattcagctactccaccctcaggagaagcaggatagagttaagtaagaaaggaatagctgggcaccttcctactggttttcacaacagttccatggccctcacgttgctgctgcttgatcatttccacagggacactgtatttcccttttttccagtaaatctcccacccaaagcggctgattatttctagttctttggagaagaagagatctgaatcatcgggtccgatctcattctacggtgttttggtcagaactttgttgggaaaatatttgtttacctcaaaagacaaattctatggtgaagctcattggttcctcacccccccgaatgcttcatttttaccaagtgctcctgcatcacttcatcatttgggggatcaactttctacgaatctttacactttgaaaagccatgaactaaaagggatgcctgccatttgcctgttcttttccttggcgcatcccttctgtttcctgcggagctccctcctgaacccctatctacccggccattcatctgcgggctcacaaatggcaccgatgatctcagatctcctatcaaatataggttggtagagggcgacaagttttctcaaaaccacagatgtcgttagagaattgggcttcgactcattgggacacattctgccttaagtttcaggagggccccgactcctgcttcaccacccgaggccccgaccccccttcaccacccgcttcaccagctatgcccgcaccgcggccctgcctagaaccctgggacacacgggtccccgcctccccgctgctgccgctagcccgttccttaccctctggggccgtggcctcctgtgcggtcggttcttctgtggccggttcctctgcgtctggttcctctgtggcctcctctgagagcttctcctctgcggcctcctccgcgggctccctggccatctcggccaggtcagctggcactgcaggctctgggaccgatgcggcctcctggatcaggcccaggccctcgcccgcccgggctgcggcccctgcacccagcctctggggcagcagcagcggggggaggttgccccagaggttgcgcgcagcagcgtgtggccccaccatcaggcggctgagttgacggttctctatgaggatgtggtcgttgtgagagaggcggtggagaagggagtggaccatgtccaggagcacgaagtgaatgcccgacgccgggtagcgacgggcgaccaccgccaagtcgaagttggccgcctcgttcccctcttcctcctcctcttcctccgtcgcgggcccgatatctgagtcctcctcggcgctcccgccccgggggactgcggccaggcctgccgcctgctcaccctcctcctccccgaggccttccacgggccctgcgactccgaccacctcggccgcaggcaccacgtcgctgctgtcggggccggagtcgccgccctcctggttaccagctccggccgcctcggcctgtgctccctcctggcttaccggggcctcctggtccccttgggtcgggtgtcggtcccctgtggcagacatgacaccagcagcgcctcaactggggtggcgagcgggctgaggcgaccacggtgaagacggtgaccactgaggtggctacggccgaggggaggcgaggagctggccgctgagggaataagagtctctctctttattgagggaataagagtctgtctcagacgacaccctaagatgggaagggcagggagcgaatcctagaaacctcccaccaaggctggcctgagaggacttagacaagttgggaaagattctggttggcaggcgaaagggggcgggaccggaagggtcaacgaggggctctcagtgagccctaagctcatttgctgaaaacttcagattgacatgttctatgtccaatgaatgatcaaggcccttaagctctagaactgagaatccagaatccagagctttttcttttcttttcatagtgttgctctgttgcccaggctggagtgcagtggcaagatctcggctcactgcaatccccgcctcctgggttccagtgattctcctgcctcagcctcctgagtagctgggactacaggtacatgccaccacgcctggctaggttttgtatttttagtagagacagggtttcaccatgttggccaggatggtctcgatctcctgaccttgtgatccacctgcctcagcctcccaaagtgcttggattacaggcatgagccaccgtgccaggccgagctctaccttttctatgaggccttagtgtccaaggctacccctttaggtccacacaagtcctgcccttttaattttatgattattagcaacactatagtagtcccatgtggaggcaccctggagcatgggaactgcaaggcggtcacagagttcacttatttccacctagtaatggctcatgccagtagagatagtgtcataaaaatgttatatagttcatagctaagcagtagtgaaaacctcccaagagacataagaatttcactgagttaacgtagttaaagctacttagaaaagaatgtgcggagttgaaatggatgcagtcatcactgagtgttgaggtggtaaatgacagacactggaaggtgtttaatgaatcctgccaaattcacttcaaacctccaaataatggggaaaaaaagagatactttttttaaaaggaccaggtcatctcataagagctaagcatcaaaaacaccaaaagtgcctgggggtggtggctcacgcctgtaatccagcactttgggaggccgcactttgggaggccgaggcaggcagatcacctgaggtcagtagttcgagaccagcatgaccaatatggtaaaaccctgtctgtactaaaaatacaaaaaactagctggacatggtggtgcgcgcctgtagtcccagctactcggaagggtgaggcaggaaatttgctggagcctgggaggtggaggttgcagtgagccaagatggccccactgcactccagcctgggtgacagagcgagactcagtttcaaaaaaaaaaaaaaaaattagtaatatatgcaatattattttcacacttgcatcacatattaaatcagactagccgtattacaagtgctcagtagtcacaacacacagctctaaagatgagccccatctctctcttttcaaaaattgttttaaacttgtcattttacttgatttttggctgcagtgaaagaatttcaaagagtcttaccaaatggcggaaagtaatatctttcaatgaaggtatggtgggccaaaacaaagacgtaaaggagagatttgagttaagattacttattgaaaaatcttcccacgtttcagtttattcatttaaaacaaacttttattttttaacttgaacactgtcacatacatccatgaaagttagatgtcactggatatcacttttgatgtaacgaactttggaatgatatgtgttacaattcccacaggcatctggagaaaaagataaaaacaatgaacaacagagtcttctttcttttcctcccaactgtgggatgaaatgagagatgataaacaatagtacaacattaaccagcaccagtgactttctaaatagaagaaaatggccagctctgtgtatatctgcaacatttgtgtgctatatcttaaacaagtagagaagcccatcttttccttttgtaactcacgagcttggatatcagggtgcttgtggaactgaaggtttcagtcaaatgatcacaccaaccttgtctgcctagcactagaaaagcttgttgcttttgtttttaca

SEQ ID NO: 1563314 - DNA, 4001 bp, Homo sapiens
tttggagttcttcaccttgttttccgcatccttctctttttcttgttctttctcttcctcgcctgcagcatcttgggcctcttcatcccacttttcgggctgagatttagtgacttctttagggaagaataatacacacatggggaccagacattcacagaaaatatagcccaatttataactagcagcggcattcagctactccaccctcaggagaagcaggatagagttaagtaagaaaggaatagctgggcaccttcctactggttttcacaacagttccatggccctcacgttgctgctgcttgatcatttccacagggacactgtatttcccttttttccagtaaatctcccacccaaagcggctgattatttctagttctttggagaagaagagatctgaatcatcgggtccgatctcattctacggtgttttggtcagaactttgttgggaaaatatttgtttacctcaaaagacaaattctatggtgaagctcattggttcctcacccccccgaatgcttcatttttaccaagtgctcctgcatcacttcatcatttgggggatcaactttctacgaatctttacactttgaaaagccatgaactaaaagggatgcctgccatttgcctgttcttttccttggcgcatcccttctgtttcctgcggagctccctcctgaacccctatctacccggccattcatctgcgggctcacaaatggcaccgatgatctcagatctcctatcaaatataggttggtagagggcgacaagttttctcaaaaccacagatgtcgttagagaattgggcttcgactcattgggacacattctgccttaagtttcaggagggccccgactcctgcttcaccacccgaggccccgaccccccttcaccacccgcttcaccagctatgcccgcaccgcggccctgcctagaaccctgggacacacgggtccccgcctccccgctgctgccgctagcccgttccttaccctctggggccgtggcctcctgtgcggtcggttcttctgtggccggttcctctgcgtctggttcctctgtggcctcctctgagagcttctcctctgcggcctcctccgcgggctccctggccatctcggccaggtcagctggcactgcaggctctgggaccgatgcggcctcctggatcaggcccaggccctcgcccgcccgggctgcggcccctgcacccagcctctggggcagcagcagcggggggaggttgccccagaggttgcgcgcagcagcgtgtggccccaccatcaggcggctgagttgacggttctctatgaggatgtggtcgttgtgagagaggcggtggagaagggagtggaccatgtccaggagcacgaagtgaatgcccgacgccgggtagcgacgggcgaccaccgccaagtcgaagttggccgcctcgttcccctcttcctcctcctcttcctccgtcgcgggcccgatatctgagtcctcctcggcgctcccgccccgggggactgcggccaggcctgccgcctgctcaccctcctcctccccgaggccttccacgggccctgcgactccgaccacctcggccgcaggcaccacgtcgctgctgtcggggccggagtcgccgccctcctggttaccagctccggccgcctcggcctgtgctccctcctggcttaccggggcctcctggtccccttgggtcgggtgtcggtcccctgtggcagacatgacaccagcagcgcctcaactggggtggcgagcgggctgaggcgaccacggtgaagacggtgaccactgaggtggctacggccgaggggaggcgaggagctggccgctgagggaataagagtctctctctttattgagggaataagagtctgtctcagacgacaccctaagatgggaagggcagggagcgaatcctagaaacctcccaccaaggctggcctgagaggacttagacaagttgggaaagattctggttggcaggcgaaagggggcgggaccggaagggtcaacgaggggctctcagtgagccctaagctcatttgctgaaaacttcagattgacatgttctatgtccaatgaatgatcaaggcccttaagctctagaactgagaatccagaatccagagctttttcttttcttttcatagtgttgctctgttgcccaggctggagtgcagtggcaagatctcggctcactgcaatccccgcctcctgggttccagtgattctcctgcctcagcctcctgagtagctgggactacaggtacatgccaccacgcctggctaggttttgtatttttagtagagacagggtttcaccatgttggccaggatggtctcgatctcctgaccttgtgatccacctgcctcagcctcccaaagtgcttggattacaggcatgagccaccgtgccaggccgagctctaccttttctatgaggccttagtgtccaaggctacccctttaggtccacacaagtcctgcccttttaattttatgattattagcaacactatagtagtcccatgtggaggcaccctggagcatgggaactgcaaggcggtcacagagttcacttatttccacctagtaatggctcatgccagtagagatagtgtcataaaaatgttatatagttcatagctaagcagtagtgaaaacctcccaagagacataagaatttcactgagttaacgtagttaaagctacttagaaaagaatgtgcggagttgaaatggatgcagtcatcactgagtgttgaggtggtaaatgacagacactggaaggtgtttaatgaatcctgccaaattcacttcaaacctccaaataatggggaaaaaaagagatactttttttaaaaggaccaggtcatctcataagagctaagcatcaaaaacaccaaaagtgcctgggggtggtggctcacgcctgtaatccagcactttgggaggccgcactttgggaggccgaggcaggcagatcacctgaggtcagtagttcgagaccagcatgaccaatatggtaaaaccctgtctgtactaaaaatacaaaaaattagctggacatggtggtgcgcgcctgtagtcccagctactcggaagggtgaggcaggaaatttgctggagcctgggaggtggaggttgcagtgagccaagatggccccactgcactccagcctgggtgacagagcgagactcagtttcaaaaaaaaaaaaaaaaaattagtaatatatgcaatattattttcacacttgcatcacatattaaatcagactagccgtattacaagtgctcagtagtcacaacacacagctctaaagatgagccccatctctctcttttcaaaaattgttttaaacttgtcattttacttgatttttggctgcagtgaaagaatttcaaagagtcttaccaaatggcggaaagtaatatctttcaatgaaggtatggtgggccaaaacaaagacgtaaaggagagatttgagttaagattacttattgaaaaatcttcccacgtttcagtttattcatttaaaacaaacttttattttttaacttgaacactgtcacatacatccatgaaagttagatgtcactggatatcacttttgatgtaacgaactttggaatgatatgtgttacaattcccacaggcatctggagaaaaagataaaaacaatgaacaacagagtcttctttcttttcctcccaactgtgggatgaaatgagagatgataaacaatagtacaacattaaccagcaccagtgactttctaaatagaagaaaatggccagctctgtgtatatctgcaacatttgtgtgctatatcttaaacaagtagagaagcccatcttttccttttgtaactcacgagcttggatatcagggtgcttgtggaactgaaggtttcagtcaaatgatcacaccaaccttgtctgcctagcactagaaaagcttgttgcttttgtttttac

SEQ ID NO: 1563315 - DNA, 4001 bp, Homo sapiens
tttggagttcttcaccttgttttccgcatccttctctttttcttgttctttctcttcctcgcctgcagcatcttgggcctcttcatcccacttttcgggctgagatttagtgacttctttagggaagaataatacacacatggggaccagacattcacagaaaatatagcccaatttataactagcagcggcattcagctactccaccctcaggagaagcaggatagagttaagtaagaaaggaatagctgggcaccttcctactggttttcacaacagttccatggccctcacgttgctgctgcttgatcatttccacagggacactgtatttcccttttttccagtaaatctcccacccaaagcggctgattatttctagttctttggagaagaagagatctgaatcatcgggtccgatctcattctacggtgttttggtcagaactttgttgggaaaatatttgtttacctcaaaagacaaattctatggtgaagctcattggttcctcacccccccgaatgcttcatttttaccaagtgctcctgcatcacttcatcatttgggggatcaactttctacgaatctttacactttgaaaagccatgaactaaaagggatgcctgccatttgcctgttcttttccttggcgcatcccttctgtttcctgcggagctccctcctgaacccctatctacccggccattcatctgcgggctcacaaatggcaccgatgatctcagatctcctatcaaatataggttggtagagggcgacaagttttctcaaaaccacagatgtcgttagagaattgggcttcgactcattgggacacattctgccttaagtttcaggagggccccgactcctgcttcaccacccgaggccccgaccccccttcaccacccgcttcaccagctatgcccgcaccgcggccctgcctagaaccctgggacacacgggtccccgcctccccgctgctgccgctagcccgttccttaccctctggggccgtggcctcctgtgcggtcggttcttctgtggccggttcctctgcgtctggttcctctgtggcctcctctgagagcttctcctctgcggcctcctccgcgggctccctggccatctcggccaggtcagctggcactgcaggctctgggaccgatgcggcctcctggatcaggcccaggccctcgcccgcccgggctgcggcccctgcacccagcctctggggcagcagcagcggggggaggttgccccagaggttgcgcgcagcagcgtgtggccccaccatcaggcggctgagttgacggttctctatgaggatgtggtcgttgtgagagaggcggtggagaagggagtggaccatgtccaggagcacgaagtgaatgcccgacgccgggtagcgacgggcgaccaccgccaagtcgaagttggccgcctcgttcccctcttcctcctcctcttcctccgtcgcgggcccgatatctgagtcctcctcggcgctcccgccccgggggactgcggccaggcctgccgcctgctcaccctcctcctccccgaggccttccacgggccctgcgactccgaccacctcggccgcaggcaccacgtcgctgctgtcggggccggagtcgccgccctcctggttaccagctccggccgcctcggcctgtgctccctcctggcttaccggggcctcctggtccccttgggtcgggtgtcggtcccctgtggcagacatgacaccagcagcgcctcaactggggtggcgagcgggctgaggcgaccacggtgaagacggtgaccactgaggtggctacggccgaggggaggcgaggagctggccgctgagggaataagagtctctctctttattgagggaataagagtctgtctcagacgacaccctaagatgggaagggcagggagcgaatcctagaaacctcccaccaaggctggcctgagaggacttagacaagttgggaaagattctggttggcaggcgaaagggggcgggaccggaagggtcaacgaggggctctcagtgagccctaagctcatttgctgaaaacttcagattgacatgttctatgtccaatgaatgatcaaggcccttaagctctagaactgagaatccagaatccagagctttttcttttcttttcatagtgttgctctgttgcccaggctggagtgcagtggcaagatctcggctcactgcaatccccgcctcctgggttccagtgattctcctgcctcagcctcctgagtagctgggactacaggtacatgccaccacgcctggctaggttttgtatttttagtagagacagggtttcaccatgttggccaggatggtctcgatctcctgaccttgtgatccacctgcctcagcctcccaaagtgcttggattacaggcatgagccaccgtgccaggccgagctctaccttttctatgaggccttagtgtccaaggctacccctttaggtccacacaagtcctgcccttttaattttatgattattagcaacactatagtagtcccatgtggaggcaccctggagcatgggaactgcaaggcggtcacagagttcacttatttccacctagtaatggctcatgccagtagagatagtgtcataaaaatgttatatagttcatagctaagcagtagtgaaaacctcccaagagacataagaatttcactgagttaacgtagttaaagctacttagaaaagaatgtgcggagttgaaatggatgcagtcatcactgagtgttgaggtggtaaatgacagacactggaaggtgtttaatgaatcctgccaaattcacttcaaacctccaaataatggggaaaaaaagagatactttttttaaaaggaccaggtcatctcataagagctaagcatcaaaaacaccaaaagtgcctgggggtggtggctcacgcctgtaatccagcactttgggaggccgcactttgggaggccgaggcaggcagatcacctgaggtcagtagttcgagaccagcatgaccaatatggtaaaaccctgtctgtactaaaaatacaaaaaattagctggacatggtggtgcgcgcctgtagtcccagctactcggaagggtgaggcaggaaatttgctggagcctgggaggtggaggttgcagtgagccaagatggtcccactgcactccagcctgggtgacagagcgagactcagtttcaaaaaaaaaaaaaaaaattagtaatatatgcaatattattttcacacttgcatcacatattaaatcagactagccgtattacaagtgctcagtagtcacaacacacagctctaaagatgagccccatctctctcttttcaaaaattgttttaaacttgtcattttacttgatttttggctgcagtgaaagaatttcaaagagtcttaccaaatggcggaaagtaatatctttcaatgaaggtatggtgggccaaaacaaagacgtaaaggagagatttgagttaagattacttattgaaaaatcttcccacgtttcagtttattcatttaaaacaaacttttattttttaacttgaacactgtcacatacatccatgaaagttagatgtcactggatatcacttttgatgtaacgaactttggaatgatatgtgttacaattcccacaggcatctggagaaaaagataaaaacaatgaacaacagagtcttctttcttttcctcccaactgtgggatgaaatgagagatgataaacaatagtacaacattaaccagcaccagtgactttctaaatagaagaaaatggccagctctgtgtatatctgcaacatttgtgtgctatatcttaaacaagtagagaagcccatcttttccttttgtaactcacgagcttggatatcagggtgcttgtggaactgaaggtttcagtcaaatgatcacaccaaccttgtctgcctagcactagaaaagcttgttgcttttgtttttaca

SEQ ID NO: 1563316 - DNA, 4001 bp, Homo sapiens
tttggagttcttcaccttgttttccgcatccttctctttttcttgttctttctcttcctcgcctgcagcatcttgggcctcttcatcccacttttcgggctgagatttagtgacttctttagggaagaataatacacacatggggaccagacattcacagaaaatatagcccaatttataactagcagcggcattcagctactccaccctcaggagaagcaggatagagttaagtaagaaaggaatagctgggcaccttcctactggttttcacaacagttccatggccctcacgttgctgctgcttgatcatttccacagggacactgtatttcccttttttccagtaaatctcccacccaaagcggctgattatttctagttctttggagaagaagagatctgaatcatcgggtccgatctcattctacggtgttttggtcagaactttgttgggaaaatatttgtttacctcaaaagacaaattctatggtgaagctcattggttcctcacccccctgaatgcttcatttttaccaagtgctcctgcatcacttcatcatttgggggatcaactttctacgaatctttacactttgaaaagccatgaactaaaagggatgcctgccatttgcctgttcttttccttggcgcatcccttctgtttcctgcggagctccctcctgaacccctatctacccggccattcatctgcgggctcacaaatggcaccgatgatctcagatctcctatcaaatataggttggtagagggcgacaagttttctcaaaaccacagatgtcgttagagaattgggcttcgactcattgggacacattctgccttaagtttcaggagggccccgactcctgcttcaccacccgaggccccgaccccccttcaccacccgcttcaccagctatgcccgcaccgcggccctgcctagaaccctgggacacacgggtccccgcctccccgctgctgccgctagcccgttccttaccctctggggccgtggcctcctgtgcggtcggttcttctgtggccggttcctctgcgtctggttcctctgtggcctcctctgagagcttctcctctgcggcctcctccgcgggctccctggccatctcggccaggtcagctggcactgcaggctctgggaccgatgcggcctcctggatcaggcccaggccctcgcccgcccgggctgcggcccctgcacccagcctctggggcagcagcagcggggggaggttgccccagaggttgcgcgcagcagcgtgtggccccaccatcaggcggctgagttgacggttctctatgaggatgtggtcgttgtgagagaggcggtggagaagggagtggaccatgtccaggagcacgaagtgaatgcccgacgccgggtagcgacgggcgaccaccgccaagtcgaagttggccgcctcgttcccctcttcctcctcctcttcctccgtcgcgggcccgatatctgagtcctcctcggcgctcccgccccgggggactgcggccaggcctgccgcctgctcaccctcctcctccccgaggccttccacgggccctgcgactccgaccacctcggccgcaggcaccacgtcgctgctgtcggggccggagtcgccgccctcctggttaccagctccggccgcctcggcctgtgctccctcctggcttaccggggcctcctggtccccttgggtcgggtgtcggtcccctgtggcagacatgacaccagcagcgcctcaactggggtggcgagcgggctgaggcgaccacggtgaagacggtgaccactgaggtggctacggccgaggggaggcgaggagctggccgctgagggaataagagtctctctctttattgagggaataagagtctgtctcagacgacaccctaagatgggaagggcagggagcgaatcctagaaacctcccaccaaggctggcctgagaggacttagacaagttgggaaagattctggttggcaggcgaaagggggcgggaccggaagggtcaacgaggggctctcagtgagccctaagctcatttgctgaaaacttcagattgacatgttctatgtccaatgaatgatcaaggcccttaagctctagaactgagaatccagaatccagagctttttcttttcttttcatagtgttgctctgttgcccaggctggagtgcagtggcaagatctcggctcactgcaatccccgcctcctgggttccagtgattctcctgcctcagcctcctgagtagctgggactacaggtacatgccaccacgcctggctaggttttgtatttttagtagagacagggtttcaccatgttggccaggatggtctcgatctcctgaccttgtgatccacctgcctcagcctcccaaagtgcttggattacaggcatgagccaccgtgccaggccgagctctaccttttctatgaggccttagtgtccaaggctacccctttaggtccacacaagtcctgcccttttaattttatgattattagcaacactatagtagtcccatgtggaggcaccctggagcatgggaactgcaaggcggtcacagagttcacttatttccacctagtaatggctcatgccagtagagatagtgtcataaaaatgttatatagttcatagctaagcagtagtgaaaacctcccaagagacataagaatttcactgagttaacgtagttaaagctacttagaaaagaatgtgcagagttgaaatggatgcagtcatcactgagtgttgaggtggtaaatgacagacactggaaggtgtttaatgaatcctgccaaattcacttcaaacctccaaataatggggaaaaaaagagatactttttttaaaaggaccaggtcatctcataagagctaagcatcaaaaacaccaaaagtgcctgggggtggtggctcacgcctgtaatccagcactttgggaggccgcactttgggaggccgaggcaggcagatcacctgaggtcagtagttcgagaccagcatgaccaatatggtaaaaccctgtctgtactaaaaatacaaaaaattagctggacatggtggtgcgcgcctgtagtcccagctactcggaagggtgaggcaggaaatttgctggagcctgggaggtggaggttgcagtgagccaagatggccccactgcactccagcctgggtgacagagcgagactcagtttcaaaaaaaaaaaaaaaaattagtaatatatgcaatattattttcacacttgcatcacatattaaatcagactagccgtattacaagtgctcagtagtcacaacacacagctctaaagatgagccccatctctctcttttcaaaaattgttttaaacttgtcattttacttgatttttggctgcagtgaaagaatttcaaagagtcttaccaaatggcggaaagtaatatctttcaatgaaggtatggtgggccaaaacaaagacgtaaaggagagatttgagttaagattacttattgaaaaatcttcccacgtttcagtttattcatttaaaacaaacttttattttttaacttgaacactgtcacatacatccatgaaagttagatgtcactggatatcacttttgatgtaacgaactttggaatgatatgtgttacaattcccacaggcatctggagaaaaagataaaaacaatgaacaacagagtcttctttcttttcctcccgactgtgggatgaaatgagagatgataaacaatagtacaacattaaccagcaccagtgactttctaaatagaagaaaatggccagctctgtgtatatctgcaacatttgtgtgctatatcttaaacaagtagagaagcccatcttttccttttgtaactcacgagcttggatatcagggtgcttgtggaactgaaggtttcagtcaaatgatcacaccaaccttgtctgcctagcactagaaaagcttgttgcttttgtttttaca

SEQ ID NO: 1563317 - DNA, 4001 bp, Homo sapiens
tttggagttcttcaccttgttttccgcatccttctctttttcttgttctttctcttcctcgcctgcagcatcttgggcctcttcatcccacttttcgggctgagatttagtgacttctttagggaagaataatacacacatggggaccagacattcacagaaaatatagcccaatttataactagcagcggcattcagctactccaccctcaggagaagcaggatagagttaagtaagaaaggaatagctgggcaccttcctactggttttcacaacagttccatggccctcacgttgctgctgcttgatcatttccacagggacactgtatttcccttttttccagtaaatctcccacccaaagcggctgattatttctagttctttggagaagaagagatctgaatcatcgggtccgatctcattctacggtgttttggtcagaactttgttgggaaaatatttgtttacctcaaaagacaaattctatggtgaagctcattggttcctcacccccctgaatgcttcatttttaccaagtgctcctgcatcacttcatcatttgggggatcaactttctacgaatctttacactttgaaaagccatgaactaaaagggatgcctgccatttgcctgttcttttccttggcgcatcccttctgtttcctgcggagctccctcctgaacccctatctacccggccattcatctgcgggctcacaaatggcaccgatgatctcagatctcctatcaaatataggttggtagagggcgacaagttttctcaaaaccacagatgtcgttagagaattgggcttcgactcattgggacacattctgccttaagtttcaggagggccccgactcctgcttcaccacccgaggccccgaccccccttcaccacccgcttcaccagctatgcccgcaccgcggccctgcctagaaccctgggacacacgggtccccgcctccccgctgctgccgctagcccgttccttaccctctggggccgtggcctcctgtgcggtcggttcttctgtggccggttcctctgcgtctggttcctctgtggcctcctctgagagcttctcctctgcggcctcctccgcgggctccctggccatctcggccaggtcagctggcactgcaggctctgggaccgatgcggcctcctggatcaggcccaggccctcgcccgcccgggctgcggcccctgcacccagcctctggggcagcagcagcggggggaggttgccccagaggttgcgcgcagcagcgtgtggccccaccatcaggcggctgagttgacggttctctatgaggatgtggtcgttgtgagagaggcggtggagaagggagtggaccatgtccaggagcacgaagtgaatgcccgacgccgggtagcgacgggcgaccaccgccaagtcgaagttggccgcctcgttcccctcttcctcctcctcttcctccgtcgcgggcccgatatctgagtcctcctcggcgctcccgccccgggggactgcggccaggcctgccgcctgctcaccctcctcctccccgaggccttccacgggccctgcgactccgaccacctcggccgcaggcaccacgtcgctgctgtcggggccggagtcgccgccctcctggttaccagctccggccgcctcggcctgtgctccctcctggcttaccggggcctcctggtccccttgggtcgggtgtcggtcccctgtggcagacatgacaccagcagcgcctcaactggggtggcgagcgggctgaggcgaccacggtgaagacggtgaccactgaggtggctacggccgaggggaggcgaggagctggccgctgagggaataagagtctctctctttattgagggaataagagtctgtctcagacgacaccctaagatgggaagggcagggagcgaatcctagaaacctcccaccaaggctggcctgagaggacttagacaagttgggaaagattctggttggcaggcgaaagggggcgggaccggaagggtcaacgaggggctctcagtgagccctaagctcatttgctgaaaacttcagattgacatgttctatgtccaatgaatgatcaaggcccttaagctctagaactgagaatccagaatccagagctttttcttttcttttcatagtgttgctctgttgcccaggctggagtgcagtggcaagatctcggctcactgcaatccccgcctcctgggttccagtgattctcctgcctcagcctcctgagtagctgggactacaggtacatgccaccacgcctggctaggttttgtatttttagtagagacagggtttcaccatgttggccaggatggtctcgatctcctgaccttgtgatccacctgcctcagcctcccaaagtgcttggattacaggcatgagccaccgtgccaggccgagctctaccttttctatgaggccttagtgtccaaggctacccctttaggtccacacaagtcctgcccttttaattttatgattattagcaacactatagtagtcccatgtggaggcaccctggagcatgggaactgcaaggcggtcacagagttcacttatttccacctagtaatggctcatgccagtagagatagtgtcataaaaatgttatatagttcatagctaagcagtagtgaaaacctcccaagagacataagaatttcactgagttaacgtagttaaagctacttagaaaagaatgtgcagagttgaaatggatgcagtcatcactgagtgttgaggtggtaaatgacagacactggaaggtgtttaatgaatcctgccaaattcacttcaaacctccaaataatggggaaaaaaagagatactttttttaaaaggaccaggtcatctcataagagctaagcatcaaaaacaccaaaagtgcctgggggtggtggctcacgcctgtaatccagcactttgggaggccgcactttgggaggccgaggcaggcagatcacctgaggtcagtagttcgagaccagcatgaccaaaatggtaaaaccctgtctgtactaaaaatacaaaaaattagctggacatggtggtgcgcgcctgtagtcccagctactcggaagggtgaggcaggaaatttgctggagcctgggaggtggaggttgcagtgagccaagatggccccactgcactccagcctgggtgacagagcgagactcagtttcaaaaaaaaaaaaaaaaattagtaatatatgcaatattattttcacacttgcatcacatattaaatcagactagccgtattacaagtgctcagtagtcacaacacacagctctaaagatgagccccatctctctcttttcaaaaattgttttaaacttgtcattttacttgatttttggctgcagtgaaagaatttcaaagagtcttaccaaatggcggaaagtaatatctttcaatgaaggtatggtgggccaaaacaaagacgtaaaggagagatttgagttaagattacttattgaaaaatcttcccacgtttcagtttattcatttaaaacaaacttttattttttaacttgaacactgtcacatacatccatgaaagttagatgtcactggatatcacttttgatgtaacgaactttggaatgatatgtgttacaattcccacaggcatctggagaaaaagataaaaacaatgaacaacagagtcttctttcttttcctcccgactgtgggatgaaatgagagatgataaacaatagtacaacattaaccagcaccagtgactttctaaatagaagaaaatggccagctctgtgtatatctgcaacatttgtgtgctatatcttaaacaagtagagaagcccatcttttccttttgtaactcacgagcttggatatcagggtgcttgtggaactgaaggtttcagtcaaatgatcacaccaaccttgtctgcctagcactagaaaagcttgttgcttttgtttttaca

SEQ ID NO: 1563318 - DNA, 4001 bp, Homo sapiens; identical to SEQ ID NO: 1563317

SEQ ID NO: 1563319 - DNA, 4001 bp, Homo sapiens; identical to SEQ ID NO: 1563316

SEQ ID NO: 1563320 - DNA, 4001 bp, Homo sapiens
tttggagttcttcaccttgttttctgcatccttctctttttcttgttctttctcttcctcgcctgcagcatcttgggcctcttcatcccacttttcgggctgagatttagtgacttctttagggaagaataatacacacatggggaccagacattcacagaaaatatagcccaatttataactagcagcggcattcagctactccaccctcaggagaagcaggatagagttaagtaagaaaggaatagctgggcaccttcctactggttttcacaacagttccatggccctcacgttgctgctgcttgatcatttccacagggacactgtatttcccttttttccagtaaatctcccacccaaagcggctgattatttctagttctttggagaagaagagatctgaatcatcgggtccgatctcattctacggtgttttggtcagaactttgttgggaaaatatttgtttacctcaaaagacaaattctatggtgaagctcattggttcctcacccccctgaatgcttcatttttaccaagtgctcctgcatcacttcatcatttgggggatcaactttctacgaatctttacactttgaaaagccatgaactaaaagggatgcctgccatttgcctgttcttttccttggcgcatcccttctgtttcctgcggagctccctcctgaacccctatctacccggccattcatctgcgggctcacaaatggcaccgatgatctcagatctcctatcaaatataggttggtagagggcgacaagttttctcaaaaccacagatgtcgttagagaattgggcttcgactcattgggacacattctgccttaagtttcaggagggccccgactcctgcttcaccacccgaggccccgaccccccttcaccacccgcttcaccagctatgcccgcaccgcggccctgcctagaaccctgggacacacgggtccccgcctccccgctgctgccgctagcccgttccttaccctctggggccgtggcctcctgtgcggtcggttcttctgtggccggttcctctgcgtctggttcctctgtggcctcctctgagagcttctcctctgcggcctcctccgcgggctccctggccatctcggccaggtcagctggcactgcaggctctgggaccgatgcggcctcctggatcaggcccaggccctcgcccgcccgggctgcggcccctgcacccagcctctggggcagcagcagcggggggaggttgccccagaggttgcgcgcagcagcgtgtggccccaccatcaggcggctgagttgacggttctctatgaggatgtggtcgttgtgagagaggcggtggagaagggagtggaccatgtccaggagcacgaagtgaatgcccgacgccgggtagcgacgggcgaccaccgccaagtcgaagttggccgcctcgttcccctcttcctcctcctcttcctccgtcgcgggcccgatatctgagtcctcctcggcgctcccgccccgggggactgcggccaggcctgccgcctgctcaccctcctcctccccgaggccttccacgggccctgcgactccgaccacctcggccgcaggcaccacgtcgctgctgtcggggccggagtcgccgccctcctggttaccagctccggccgcctcggcctgtgctccctcctggcttaccggggcctcctggtccccttgggtcgggtgtcggtcccctgtggcagacatgacaccagcagcgcctcaactggggtggcgagcgggctgaggcgaccacggtgaagacggtgaccactgaggtggctacggccgaggggaggcgaggagctggccgctgagggaataagagtctctctctttattgagggaataagagtctgtctcagacgacaccctaagatgggaagggcagggagcgaatcctagaaacctcccaccaaggctggcctgagaggacttagacaagttgggaaagattctggttggcaggcgaaagggggcgggaccggaagggtcaacgaggggctctcagtgagccctaagctcatttgctgaaaacttcagattgacatgttctatgtccaatgaatgatcaaggcccttaagctctagaactgagaatccagaatccagagctttttcttttcttttcatagtgttgctctgttgcccaggctggagtgcagtggcaagatctcggctcactgcaatccccgcctcctgggttccagtgattctcctgcctcagcctcctgagtagctgggactacaggtacatgccaccacgcctggctaggttttgtatttttagtagagacagggtttcaccatgttggccaggatggtctcgatctcctgaccttgtgatccacctgcctcagcctcccaaagtgcttggattacaggcatgagccaccgtgccaggccgagctctaccttttctatgaggccttagtgtccaaggctacccctttaggtccacacaagtcctgcccttttaattttatgattattagcaacactatagtagtcccatgtggaggcaccctggagcatgggaactgcaaggcggtcacagagttcacttatttccacctagtaatggctcatgccagtagagatagtgtcataaaaatgttatatagttcatagctaagcagtagtgaaaacctcccaagagacataagaatttcactgagttaacgtagttaaagctacttagaaaagaatgtgcagagttgaaatggatgcagtcatcactgagtgttgaggtggtaaatgacagacactggaaggtgtttaatgaatcctgccaaattcacttcaaacctccaaataatggggaaaaaaagagatactttttttaaaaggaccaggtcatctcataagagctaagcatcaaaaacaccaaaagtgcctgggggtggtggctcacgcctgtaatccagcactttgggaggccgcactttgggaggccgaggcaggcagatcacctgaggtcagtagttcgagaccagcatgaccaatatggtaaaaccctgtctgtactaaaaatacaaaaaattagctgggtgtgggggtgtgcgcctatattcccagctactcaagacagtgaggcaggaaatttgctggaacctgggaggtggaggttgcagtgagctgagatgtccccactgcactccagcctgggtgacagagcgagactcagtctcaaaataattaaaaaaaaaaaactaaacaaaacaccaaaaggacaggcttcctaggatatttcaagcaacagcccaaggctttttgttgatttcaaaacccgcttaatcaagattcaagtagtaagtaattctgaacattttggagaaatcaactgttattttgtgttcattctatgaaattttttgtcacactacaactgctctctgaaaaaaattgcaggtagcatatttcatgtattaaattgagcaatattagtaccattaaatctcatcaagttgagcaggtcattgttgttcctttcatcaactcagtcaaatttcagtgcttctatttttctctagtttcatctaaaaaaggggcatggtgctgtcacaagtcattggtttaaatctggaagacaatgtggaaaatttctaatccaaaatactcactattaagacagcaaaacccaggcagaaccccagtctgaggtctggagttgctttaatatttgcttcctgatgcgatgtttggaaagttatttatttctatgcctcagttttatcatttgtgaagttaagataatgattctctagctacctcccaaggttgatctgagaatcaagtaagataatgggatgaaaaccctttttgtactgtaaaatactatacatgtatatgattacatcaaaaataatttttccctgttcttaaattattggagagaagccgtcaggtatatttggccctctgtatctatggattctgcatgtgtggattcaactaactgga

SEQ ID NO: 1563321 - DNA, 4001 bp, Homo sapiens; identical to SEQ ID NO: 1563311

SEQ ID NO: 1563322 - DNA, 4001 bp, Homo sapiens; identical to SEQ ID NO: 1563312

SEQ ID NO: 1563323 - DNA, 4001 bp, Homo sapiens; identical to SEQ ID NO: 1563313

SEQ ID NO: 1563324 - DNA, 4001 bp, Homo sapiens; identical to SEQ ID NO: 1563314

SEQ ID NO: 1563325 - DNA, 4001 bp, Homo sapiens; identical to SEQ ID NO: 1563315

SEQ ID NO: 1563326 - DNA, 4001 bp, Homo sapiens; identical to SEQ ID NO: 1563316

SEQ ID NO: 1563327 - DNA, 4001 bp, Homo sapiens; identical to SEQ ID NO: 1563317

SEQ ID NO: 1563328 - DNA, 4001 bp, Homo sapiens; identical to SEQ ID NO: 1563317

SEQ ID NO: 1563329 - DNA, 4001 bp, Homo sapiens; identical to SEQ ID NO: 1563316

SEQ ID NO: 1563330 - DNA, 4001 bp, Homo sapiens; identical to SEQ ID NO: 1563320

SEQ ID NO: 1563331 - DNA, 4001 bp, Homo sapiens; identical to SEQ ID NO: 1563311

SEQ ID NO: 1563332 - DNA, 4001 bp, Homo sapiens; identical to SEQ ID NO: 1563312

SEQ ID NO: 1563333 - DNA, 4001 bp, Homo sapiens; identical to SEQ ID NO: 1563313

SEQ ID NO: 1563334 - DNA, 4001 bp, Homo sapiens; identical to SEQ ID NO: 1563314

SEQ ID NO: 1563335 - DNA, 4001 bp, Homo sapiens; identical to SEQ ID NO: 1563315

SEQ ID NO: 1563336 - DNA, 4001 bp, Homo sapiens; identical to SEQ ID NO: 1563316

SEQ ID NO: 1563337 - DNA, 4001 bp, Homo sapiens; identical to SEQ ID NO: 1563317

SEQ ID NO: 1563338 - DNA, 4001 bp, Homo sapiens; identical to SEQ ID NO: 1563317

SEQ ID NO: 1563339 - DNA, 4001 bp, Homo sapiens; identical to SEQ ID NO: 1563316

SEQ ID NO: 1563340 - DNA, 4001 bp, Homo sapiens; identical to SEQ ID NO: 1563320

SEQ ID NO: 1563341 - DNA, 4001 bp, Homo sapiens; identical to SEQ ID NO: 1563311

SEQ ID NO: 1563342 - DNA, 4001 bp, Homo sapiens; identical to SEQ ID NO: 1563312

SEQ ID NO: 1563343 - DNA, 4001 bp, Homo sapiens; identical to SEQ ID NO: 1563313

SEQ ID NO: 1563344 - DNA, 4001 bp, Homo sapiens; identical to SEQ ID NO: 1563314

SEQ ID NO: 1563345 - DNA, 4001 bp, Homo sapiens; identical to SEQ ID NO: 1563315

SEQ ID NO: 1563346 - DNA, 4001 bp, Homo sapiens; identical to SEQ ID NO: 1563316

SEQ ID NO: 1563347 - DNA, 4001 bp, Homo sapiens; identical to SEQ ID NO: 1563317

SEQ ID NO: 1563348 - DNA, 4001 bp, Homo sapiens; identical to SEQ ID NO: 1563317

SEQ ID NO: 1563349 - DNA, 4001 bp, Homo sapiens; identical to SEQ ID NO: 1563316

SEQ ID NO: 1563350 - DNA, 4001 bp, Homo sapiens; identical to SEQ ID NO: 1563320

SEQ ID NO: 1563351 - DNA, 4001 bp, Homo sapiens; identical to SEQ ID NO: 1563311

SEQ ID NO: 1563352 - DNA, 4001 bp, Homo sapiens; identical to SEQ ID NO: 1563312

SEQ ID NO: 1563353 - DNA, 4001 bp, Homo sapiens; identical to SEQ ID NO: 1563313

SEQ ID NO: 1563354 - DNA, 4001 bp, Homo sapiens; identical to SEQ ID NO: 1563314

SEQ ID NO: 1563355 - DNA, 4001 bp, Homo sapiens; identical to SEQ ID NO: 1563315

SEQ ID NO: 1563356 - DNA, 4001 bp, Homo sapiens; identical to SEQ ID NO: 1563316

SEQ ID NO: 1563357 - DNA, 4001 bp, Homo sapiens; identical to SEQ ID NO: 1563317

SEQ ID NO: 1563358 - DNA, 4001 bp, Homo sapiens; identical to SEQ ID NO: 1563317

SEQ ID NO: 1563359 - DNA, 4001 bp, Homo sapiens; identical to SEQ ID NO: 1563316

SEQ ID NO: 1563360 - DNA, 4001 bp, Homo sapiens; identical to SEQ ID NO: 1563320

SEQ ID NO: 1563361 - DNA, 4001 bp, Homo sapiens; identical to SEQ ID NO: 1563311

SEQ ID NO: 1563362 - DNA, 4001 bp, Homo sapiens; identical to SEQ ID NO: 1563312

SEQ ID NO: 1563363 - DNA, 4001 bp, Homo sapiens; identical to SEQ ID NO: 1563313

SEQ ID NO: 1563364 - DNA, 4001 bp, Homo sapiens; identical to SEQ ID NO: 1563314

SEQ ID NO: 1563365 - DNA, 4001 bp, Homo sapiens; identical to SEQ ID NO: 1563315

SEQ ID NO: 1563366 - DNA, 4001 bp, Homo sapiens; identical to SEQ ID NO: 1563316

SEQ ID NO: 1563367 - DNA, 4001 bp, Homo sapiens; identical to SEQ ID NO: 1563317

SEQ ID NO: 1563368 - DNA, 4001 bp, Homo sapiens; identical to SEQ ID NO: 1563317

SEQ ID NO: 1563369 - DNA, 4001 bp, Homo sapiens; identical to SEQ ID NO: 1563316

SEQ ID NO: 1563370 - DNA, 4001 bp, Homo sapiens; identical to SEQ ID NO: 1563320

SEQ ID NO: 1563371 - DNA, 4001 bp, Homo sapiens; identical to SEQ ID NO: 1563311

SEQ ID NO: 1563372 - DNA, 4001 bp, Homo sapiens; identical to SEQ ID NO: 1563312

SEQ ID NO: 1563373 - DNA, 4001 bp, Homo sapiens; identical to SEQ ID NO: 1563313

SEQ ID NO: 1563374 - DNA, 4001 bp, Homo sapiens; identical to SEQ ID NO: 1563314

SEQ ID NO: 1563375 - DNA, 4001 bp, Homo sapiens; identical to SEQ ID NO: 1563315

SEQ ID NO: 1563376 - DNA, 4001 bp, Homo sapiens; identical to SEQ ID NO: 1563316

SEQ ID NO: 1563377 - DNA, 4001 bp, Homo sapiens; identical to SEQ ID NO: 1563317

SEQ ID NO: 1563378 - DNA, 4001 bp, Homo sapiens; identical to SEQ ID NO: 1563317

SEQ ID NO: 1563379 - DNA, 4001 bp, Homo sapiens; identical to SEQ ID NO: 1563316

SEQ ID NO: 1563380 - DNA, 4001 bp, Homo sapiens; identical to SEQ ID NO: 1563320

SEQ ID NO: 1563381 - DNA, 4001 bp, Homo sapiens; identical to SEQ ID NO: 1563311

SEQ ID NO: 1563382 - DNA, 4001 bp, Homo sapiens; identical to SEQ ID NO: 1563312

SEQ ID NO: 1563383 - DNA, 4001 bp, Homo sapiens; identical to SEQ ID NO: 1563313

SEQ ID NO: 1563384 - DNA, 4001 bp, Homo sapiens; identical to SEQ ID NO: 1563314

SEQ ID NO: 1563385 - DNA, 4001 bp, Homo sapiens; identical to SEQ ID NO: 1563315

SEQ ID NO: 1563386 - DNA, 4001 bp, Homo sapiens; identical to SEQ ID NO: 1563316

SEQ ID NO: 1563387 - DNA, 4001 bp, Homo sapiens; identical to SEQ ID NO: 1563317

SEQ ID NO: 1563388 - DNA, 4001 bp, Homo sapiens; identical to SEQ ID NO: 1563317

SEQ ID NO: 1563389 - DNA, 4001 bp, Homo sapiens; identical to SEQ ID NO: 1563316

SEQ ID NO: 1563390 - DNA, 4001 bp, Homo sapiens; identical to SEQ ID NO: 1563320

SEQ ID NO: 1563391 - DNA, 4001 bp, Homo sapiens; identical to SEQ ID NO: 1563312

SEQ ID NO: 1563392 - DNA, 4001 bp, Homo sapiens; identical to SEQ ID NO: 1563313

SEQ ID NO: 1563393 - DNA, 4001 bp, Homo sapiens; identical to SEQ ID NO: 1563314

SEQ ID NO: 1563394 - DNA, 4001 bp, Homo sapiens; identical to SEQ ID NO: 1563315

SEQ ID NO: 1563395 - DNA, 4001 bp, Homo sapiens
tttggagttcttcaccttgttttctgcatccttctctttttcttgttctttctcttcctcgcctgcagcatcttgggcctcttcatcccacttttcgggctgagatttagtgacttctttagggaagaataatacacacatggggaccagacattcacagaaaatatagcccaatttataactagcagcggcattcagctactccaccctcaggagaagcaggatagagttaagtaagaaaggaatagctgggcaccttcctactggttttcacaacagttccatggccctcacgttgctgctgcttgatcatttccacagggacactgtatttcccttttttccagtaaatctcccacccaaagcggctgattatttctagttctttggagaagaagagatctgaatcatcgggtccgatctcattctacggtgttttggtcagaactttgttgggaaaatatttgtttacctcaaaagacaaattctatggtgaagctcattggttcctcacccccctgaatgcttcatttttaccaagtgctcctgcatcacttcatcatttgggggatcaactttctacgaatctttacactttgaaaagccatgaactaaaagggatgcctgccatttgcctgttcttttccttggcgcatcccttctgtttcctgcggagctccctcctgaacccctatctacccggccattcatctgcgggctcacaaatggcaccgatgatctcagatctcctatcaaatataggttggtagagggcgacaagttttctcaaaaccacagatgtcgttagagaattgggcttcgactcattgggacacattctgccttaagtttcaggagggccccgactcctgcttcaccacccgaggccccgaccccccttcaccacccgcttcaccagctatgcccgcaccgcggccctgcctagaaccctgggacacacgggtccccgcctccccgctgctgccgctagcccgttccttaccctctggggccgtggcctcctgtgcggtcggttcttctgtggctggttcctctgcgtctggttcctctgtggcctcctctgagagcttctcctctgcggcctcctccgcgggctccctggccatctcggccaggtcagctggcactgcaggctctgggaccgatgcggcctcctggatcaggcccaggccctcgcccgcccgggctgcggcccctgcacccagcctctggggcagcagcagcggggggaggttgccccagaggttgcgcgcagcagcgtgtggccccaccatcaggcggctgagttgacggttctctatgaggatgtggtcgttgtgagagaggcggtggagaagggagtggaccatgtccaggagcacgaagtgaatgcccgacgccgggtagcgacgggcgaccaccgccaagtcgaagttggccgcctcgttcccctcttcctcctcctcttcctccgtcgcgggcccgatatctgagtcctcctcggcgctcccgccccgggggactgcggccaggcctgccgcctgctcaccctcctcctccccgaggccttccacgggccctgcgactccgaccacctcggccgcaggcaccacgtcgctgctgtcggggccggagtcgccgccctcctggttaccagctccggccgcctcggcctgtgctccctcctggcttaccggggcctcctggtccccttgggtcgggtgtcggtcccctgtggcagacatgacaccagcagcgcctcaactggggtggcgagcgggctgaggcgaccacggtgaagacggtgaccactgaggtggctacggccgaggggaggcgaggagctggccgctgagggaataagagtctctctctttattgagggaataagagtctgtctcagacgacaccctaagatgggaagggcagggagcgaatcctagaaacctcccaccaaggctggcctgagaggacttagacaagttgggaaagattctggttggcaggcgaaagggggcgggaccggaagggtcaacgaggggctctcagtgagccctaagctcatttgctgaaaacttcagattgacatgttctatgtccaatgaatgatcaaggcccttaagctctagaactgagaatccagaatccagagctttttcttttcttttcatagtgttgctctgttgcccaggctggagtgcagtggcaagatctcggctcactgcaatccccgcctcctgggttccagtgattctcctgcctcagcctcctgagtagctgggactacaggtacatgccaccacgcctggctaggttttgtatttttagtagagacagggtttcaccatgttggccaggatggtctcgatctcctgaccttgtgatccacctgcctcagcctcccaaagtgcttggattacaggcatgagccaccgtgccaggccgagctctaccttttctatgaggccttagtgtccaaggctacccctttaggtccacacaagtcctgcccttttaattttatgattattagcaacactatagtagtcccatgtggaggcaccctggagcatgggaactgcaaggcggtcacagagttcacttatttccacctagtaatggctcatgccagtagagatagtgtcataaaaatgttatatagttcatagctaagcagtagtgaaaacctcccaagagacataagaatttcactgagttaacgtagttaaagctacttagaaaagaatgtgcagagttgaaatggatgcagtcatcactgagtgttgaggtggtaaatgacagacactggaaggtgtttaatgaatcctgccaaattcacttcaaacctccaaataatggggaaaaaaagagatactttttttaaaaggaccaggtcatctcataagagctaagcatcaaaaacaccaaaagtgcctgggggtggtggctcacgcctgtaatccagcactttgggaggccgcactttgggaggccgaggcaggcagatcacctgaggtcagtagttcgagaccagcatgaccaatatggtaaaaccctgtctgtactaaaaatacaaaaaattagctggacatggtggtgcgcgcctgtagtcccagctactcggaagggtgaggcaggaaatttgctggagcctgggaggtggaggttgcagtgagccaagatggccccactgcactccagcctgggtgacagagcgagactcagtttcaaaaaaaaaaaaaaaaaattagtaatatatgcaatattattttcacacttgcatcacatattaaatcagactagccgtattacaagtgctcagtagtcacaacacacagctctaaagatgagccccatctctctcttttcaaaaattgttttaaacttgtcattttacttgatttttggctgcagtgaaagaatttcaaagagtcttaccaaatggcggaaagtaatatctttcaatgaaggtatggtgggccaaaacaaagacgtaaaggagagatttgagttaagattacttattgaaaaatcttcccacgtttcagtttattcatttaaaacaaacttttattttttaacttgaacactgtcacatacatccatgaaagttagatgtcactggatatcacttttgatgtaacgaactttggaatgatatgtgttacaattcccacaggcatctggagaaaaagataaaaacaatgaacaacagagtcttctttcttttcctcccgactgtgggatgaaatgagagatgataaacaatagtacaacattaaccagcaccagtgactttctaaatagaagaaaatggccagctctgtgtatatctgcaacatttgtgtgctatatcttaaacaagtagagaagcccatcttttccttttgtaactcacgagcttggatatcagggtgcttgtggaactgaaggtttcagtcaaatgatcacaccaaccttgtctgcctagcactagaaaagcttgttgcttttgtttttac

SEQ ID NO: 1563396 - DNA, 4001 bp, Homo sapiens; identical to SEQ ID NO: 1563316

SEQ ID NO: 1563397 - DNA, 4001 bp, Homo sapiens; identical to SEQ ID NO: 1563317

SEQ ID NO: 1563398 - DNA, 4001 bp, Homo sapiens; identical to SEQ ID NO: 1563317

SEQ ID NO: 1563399 - DNA, 4001 bp, Homo sapiens; identical to SEQ ID NO: 1563316

SEQ ID NO: 1563400 - DNA, 4001 bp, Homo sapiens; identical to SEQ ID NO: 1563320

SEQ ID NO: 1563401 - DNA, 4001 bp, Homo sapiens
tttggagttcttcaccttgttttccgcatccttctctttttcttgttctttctcttcctcgcctgcagcatcttgggcctcttcatcccacttttcgggctgagatttagtgacttctttagggaagaataatacacacatggggaccagacattcacagaaaatatagcccaatttataactagcagcggcattcagctactccaccctcaggagaagcaggatagagttaagtaagaaaggaatagctgggcaccttcctactggttttcacaacagttccatggccctcacgttgctgctgcttgatcatttccacagggacactgtatttcccttttttccagtaaatctcccacccaaagcggctgattatttctagttctttggagaagaagagatctgaatcatcgggtccgatctcattctacggtgttttggtcagaactttgttgggaaaatatttgtttacctcaaaagacaaattctatggtgaagctcattggttcctcacccccccgaatgcttcatttttaccaagtgctcctgcatcacttcatcatttgggggatcaactttctacgaatctttacactttgaaaagccatgaactaaaagggatgcctgccatttgcctgttcttttccttggcgcatcccttctgtttcctgcggagctccctcctgaacccctatctacccggccattcatctgcgggctcacaaatggcaccgatgatctcagatctcctatcaaatataggttggtagagggcgacaagttttctcaaaaccacagatgtcgttagagaattgggcttcgactcattgggacacattctgccttaagtttcaggagggccccgactcctgcttcaccacccgaggccccgaccccccttcaccacccgcttcaccagctatgcccgcaccgcggccctgcctagaaccctgggacacacgggtccccgcctccccgctgctgccgctagcccgttccttaccctctggggccgtggcctcctgtgcggtcggttcttctgtggccggttcctctgcgtctggttcctctgtggcctcctctgagagcttctcctctgcggcctcctccgcgggctccctggccatctcggccaggtcagctggcactgcaggctctgggaccgatgcggcctcctggatcaggcccaggccctcgcccgcccgggctgcggcccctgcacccagcctctggggcagcagcagcggggggaggttgccccagaggttgcgcgcagcagcgtgtggccccaccatcaggcggctgagttgacggttctctatgaggatgtggtcgttgtgagagaggcggtggagaagggagtggaccatgtccaggagcacgaagtgaatgcccgacgccgggtagcgacgggcgaccaccgccaagtcgaagttggccgcctcgttcccctcttcctcctcctcttcctccgtcgcgggcccgatatctgagtcctcctcggcgctcccgccccgggggactgcggccaggcctgccgcctgctcaccctcctcctccccgaggccttccacgggccctgcgactccgaccacctcggccgcaggcaccacgtcgctgctgtcggggccggagtcgccgccctcctggttaccagctccggccgcctcggcctgtgctccctcctggcttaccggggcctcctggtccccttgggtcgggtgtcggtcccctgtggcagacatgacaccagcagcgcctcaactggggtggcgagcgggctgaggcgaccacggtgaagacggtgaccactgaggtggctacggccgaggggaggcgaggagctggccgctgagggaataagagtctttctctttattgaggaaataagagtctgtctcagaggacaccctaaggtgggaagggcagggagcgaatcctaggaacctcccaccaagtctggcctgagaggacttagataaggcgggaaagattctggttggcaggagacagggggcgggaccggaagggtcaacgaggggctctcagtgagccctaagctcatttgctgaaaacttcagattgacatgctctttgtccaatgaatgatcaaggcccttaagctctaggacaactcagaatccagaatccagagcttttccttttcttttttttatttttattttttcagacggagccttgctctattgcccaggctggagtacagtggcatgatctcagctgactgcaatccccgcctcctgggttccagtgattctcctgcctcagcctcctgagtagctgggactataggtgcatgccaccacgcccggctagtttttgtatttttagtagagacagggtttcaccatgttggccaggatggtctcgatctcctgatcttgtgatccacctacctcggcctcccaaagtgctgggattacaggcgtgagccagtgtgcccggccgagctccaccttttctttgaggccttagtgtccagggctaccctttaggtccacacaagtcctgcccttttaattttatgattattagcaacactatagtagtcccatgtggaggcaccctggagcatgggaactgcaaggcggtcacagagttcacttatttccacctagtaatggctcatgccagtagagatagtgtcataaaaatgttatatagttcatagctaagcagtagtgaaaacctcccaagagacataagaatttcactgagttaacgtagttaaagctacttagaaaagaatgtgcagagttgaaatggatgcagtcatcactgagtgttgaggtggtaaatgacagacactggaaggtgtttaatgaatcctgccaaattcacttcaaacctccaaataatggggaaaaaaagagatactttttttaaaaggaccaggtcatctcataagagctaagcatcaaaaacaccaaaagtgcctgggggtggtggctcacgcctgtaatccagcactttgggaggccgcactttgggaggccgaggcaggcagatcacctgaggtcagtagttcgagaccagcatgaccaatatggtaaaaccctgtctgtactaaaaatacaaaaaattagctggacatggtggtgcgcgcctgtagtcccagctactcggaagggtgaggcaggaaatttgctggagcctgggaggtggaggttgcagtgagccaagatggccccactgcactccagcctgggtgacagagcgagactcagtttcaaaaaaaaaaaaaaaaattagtaatatatgcaatattattttcacacttgcatcacatattaaatcagactagccgtattacaagtgctcagtagtcacaacacacagctctaaagatgagccccatctctctcttttcaaaaattgttttaaacttgtcattttacttgatttttggctgcagtgaaagaatttcaaagagtcttaccaaatggcggaaagtaatatctttcaatgaaggtatggtgggccaaaacaaagacgtaaaggagagatttgagttaagattacttattgaaaaatcttcccacgtttcagtttattcatttaaaacaaacttttattttttaacttgaacactgtcacatacatccatgaaagttagatgtcactggatatcacttttgatgtaacgaactttggaatgatatgtgttacaattcccacaggcatctggagaaaaagataaaaacaatgaacaacagagtcttctttcttttcctcccgactgtgggatgaaatgagagatgataaacaatagtacaacattaaccagcaccagtgactttctaaatagaagaaaatggccagctctgtgtatatctgcaacatttgtgtgctatatcttaaacaagtagagaagcccatcttttccttttgtaactcacgagcttggatatcagggtgcttgtggaactgaaggtttcagtcaaatgatcacaccaaccttgtctgcctagcactagaaa

SEQ ID NO: 1563402 - DNA, 4001 bp, Homo sapiens; identical to SEQ ID NO: 1563311

SEQ ID NO: 1563403 - DNA, 4001 bp, Homo sapiens; identical to SEQ ID NO: 1563312

SEQ ID NO: 1563404 - DNA, 4001 bp, Homo sapiens; identical to SEQ ID NO: 1563313

SEQ ID NO: 1563405 - DNA, 4001 bp, Homo sapiens; identical to SEQ ID NO: 1563314

SEQ ID NO: 1563406 - DNA, 4001 bp, Homo sapiens; identical to SEQ ID NO: 1563315

SEQ ID NO: 1563407 - DNA, 4001 bp, Homo sapiens; identical to SEQ ID NO: 1563316

SEQ ID NO: 1563408 - DNA, 4001 bp, Homo sapiens; identical to SEQ ID NO: 1563317

SEQ ID NO: 1563409 - DNA, 4001 bp, Homo sapiens; identical to SEQ ID NO: 1563317

SEQ ID NO: 1563410 - DNA, 4001 bp, Homo sapiens; identical to SEQ ID NO: 1563316

SEQ ID NO: 1563411 - DNA, 4001 bp, Homo sapiens; identical to SEQ ID NO: 1563320

SEQ ID NO: 1563412 - DNA, 4001 bp, Homo sapiens; identical to SEQ ID NO: 1563311

SEQ ID NO: 1563413 - DNA, 4001 bp, Homo sapiens; identical to SEQ ID NO: 1563312

SEQ ID NO: 1563414 - DNA, 4001 bp, Homo sapiens; identical to SEQ ID NO: 1563313

SEQ ID NO: 1563415 - DNA, 4001 bp, Homo sapiens; identical to SEQ ID NO: 1563314

SEQ ID NO: 1563416 - DNA, 4001 bp, Homo sapiens; identical to SEQ ID NO: 1563315

SEQ ID NO: 1563417 - DNA, 4001 bp, Homo sapiens; identical to SEQ ID NO: 1563316

SEQ ID NO: 1563418 - DNA, 4001 bp, Homo sapiens; identical to SEQ ID NO: 1563317

SEQ ID NO: 1563419 - DNA, 4001 bp, Homo sapiens; identical to SEQ ID NO: 1563317

SEQ ID NO: 1563420 - DNA, 4001 bp, Homo sapiens; identical to SEQ ID NO: 1563316

SEQ ID NO: 1563421 - DNA, 4001 bp, Homo sapiens; identical to SEQ ID NO: 1563320

SEQ ID NO: 1563422 - DNA, 4001 bp, Homo sapiens
ttccacatccttctctttttcttgttctttctcttcctcgcctgcagcatcttgggcctcttcatcccacttttcgggctgagatttagtgacttctttagggaagaataatacacacatggggaccagacattcacagaaaatatagcccaatttataactagcagcggcattcagttactccaccctcaggagaagcaggatagagttaagtaagaaaggaatagctgggcaccttcctactggttttcacaacagttccatggccctcacgttgctgctgcttgatcatttccacagggacactgtatttcccttttttccagtaaatctcccacccaaagcggctgattatttctagttctttggagaagaagagatctgaatcatcgggtctgatctcattctatggtgttttggtcagaactttgttgggaaaatatttgtttacctcaaaagacaaattctatggtgaagctcattggttcctcaccccctgaatgtttcatttttaccaagtgctcctgtatcacttcatcatttgggggatcaactttctacgaatctttacactttgaaaagccatgaaccaaaaagcacgcctgcctcccatttgcctgttcttttccttctgtttcctgcggagctccctcctgaacccctatctacctggccattcatctgcaggctcgcaaatggcatcgatgatctcagatctcctatcaaatataggttggtagagggcggcaagttttctcaaaaccatagatgtcattagagaattgggcttcgactcactgggacacattcagccttaagtttcaggagggccccaacacctgcttcaccacccgaggccccgaccccccttcaccacccgcttcaccagctgtgcccgcaccgcagccctgcccagagcccttggacacatggatccccgcttccccgctgctgccgctagcccccttaccctcgggggccacggcctcctctgaggtcggttcctctgcggccggttcctctgtggcctcctctgtgagcttctcctctgcggcctcctctgggggtttctcatctgcggcctcctccgcgggctccctggccatctcggccaggtcagctggcactgcaggctctgggaccgacgcggcctcctggaccgacgcagcctcctggatcaggccgaggccctcgccttctggggctgcagcccctgcacccagcctctgggacagcagcagcaggggagggttgtcccagaggttgggcacagcagcgtggggccccaccatcaggcggctgaggtgacggttcgctatctggatgtggtcgttgtgatagaggcggcggagaagggagtggaccaggtacaggaacacgaagccaatgcccgccgccgggtaccgacgggtggccaccgccaagtcgaagttggccgcctcgttcccctcttcctcctcctcctcttcctccgtcgcgggcccgatatctgagtcctcctcggcgctcccgccctgggggactgcggccaggcctgccgcctgctcaccctcctcctccccgaggccttccacgggccctgcgactccgaccacctcggccgcaggcaccatgtcgctgctgtcggggccggagtcgccgccctcctggttaccagctccggccgcctcggcctgtgctccctcctggcttaccggggcctcctggtccccttgggtcgggtgtcggtcccctgtggcagacatgacaccagcagcgcctcaactggggtggcgagcgggctgaggcgaccacggtgaagacggtgaccactgaggtggctacggccgaggggaggcgaggagctggccgctgagggaataagagtctttctctttattgaggaaataagagtctgtctcagaggacaccctaaggtgggaagggcagggagcgaatcctaggaacctcccaccaagtctggcctgagaggacttagataaggcgggaaagattctggttggcaggagacagggggcgggaccggaagggtcaacgaggggctctcagtgagccctaagctcatttgctgaaaacttcagattgacatgctctttgtccaatgaatgatcaaggcccttaagctctaggacaactcagaatccagaatccagagcttttccttttcttttttttatttttattttttcagacggagccttgctctattgcccaggctggagtacagtggcatgatctcagctgactgcaatccccgcctcctgggttccagtgattctcctgcctcagcctcctgagtagctgggactataggtgcatgccaccacgcccggctagtttttgtatttttagtagagacagggtttcaccatgttggccaggatggtctcgatctcctgatcttgtgatccacctacctcggcctcccaaagtgctgggattacaggcgtgagccagtgtgcccggccgagctccaccttttctttgaggccttagtgtccagggctaccctttaggtccacacaagtcctgcccttttaattttatgattattagcaacactatagtagtcccatgtggaggcaccctggagcatgggaactgcaaggcggtcacagagttcacttatttccacctagtaatggctcatgccagtagagatagtgtcataaaaatgttatatagttcatagctaagcagtagtgaaaacctcccaagagacataagaatttcactgagttaacgtagttaaagctacttagaaaagaatgtgcagagttgaaatggatgcagtcatcactgagtgttgaggtggtaaatgacagacactggaaggtgtttaatgaatcctgccaaattcacttcaaacctccaaataatggggaaaaaaagagatactttttttaaaaggaccaggtcatctcataagagctaagcatcaaaaacaccaaaagtgcctgggggtggtggctcacgcctgtaatccagcactttgggaggccgcactttgggaggccgaggcaggcagatcacctgaggtcagtagttcgagaccagcatgaccaatatggtaaaaccctgtctgtactaaaaatacaaaaaattagctggacatggtggtgcgcgcctgtagtcccagctactcggaagggtgaggcaggaaatttgctggagcctgggaggtggaggttgcagtgagccaagatggccccactgcactccagcctgggtgacagagcgagactcagtttcaaaaaaaaaaaaaaaaattagtaatatatgcaatattattttcacacttgcatcacatattaaatcagactagccgtattacaagtgctcagtagtcacaacacacagctctaaagatgagccccatctctctcttttcaaaaattgttttaaacttgtcattttacttgatttttggctgcagtgaaagaatttcaaagagtcttaccaaatggcggaaagtaatatctttcaatgaaggtatggtgggccaaaacaaagacgtaaaggagagatttgagttaagattacttattgaaaaatcttcccacgtttcagtttattcatttaaaacaaacttttattttttaacttgaacactgtcacatacatccatgaaagttagatgtcactggatatcacttttgatgtaacgaactttggaatgatatgtgttacaattcccacaggcatctggagaaaaagataaaaacaatgaacaacagagtcttctttcttttcctcccgactgtgggatgaaatgagagatgataaacaatagtacaacattaaccagcaccagtgactttctaaatagaagaaaatggccagctctgtgtatatctgcaacatttgtgtgctatatcttaaacaagtagagaagcccatcttttccttttgtaactcacgagcttggatatcagggtgcttgtggaactgaaggtttcagtcaaatgatcacaccaaccttgtctgcctagcactagaaa

SEQ ID NO: 1563423 - DNA, 4001 bp, Homo sapiens
ctactacaagtaagtcttacactcaccatctgcataaccctgggcagagaagttttataacgtctctgaccttgttttcatctgtcaatccacaacaatcacaatttcgcctaatagggttgttgtaggtttttaaaatatttttaaaaatttattaaaatttaaaaattttaatttttaattattttttaattttttgagcagagtctggctctgtcgccggggctggagtgcagtggcgcaatctgggctagcggcaacctctgcctcctgggttcaggtggttctcatgtctcagcctccccagtagctgggactacaggtgtgtaccgtcacacccagctaatttttgaattgttaatagagacggggttttgccatgttgcccaggctggtctccagctcctggcctcaagtgatccacctacctggaactcccaaagagctgggattacaggtgtgagccaccgcgcccagcttacgaatattaactgacacatgcacatcaactgtcgagagctctgagtgccttgcacaagagtgtgtaaatgttacctgttagcatttctacatatgagtctttaagcttctgctcctattatattccttcatcattatcaccaacatgatgagtagcaccttctatagatacttaaccatctcagcagacaaagtactaaaagatatctggagattgaaggctagcccaaaacggcatctgaatggttttctttatttctccttcttcttcttcttcttttttttttattctgcacaagcctagctgatcagcaatacttagggatcaaacctcagcagtcgccggcaggggttctctgccttcctttgggatcagataagtatgaggcatcaacttggcttcaaattacattcccgtttgggatacaagcctaaattaactcgcaaattagggagtttctcgcctactggaaatataaataggcatgtgctgtgcgaccacgtgggggaaaagcacaggcggtacagaccccaaggtcttctctgtcaacaccttcccgctttagatggacaggagagtttgggggttggttctcagggaattgttgaggactcgggttgcctcgggttgcctccccatgcacgcacaagatggagccaccgtcacgtgcagtacccacccgagttacaacagcctcattccgggggtgaggagaacccctattgggaggcttctggggtgggggacaaggggacacacagaggaataccttgtgggaggccctgctgctgtgggccctgtcgctctgcagggtcggccgtcctcccgtagaaggccaaagcaagtctcagaagcctgagcatcgtcccagttgtcaccaccggcctgggcaccgcttgtggcagatgaagcacgaggcctcctcagtaagggaagccctcaggtcacggcgtctcctcagggactcacttcctgcttctcctcagacactgtggcatgggacccacccgttagtgagcccccctcaggagagtcagggacaccgcagcctccaaaggagctcccagcttctccgctgacttctccctctgagcatgcgctcgtcagggcccgcctctaccactgtccaaccaatgggcgtgcagtgggtgggcgggcaggttcttgtggctactaaaaggcgatgggtgggaacatcgtggcttctcccatcaaggctgagggagccattaggatggcctggggaaaatggcttgggagcttgggttctgcatttactaaggagatacagggctcttctcttgggttccctgggaggatgggtgcctgaaacaccggctgtgcaaccaaaaatcctgctcctgcccttgtattcgtggtgcttagcataaggagtcaccactcagtgggcggtcaatagttactcctcaccagggatcaattttgtggagagagggcatcatgtgggtaggcaatgttttagtgatggcaagtacgtgtcttgtgtactaggactgccatttttagtccagtgataatttataatagaatccttttatgatcattgctaccatgtactcatcgcttacctggttatgcttacattactctgatatacacattacccttattcattcattcagcaaaacttgtagggcactaactgtgaaccagacactgttctgtgttcctaaaatttgttaatgaatgaaagagtcaagaatcttcaccctgtgagggtagatttttcacaggatgacgaaagggtgacactaaacatcacataataaaatatatggtatgttagaaggcaataaatgccatggaaaaatatagcaggacaagggagatccacagtgctgggcatggggtattggattgcactttacaatagcatggtcagagtagccctcattggaaagcaatagttgagaaagatgttggagttagccaggcagctatttttggaggagccgttcagacggagggcacagtttgtgcaaagaccatacagcaagactgtgcgtgatgtattcaaagaaaagcagtgattagagcagaggcagtgaatagctagaagagtgggaagtatggtaagagagataatagaggttcaggctgcatgtgggatagtggggcactggaagtcctttggcttttattgtccatgacacgtaaagtccctgaaggatttggagcctccagggatcactccaggtgcttggttgtgaacaggctggaagaggtcagagcaggaagcaaggagaacagtttggatgattctgatgcaatccatgggcactgtggatgaaacctgtttgtctttcctctcctactgtgagaacaggtaagagcattgctgaagattatcatctggttaacaggatcggttgagggctatctatgtctcaaaatgtaacacaactgtgttaatttcctagggaggccacaacacattactacgactgcgtggctttaaacaacagaaatttattcttctgcagttctgcaggctatgagtctgaaatcaaggtttccgtgaggttggttctttctggcaagctctgagggagagtttattccaagattccgtaggttgccagtagtcatcggttggcttccttcggttgtagatgcatcactccaatctcttcctccttcatatcatggtgctcttctccatctgtctgtgtgtccaatacacctcttcttataaggacaccactcactggattaagggtatatgactaatcccaatcctgtaggacctcatcttaacttgatttttttttttttttttttgcaaagaccctattcaaaataaagtcacattcacaggtactggagctcagaacctgagcatatctctttcagggcaaaattcaacccacagcaactgctcttgtaaattttgattactccaatattctatgattatcaatgaaaaattaggacacacaggtaagcacacatttcctcttatttctctgagaaaacacaggccatgaaacaggagcccctctgtgaaactcctggcacccatcctggctttctcttccttctcttttgtaacaatggaaggacatcgcagcccctggccagggctgaaactccactgagcacatggaaccattctcttgacacattttctctgaggatgttgcttctattgctgttgcctctcttcatcctgcatcaacaatcttttttttttttaatctttgcctgcaaaggaataacatacaaacatacacaagaatcacccatcttaaaaacttcacaaataactcccatcttaaaaatgtacatagataaataagcttccttggcctcatttccccttcagtcccattcttctgcatcctgtcccccacagcaaatgctatttcaagaatcacctctgctcacttcctgagctcccattctctccttattcctctggcattaggcttttacccacatcatgcccctaatttgctcttaagatgacaggaaacctccaggtctccaaatccagtgg

SEQ ID NO: 1563424 - DNA, 4001 bp, Homo sapiens
tctaccactacattttggtgctatttaaggtgtgcaattttctataggtgacttttgcaattcagggaagatttgggcatattaaatgaaagaatatctaattgggggaggtgtgaagggaaagaaattcttttcaaaagctgaccacaaagagtagttaaaagtttttgtcactatcttcacaagtgtgtaaagcacagatttcaacagagtgcttggcatattgtagggtgctcaatggtggtttttattattattactcagattccacagtggcaagaaacatcattctacataatggaaaacatttacatcaaatcccacttactttaatgcgaacttggagataatttatggtattgtattgtaaaccattaatgaaaactttttcacagttgagtgaaattaaaatcactatatctcaactagtcgtctactgtcacttttttattgttaacaaacttttgaactgtttttctttctctattgtgcttccattccttcctcagtaagtatattttagccatatgtaatcaattacttaaagtataaataagaaacttggtaagtatctggattttttgtatgtgacttggaatcccctccctcttaaaaaaataattcatttagtataaacacacaatcaaatgaatctactcaaagtgtctttaatgatttccaccactggcattacatcctgtacgcttttaggtggatttccggtgaggtgatgcacctctgaaacccttgctaagtagagtatgttccagttcaaccagcttgttttccaccatactgaggtttaccaatattcgcttctgcctggctattgagtgtgggaaattatttaaaatatcccgagagaggtcgtagactgcaagattgttgtctgtattgctgttaattaacccagaagaagagggtctcactagtgcaagagcagttgaatttgatgacatttcgccagtgtttctctgtaaagaaagggaattatacatacgtagtttatcgaattaagcaatttccaaactaccgaaaaacaacttgtttaatcttggtcaccaaaataaactgatttcccctaatatgtcgagattaaaaatgtattgaattactacattaattcaaaaatatattcttccaaaaccagactgagaaaaaaaatatatgaaagtagccgttagtgacaaagttccatatcctttccttacatttcctgtaaggaaagcagcccagtaggtaaacatatgaacccttgtctttgactcttatctaaaagcacctcacttgtgactttaacaccagaaaatccacattcacactcgaattatttgtgaatgcccagaaagcaccataaaataaagatggtgagattagcaaacagacacgtgggagaggagaagcaagagaagaaagagagaaggtaagattcttaaagtggagagatggtggtggggaatgggcactgacaactgcactttgatctccaatgagtggaaagctgaccatattacttagggacttggggctttttagaagagaccagaactgtcgaatcactggtcagaatacaggaattgcgggagtaagcggtaaaagtctggggctcctttgagcgaaaaggagagatgaggtgatctccccttacctctcattttactgtattttactctcttacatatacactcccaagtccatatactcatctagcttcatctaattcaaatctcccttacattcaccattacctgaaagcggcgatatttccagaagacaatcaaggcacacagaatgctgctcgctaggagtaaatagaagttcatgtttcctcttcggcctcttctcccttctcgggacggaccccctcagctggtagttgggaagcagtgggcctctagccgcctggatttgggaaactttgggccaggatgcctggtgtaactgggaagttctgtgttgtcccgctttatgtacggctgagggcgcgagacctcacaattgggcacgcaagcggcggtgccacgccacaatgagatgatgtaaaaaccggccctgccggaaaccaggcggcacttagtaccgcctacctggttagtttcaagtccttagagaggagagtgaaagacagtgaggaagtttgggatttctgggaagccgaaaggtagtagaaggacaggctgtaaatggattggttaaatagaatatttaaagtgctcctaccttttaaaaaatatgtctttgctacaaccactgctttattcacttcaaaaacaagacaaaaatgtaatgtaaaaagtagttacccccaaattatctttgccagaaactacctcctccacagtcaccttgctattttagcttttactccaaccctagttacattggaataattatgtacatttgtatcattttacagtttaagaaataattctggggacattttcacatataaacctcacaacaaatttgtactaaaggtatttttttttaatttcaagtttataccatgacatttatttttattttatttttcatcaacttttaagttccgggatacatgtgcaggatctgcaggtctgttacatatgtaaatgtgtgccatggtggcctgctgcacagatcaaccaatcaccgaggtattaattaagcccagcacctattaccccaacacccattagctgttcttcctgatgctcttcctccccaccgatcccgccgccccccacaggccacagtgcgttttgttaccccttactatgtgtcatgtgttctcatcgttcagctctcactagctcctacttataagtgaaaacatgtggtgtttggttctccagagccaaggtatttttactatgtctatttttgcaaatgtggaaacagattcaggtgttaaattcatttgaaactaatagcaaaagcaggacttgaatccatggagtttgagctctgagataaactcccccattctcctccttatacacatgatctccacctccactctgatttgtgagcatgaagtattttatattctcctaccaaggtactgaacattgtatttggagttgtattaatgggacgtaacacatacagaaataattgcactagacaggttagaaatgttcaggaaattcagttaaatgtagactatgacactgacctaaagacctggaactaaaaataatacccacggtaatcttaaggtgagtgcccaaatgcaatccagtaactctgctaggtaaacaaccctcatcttcatatagatgggaaggggagaaattacatttttaatttttttcatatcacaccatttcctagttatgagtacaaagcttaaagttttattgattcaatgaatatttattaaacacttatatactagacactgttctgtattttaagaatctgattataagcaaaaataaagtctttctccacctggaatgtgcactctagtttaagaggcagacattaatcaaatacagaaatgtatgtgaaagtgctgagataaatggtaccaaaaagtacctggtggtgtgggagctcataatagaatataggatctaaagaggagtgaagttcctggctttatggcttactcaattggatgaataggagataaaaaagtatggagttgctggtcatgaatttagtcttggacaaatgcagtttgaggtggctttgagacatgaaataaatgctcccagggagataagccaagacataaatttgtgagtcatctacatataaatcataattgaaattttagatataaaagaaatttcttcatgtcagtctaggaagtacaaatgaagacaaatttgaatagagcattgaaagattttaatatttaataactgggcaataacacttctattagtatgtgattgtgggcttcctggcatctaaattttctgtttcattgaataacattgagtgaagcccattaaccttatctctaacaataggatattgaattttgatcctactggtatttaagtgga

SEQ ID NO: 1563425 - DNA, 4001 bp, Homo sapiens
ttcaaagaatttttcccaagtaaaaaagctcatatgttcaatgaaaacaatttgggaaaaaatttaatgctgacctggaaaaacattatatatgctactgtcatatatttaacatataaatgcaagtatattgaggaaaatattctaaaatgtccacagtagttaatgctgaatggcgggacccagtggcttttcattttcccccatttcccaaattgcctcccgttaccttgtgctacttcaatctgtgaatcccagagcctcccctgcaacccgaggacaagggcatgcaagtccgaaggtgccttcgctcgccgaaaagagactcagacacggaatcgtagctcagttttattttctacagaaacaaacatgtaagccgtcctcctccagcgacaaacaatcaggcccccacaatgaactggccactcgtgctgggaccattccctaggggaggaggcatgacctaggaaggggcgccaggctgggcttagcgcctctgccctgagggaggctgagccaaaaacacgggcagaaagcactgcgtgatccacatcaacagggaaagctgctggagacaggagctgatggagagctgcagttggcggtggtctgcagcagtcagtcggctaaatgtgaggggcagagaacatcacgttaaaggcgacacctctgcacccatctccctgggctccctcgggtggcggcgggcctggtgtaccaggtctctgttctgagaccctgtgctggggtgttcccaggtttctagcagcctgaccgtggggtgtaggcggatcccagcccccaccctgccacgctgtgaccgccacccacccaggccccatccctgtcctggtcctgaactgacatagtcagtatgttgccggacacagtgaactccttcagaagcacccctggcacgggaagcggtggggcatcctgggccaggctcctgcgggccagctctgcttccatgggtgtcgcgaaaggcatggcgaggtagctggtgggggcccagttaaggcatcctctcctaggacttggcctgtggctccggcctgctgcttaccccaggccagcttccccctcccccactcccccacccctcccccctaccccggattgcccagcccatcccccccaggctgtctccccaggcactggcccagtagcacaccccacccagctgtcttggttccccactttcctttgctgcaccccaagctgactcctccatgcccttacaagacccctccccaccctgccccctgtggcatcacccggccccctcctcatcactcgaccctccatcccaaccacctcccgccacccgctcccatcttgcccccttccccccacctcctgatcccctcctacacctgggtccccctatctcctggcccctgctcccctccccgcatgacccggtgcccctcacccaatcacccagcccctctcccccacccccaccccctctacctcccagcccttacctcctcccctcctcgcagctggcctctcatatccccacctcccaacccccacccccacccccacccaaccacttactcgcatctcccccgcctcctcccccacctggccctgccctccccatctcccggcccccacctcgccaccagaactgtcagaacagaacagaacagaacagaacagaatacaactcaagcaggcggctctccggccccctggccccgcatctgcagcatccattcagccctgaagccgcgccgccatgcggaccccgcggggcgcctcctcccggccccgaggcccttgctgcccctgcgccccggggacctctgccgcccgtggcacccgcctctcctgggccgccagcattgccccctgggccatcaggaatgccagggcctcctgggccatcagcatcgcccgtcgaaccccctgtgccccggccttcggcctgcatggctccggagcctctgcccggctctcagagagaaggtcagggcccacgaggatgcggaggcagagaggctgcaggaagttccgccccctggcgtgagatgggcagcccgggatcctcagggcgcctgcgcacaggggccctacttccggccctgggagaccccgagtgagccccggagcacgtgaccggttctcaccaaccccgcccctccccaagagagcccgggccggaaggtggccgcaatgccagcttggacccctcacccctgagcagccggctgtccgccggacccctgtcccgggagccctgcagggagtcaggcactgcggggcccagcctgtcccatcccccgggtctccctcacatcgaggagcaagacgggcctgggaacacggggccgggactgtgcggccatcgtcccggaccctgcctgccctgtccgtccttgggggagcgcccaggacagaccccggggggcaggcctctaactgggctcagcagcctccgtccctgtcctggtcgcccagctggtggggtagctggaactgcatgtctggtgggcgtggcctcgcgccagccaaggtctcccaggcgccaggtccagccaaggtggacgggagggcccagcgggacccggggccggatctcactcctgggttcaacgggttctgtccctgtcctagtcgccccgcctggtgggggagctggagctgcgtgtggggtgggttgcgggtggcctcccaccagccaggggctcccgggctctaggcctggcccaggtggacaggcgggacctgctggacctgaggctgggtcgggcctggctcctgggttcggcagtatcagtccctgccctggtcgctcttgcctggtagggagctgggaggtgaccctgtgtctgctcagtggtgatctatttgtgtgtctggaagggggtcaaatccacgggacaggtacctctagaggcatgcaggggtgagggcggcacggccccgggagctgaatgtctgtgccaggcacacctgtagcaacaggaggtgaccagacagggcctagccctgaggaagggggaggtactgaaatccaaaccactctcccccaccttccaaatccaggaatcagcagcctctgcacctgggaaaagcatattggcactcatgtggaaactaaaaacgttgatcttttggaggtagagcagaatgatggttaccagacgctgggaaaggtggggagggtggggaggttaatggggacaaacatatagttgcatagaaggattaagttctagtgtttgatagcaccgtagagggactataggtaattatttattgtatatttcaaaatagctaaaagataggaaatgttccccaaaaaaagaaatgataaatgcttgaggtggtggagatcctaaataccccgacttgatcattacatcgtgtgtgcgtgtgcatgtatcagaatatcacatgtatcccataaatatgcagagttatcatacatcagttaaaaatgtttttacttacagaaaagaaaaattcacccaagctcttgcgtgtacctccagtttattattttcactgctgtatttcattacatatatttcattaaatgatgaattttaaaaaccagagaacacaacttgttaacacctggaatagctgaaaatcagacataacccggttagtgattgccatccttcctgtcgtcctctgctcagtctccccattctcagacagaggcaggctaaagttcttaccttcaacaggtcagggaagggagagtaaagtgcatgtgaccctgtcttaggaagcaggaagacagagggagggtctccgggtccccattattttcccggcctattatcctcagatcaagtcaagaaaggaagtcctaactgactgagagattcctggagatactgccactgtcctggaagtctcagccagccactggaccggaaatctccatcaatatttcagccagagcaacgtctgccactagatggcatcaaactccagccgggagcaggacagatttggatggtccagcgggc

SEQ ID NO: 1563426 - DNA, 4001 bp, Homo sapiens
tcaaagaatttttcccaagtaaaaaagctcatatgttcaatgaaaacaatttgggaaaaaatttaatgctgacctggaaaaacattatatatgctactgtcatatatttaacatataaatgcaagtatattgaggaaaatattctaaaatgtccacagtagttaatgctgaatggcgggacccagtggcttttcattttcccccatttcccaaattgcctcccgttaccttgtgctacttcaatctgtgaatcccagagcctcccctgcaacccgaggacaagggcatgcaagtccgaaggtgccttcgctcgccgaaaagagactcagacacggaatcgtagctcagttttattttctacagaaacaaacatgtaagccgtcctcctccagcgacaaacaatcaggcccccacaatgaactggccactcgtgctgggaccattccctaggggaggaggcatgacctaggaaggggcgccaggctgggcttagcgcctctgccctgagggaggctgagccaaaaacacgggcagaaagcactgcgtgatccacatcaacagggaaagctgctggagacaggagctgatggagagctgcagttggcggtggtctgcagcagtcagtcggctaaatgtgaggggcagagaacatcacgttaaaggcgacacctctgcacccatctccctgggctccctcgggtggcggcgggcctggtgtaccaggtctctgttctgagaccctgtgctggggtgttcccaggtttctagcagcctgaccgtggggtgtaggcggatcccagcccccaccctgccacgctgtgaccgccacccacccaggccccatccctgtcctggtcctgaactgacatagtcagtatgttgccggacacagtgaactccttcagaagcacccctggcacgggaagcggtggggcatcctgggccaggctcctgcgggccagctctgcttccatgggtgtcgcgaaaggcatggcgaggtagctggtgggggcccagttaaggcatcctctcctaggacttggcctgtggctccggcctgctgcttaccccaggccagcttccccctcccccactcccccacccctcccccctaccccggattgcccagcccatcccccccaggctgtctccccaggcactggcccagtagcacaccccacccagctgtcttggttccccactttcctttgctgcaccccaagctgactcctccatgcccttacaagacccctccccaccctgccccctgtggcatcacccggccccctcctcatcactcgaccctccatcccaaccacctcccgccacccgctcccatcttgcccccttccccccacctcctgatcccctcctacacctgggtccccctatctcctggcccctgctcccctccccgcatgacccggtgcccctcacccaatcacccagcccctctcccccacccccaccccctctacctcccagcccttacctcctcccctcctcgcagctggcctctcatatccccacctcccaacccccacccccacccccacccaaccacttactcgcatctcccccgcctcctcccccacctggccctgccctccccatctcccggcccccacctcgccaccagaactgtcagaacagaacagaacagaacagaacagaatacaactcaagcaggcggctctccggccccctggccccgcatctgcagcatccattcagccctgaagccgcgccgccatgcggaccccgcggggcgcctcctcccggccccgaggcccttgctgcccctgcgccccggggacctctgccgcccgtggcacccgcctctcctgggccgccagcattgccccctgggccatcaggaatgccagggcctcctgggccatcagcatcgcccgtcgaaccccctgtgccccggccttcggcctgcatggctccggagcctctgcccggctctcagagagaaggtcagggcccacgaggatgcggaggcagagaggctgcaggaagttccgccccctggcgtgagatgggcagcccgggatcctcagggcgcctgcgcacaggggccctacttccggccctgggagaccccgagtgagccccggagcacgtgaccggttctcaccaaccccgcccctccccaagagagcccgggccggaaggtggccgcaatgccagcttggacccctcacccctgagcagccggctgtccgccggacccctgtcccgggagccctgcagggagtcaggcactgcggggcccagcctgtcccatcccccgggtctccctcacatcgaggagcaagacgggcctgggaacacggggccgggactgtgcggccatcgtcccggaccctgcctgccctgtccgtccttgggggagcgcccaggacagaccccggggggcaggcctctaactgggctcagcagcctccgtccctgtcctggtcgcccagctggtggggtagctggaactgcatgtctggtgggcgtggcctcgcgccagccaaggtctcccaggcgccaggtccagccaaggtggacgggagggcccagcgggacccggggccggatctcactcctgggttcaacgggttctgtccctgtcctagtcgccccgcctggtgggggagctggagctgcgtgtggggtgggttgcgggtggcctcccaccagccaggggctcccgggctctaggcctggcccaggtggacaggcgggacctgctggacctgaggctgggtcgggcctggctcctgggttcggcagtatcagtccctgccctggtcgctcttgcctggtagggagctgggaggtgaccctgtgtctgctcagtggtgatctatttgtgtgtctggaagggggtcaaatccacgggacaggtacctctagaggcatgcaggggtgagggcggcacggccccgggagctgaatgtctgtgccaggcacacctgtagcaacaggaggtgaccagacagggcctagccctgaggaagggggaggtactgaaatccaaaccactctcccccaccttccaaatccaggaatcagcagcctctgcacctgggaaaagcatattggcactcatgtggaaactaaaaacgttgatcttttggaggtagagcagaatgatggttaccagacgctgggaaaggtggggagggtggggaggttaatggggacaaacatatagttgcatagaaggattaagttctagtgtttgatagcaccgtagagggactataggtaattatttattgtatatttcaaaatagctaaaagataggaaatgttccccaaaaaaagaaatgataaatgcttgaggtggtggagatcctaaataccccgacttgatcattacatcgtgtgtgcgtgtgcatgtatcagaatatcacatgtatcccataaatatgcagagttatcatacatcagttaaaaatgtttttacttacagaaaagaaaaattcacccaagctcttgcgtgtacctccagtttattattttcactgctgtatttcattacatatatttcattaaatgatgaattttaaaaaccagagaacacaacttgttaacacctggaatagctgaaaatcagacataacccggttagtgattgccatccttcctgtcgtcctctgctcagtctccccattctcagacagaggcaggctaaagttcttaccttcaacaggtcagggaagggagagtaaagtgcatgtgaccctgtcttaggaagcaggaagacagagggagggtctccgggtccccattattttcccggcctattatcctcagatcaagtcaagaaaggaagtcctaactgattgagagattcctggagatactgccactgtcctggaagtctcagccagccactggaccggaaatctccatcaatatttcagccagagcaacgtctgccactagatggcatcaaactccagccgggagcaggacagatttggatggtccagcgggct

SEQ ID NO: 1563427 - DNA, 4001 bp, Homo sapiens; identical to SEQ ID NO: 1563425

SEQ ID NO: 1563428 - DNA, 4001 bp, Homo sapiens; identical to SEQ ID NO: 1563426

SEQ ID NO: 1563429 - DNA, 4001 bp, Homo sapiens
atatcacatgtttaacagtgaaataatgctggttttatgcatctattcaagtacatgtttttgaagcatttttagaaagcacaaaagctcatatgttcaatgaaaacaatttgggaaaaaatttaatgctgacctggaaaaacattatatatgctactgtcatatatttaacatataaatgcaagtatattgaggaaaatattctaaaatgtccacagtagttaatgctgaatggcgggacccagtggcttttcattttcccccatttcccaaattgcctcccgttaccttgtgctacttcaatctgtgaatcccagagcctcccctacaacccgaggacaagggcatgcaagtccgaaggtgccttcgctcgccgaaaagagactcagacacggaatcgtagctcagctttattttctacagaaacaaacatgtaagccgtcctcctccagcgacaaacaatcaggcccccacaatgaactggccactcgtgctgggaccattccctaggggaggaggcatgacctaggaaggggcgccaggctgggcttagcgcctctgccctgagggagcctgagccaaaaacacgggcagaaagcactgcgtgatccacatcaacagggaaagctgctggagacaggagctgatggagagctgcagttggcggtggtctgcagcagtcagtcggctaaatgtgaggggcagagaacatcacattaaaggcgacacctctgcacccatctccctgggctccctcgggtggcggcgggcctggtgtaccaggtctctgttctgagaccttgtgtttgggtgttctgagatctctagctttctgcccctccggggaggcggatcccagcccccaacccaccaccctcatccgcccagcgccttccctgtcctggtcccgaactgacataaacagtaggttgccggacacggtgaagtccttcagaaccgcccctggtcgggggagcggtgcggcatcccgggacaggatcctgcggaccagctccgcttccatgggcgacgagaaaggcatcgtgatgtgcctggtggggacccagttaaggtgccatctcctaggatttggccggtgcccatctcatcccctcaggctgtctccccacgcactggcccaggtcctgcagcaaccccacccagctgtcttgattccccactttcctctgttgcacctcaagctgactcctgcgtgcccttccaaggccctccccaccatgccccctgccgcatcagccgggacctctccccatcgcttgacaccacccccatccagcccacaccccagccaccggctcccaccttgcacgcttccccccaactcctgatcccttcacacacccaagaacccctgtctcctgtccccctgcccctcaccccatcgcccagcacccaactgtgcacacgctccacctcccatcccctacctactcccttcctctgagccacccctcgacctccaactcccagcccccacccccaccccacccggcgccttacccccatctcccaaaccccaccttccgcacctggccctgccctcacccacctcctggccctgccccccacctcttgaccctgttgtctccgtctcacggcccccacctcgccaccagaacctcctagaacagaacagaacaggatacaactcaagcaggcggctgtccggcctcctggccccgcaggggcaccttccatcctgcgcagaagcggcaccgccatgcggaccccgcggggcgcctcctctcggccccgaggcccttgctgcccctgcgccccggggacctctgccgcccgtggcacccgcctctcctgggccgccagcattgccccctgggccatcaggaatgccagggcctcctgggccatcagcatcgcccgtcgaaccccctgtgccccggccttcggcctgcatggctccggagcctctgcccggctctcagagagaaggtcagggcccacgaggatgcggaggcagagaggctgcaggaagttccgccccctggcgtgagatgggcagcccgggatcctcagggcgcctgcgcacaggggccctacttccggccctgggagaccccgagtgagccccggagcacgtgaccggttctcaccaaccccgcccctccccaagagagcccgggccggaaggtggccgcaatgccagcttggacccctcacccctgagcagccggctgtccgccggacccctgtcccgggagccctgcagggagtcaggcactgcggggcccagcctgtcccatcccccgggtctccctcacatcgaggagcaagacgggcctgggaacacggggccgggactgtgcggccatcgtcccggaccctgtctgccctgtccgtccttgggggagcgcccaggacagaccccggggggcaggcctctaactgggctcagcagcctccgtccctgtcctggtcgcccagctggtggggtagctggaactgcatgtctggtgggcgtggcctcgcgccagccaaggtctcccaggcgccaggtccagccaaggtggacgggagggcccagcgggacccggggccggatctcactcctgggttcaacgggttctgtccctgtcctagtcgccccgcctggtgggggagctggagctgcgtgtggggtgggttgcgggtggcctcccaccagccaggggctcccgggctctaggcctggcccaggtggacaggcgggacctgctggacctgaggctgggtcgggcctggctcctgggttcggcagtatcagtccctgccctggtcgctcttgcctggtagggagctgggaggtgaccctgtgtctgctgggtgctggcttacttctgtgtctggaagggggtcagatccacaggaaaggtgctgcgagaggcgggcaggggtgggggtggcatggccctaggagctgggtgtctgtccccacgccctgttcacaagtctgtggggcgagaggctgcaatactccatcccgggtgtctgggctgctcaccaggccggctcaggcttcccacatcctgtaccctgggttgggcatgaaaccgatccaatcgtcccataggctgttctttttgatacacatagaaactgacccttctggtcttcaagcttgaaccttacagttgttttatctgaattccttcctcaggaaatgaccttcgggcctctcaaaatatcaaagaactgaaactcaccagataaccacatccagacaatgagatgctggaccccccaaattcatcaggattgctttctgggccctcccgagttcctgttttcctacacattggtgcatttcttcctggctatataaacccctagttttagtcagggggatggatttgagacttaactcccatctccccggctgcagcacccaattaaagccgtcttccctggtaatgctcttcgtctcagtcagtcattggctttctgtgcggccagcagcaggacgtagaccaaacccttggtatttcggtaacaggcacacccccaggaagggaccccggacacggctaccacctctaggcttaaagcgaatgcacttcccgcatctccagtcttccgtgtagcagctttaacctatgtatgtctgtgccacatccagtcctcagacggctgagtgaccccaagaaaggcttccccgacacccagacagaggctgcagggctggggctgggtgagggtggcgggcctgcggggacattctactgtgctaaaaagccactgcagacatagcaataaaaacatgtcattttccaaagcaggctcctgcttctgcctctgctgctctaagaaggggtcagggtgcaggaggcagggggaacctcctccagctggagctgctgcggtgagcaaggctctgctctggaggcctctgaggctggcacccttctggggactgggaagggggcagggaaggcagcagcccagggaaagcctcgtccccctggagccgaggcagttggggagag

SEQ ID NO: 1563430 - DNA, 4001 bp, Homo sapiens
ctacaacagagaggccaagaagaatgtggacaggctttgctgggtttccccactcagtctatttccattagctcatctgtccctgcttcatggactccaagcataaaatcagatcatttcccttgcatctttaaggggttttcatttctgaaggctcccatgtcacataaacctatgattcaataaattattatgcttctctcttgttaatctgtctcttgtttaaggctgtcagccgtgacccttatgatatcagctctttcctcccctacataagcaattgctcattttctgttttttcaaaaacacaagatacctttttaaagcaccttggatattttagagaccttttgtaaaaatgcaacttaataccaaggggacacctaattcttcctactttgttgttgttgttgttgttttgagttggagtcgcgctctgtcaccaggctggagtgcaatgacacgatctgggctcactgcaacctccgcctcccgggttcaagcaattctcctgcctcagcctcccaagtagctgggactacaggtgcatgccaccattcccagctaatttttgtatctttagtagagacagggtttcaccatgttgtccaggatggtcttgatctcttgacctcgtgatccgcccacctcggcctcccaaagtgctgggattacaggcatgagccaccatgcccggccctctacttcttttaagcacacaagtaagtttaacaaagtttcaaaggttcagggaaaggctggccctgttttagatcacttcctccattgaggattgtttctggtgtcaagacaagtttttcatttactcttacatgcagtgagcagaaccaagtgtttataggatagcacagtgtagagctgtgctgtctccactacctaataaaaaatattacacagccaggtacgtaattttaagtttctagtagccatattaaaaaagtaaaaagaatcaaatgaagttcatgttaatatatgttatttaacccaatgtagccaaaaatgttatcacttttaacgcacaatgtaagaatgtattagtgagatatttgacatcttttttgtgtactaagctttcagaaatcaggtgcctgtactcagagcacatctcagtacggattttgccacatttccagtattcaataaccacatgtgaccagtggctcccacattagaccaggcaggcctagagcaaataaaagcaccggaagcacccagagacaccttctcagtgatggccatttaaaaagtaatgttagacacaaaagagtacttacctgatgatcttgttctatgaagttctagaacagtcaaagctaagctatgataacaatcagaaccggggttgagtgcggggcctggggtggattgacagaaaggaggtaccagggaactttgcagggtgaaggaaatggtcaatgttcactttgggataatggttacaggagtgtataatttgtcaaatcccgtcgatttgcacactgaaaatgggacattttgttgtatataaaccatacatacaattcttttttatgttgcccccaaaaaagctattctgtagcagcagcgtagttcggcactatgcgccctaaccatctagtacggggaaaacgcgggggtcgttgtttaaggggtgcactgggaccggggagaggacagaaaggccatgttaccggcgctgatcaccagcctcgcagacccccgctcggggcttcacttccgccaacgccatctcagggctctcctggctcccgagggccgggagaagtggggatccgggtgcgggcgctggcgcgggcggaggcgggaagaagcgcgtcccggggacgcgcgggacaggctccaaccgcactgggcacgggccagcgttccccagtccccgcgccacacccggcagccgaggtctgcgagcgcggggctggcggccggacccgactcagcgctgggcagggagccggcgccatcagagagcggacaaaggagcccggccccacaagtgcaccggggctgggggtgcagggcggagaggccctggggacgagggatggcccgggcgccgaggccctgggggtctgggacaggcccagaagggaagttacctgcgcggtggtggtagcaccggggagggtggccggtgggcacggcgggctccaccccgcggctggcctggcgctcacctgtcgggctggggaaggggtcgctgccggggctgtccaaagccgcccccgggatcttcccaccgcccacacgggcctcggggtgcgcggcgccctcctcgcccaccttcccctctcctccctgctgctggcccagctcactcacgctggtgagcttggggtttgcacccgggtttgtgcaatggtccaaaacaagcgcctaaaaagtgattcctccagcacaggcagctcccgtcaccctccgctctggacgcactgggccccaggcctcgcccagcccggggaccgctcctccctcccgtggctcactttgcaaaggcacttcgagtgcgcgggtgaactccacgcttcccggggaaccccggcttcctggcaagccgagaccctcgctcgggtcctcccgtgcagatctcacccttgtaaagaacttcactggtcacaaacgcttgtggatcccctactacgccccaggaactgcaggagcgctcaggagagaaggaaaaggaaagagaatgcctgcctttgaggagctagctcacagtctggtgggaggtccacccgtctgttggaaccagtaaggttccctagaacaatacttctgcagcaaagagttgcgggggtgcagtgaggggaggaaggcaattaaggcttccaagagtgactttttttttttttttttttttgagacggagtttcgttcgccctttttgcccaggctggagtgcaatggcgcgatctgggctcactgcaacctccgcctcccgggttcaagcgattgtccctgcctcagcccccggagtagctgggattacaggcggatgccaaaaagctcggctaattttgcatttttaacagaaacggggttacatcacgttggccaggctggtctcgaactcccgacctcagctgatcctcctgccttgcctcccaaaatgctgggattacaggcttgagccactgcaccccgcccaaatactctaaaaagtcactcttcgggtgactcacgcctgtaatcccagcactttgggaggccaaggcaggcggatcacctgaggtcgggagttcgagaccagcctggccaacgtggtgtaaccctgtctctactaaaaatgcaaaattagccaggtgtggtggcacctgcctgtaatcccacctactccgaaggctgaggcagagagaatcgcttgaacctgggaggcagaggttgcagtgagccgagatcaggccactgcactccagcctgggtgacagaggagactttgtctcaaaaaaaaaaaaaaaaaagagtattggaggatgattggtgctgggaacggatacaggaggtttttcgggtgaaggcaagaagccaaccactgaaggaagctaacatggacaacagaagggtctgaagtgagatggaaggttttaggaaagtggtggaaatttcgcataaccagtgtgagatgctagagcgacaagttagacaagagtcactgaagacctagtggagtttagaaaccatcatcgtgtagtggtgtccagctataatctgctataatctggcaaggtatctacagaaatatagctcttagttatgaaacccaagtttcctgcttgcatagaatagaaggacaagagggtgaggaggtggagggcacagaaagactgcgattgcagtgatgggccagagctctagtcctagaggacaggaactgttaataaaaccagcggggagctgatggactgggagacagatgagagaagggctccaaggccagggcctctgaggagaggactggcaaactggcagcagagagtgtggtg

SEQ ID NO: 1563431 - DNA, 4001 bp, Homo sapiens
ccctgttttagatcacttcctccattgaggattgtttctggtgtcaagacaagtttttcatttactcttacatgcagtgagcagaaccaagtgtttataggatagcacagtgtagagctgtgctgtctccactacctaataaaaaatattacacagccaggtacgtaattttaagtttctagtagccatattaaaaaagtaaaaagaatcaaatgaagttcatgttaatatatgttatttaacccaatgtagccaaaaatgttatcacttttaacgcacaatgtaagaatgtattagtgagatatttgacatcttttttgtgtactaagctttcagaaatcaggtgcctgtactcagagcacatctcagtacggattttgccacatttccagtattcaataaccacatgtgaccagtggctcccacattagaccaggcaggcctagagcaaataaaagcaccggaagcacccagagacaccttctcagtgatggccatttaaaaagtaatgttagacacaaaagagtacttacctgatgatcttgttctatgaagttctagaacagtcaaagctaagctatgataacaatcagaaccggggttgagtgcggggcctggggtggattgacagaaaggaggtaccagggaactttgcagggtgaaggaaatggtcaatgttcactttgggataatggttacaggagtgtataatttgtcaaatcccgtcgatttgcacactgaaaatgggacattttgttgtatataaaccatacatacaattcttttttatgttgcccccaaaaaagctattctgtagcagcagcgtagttcggcactatgcgccctaaccatctagtacggggaaaacgcgggggtcgttgtttaaggggtgcactgggaccggggagaggacagaaaggccatgttaccggcgctgatcaccagcctcgcagacccccgctcggggcttcacttccgccaacgccatctcagggctctcctggctcccgagggccgggagaagtggggatccgggtgcgggcgctggcgcgggcggaggcgggaagaagcgcgtcccggggacgcgcgggacaggctccaaccgcactgggcacgggccagcgttccccagtccccgcgccacacccggcagccgaggtctgcgagcgcggggctggcggccggacccgactcagcgctgggcagggagccggcgccatcagagagcggacaaaggagcccggccccacaagtgcaccggggctgggggtgcagggcggagaggccctggggacgagggatggcccgggcgccgaggccctgggggtctgggacaggcccagaagggaagttacctgcgcggtggtggtagcaccggggagggtggccggtgggcacggcgggctccaccccgcggctggcctggcgctcacctgtcgggctggggaaggggtcgctgccggggctgtccaaagccgcccccgggatcttcccaccgcccacacgggcctcggggtgcgcggcgccctcctcgcccaccttcccctctcctccctgctgctggcccagctcactcacgctggtgagcttggggtttgcacccgggtttgtgcaatggtccaaaacaagcgcctaaaaagtgattcctccagcacaggcagctcccgtcaccctccgctctggacgcactgggccccaggcctcgcccagcccggggaccgctcctccctcccgtggctcactttgcaaaggcacttcgagtgcgcgggtgaactccacgcttcccggggaaccccggcttcctggcaagccgagaccctcgctcgggtcctcccgtgcagatctcacccttgtaaagaacttcactggtcacaaacgcttgtggatcccctactacgccccaggaactgcaggagcgctcaggagagaaggaaaaggaaagagaatgcctgcctttgaggagctagctcacagtctggtgggaggtccacccgtctgttggaaccagtaaggttccctagaacaatacttctgcagcaaagagttgcgggggtgcagtgaggggaggaaggcaattaaggcttccaagagtgactttttttttttttttttttttgagacggagtttcgttcgccctttttgcccaggctggagtgcaatggcgcgatctgggctcactgcaacctccgcctcccgggttcaagcgattgtccctgcctcagcccccggagtagctgggattacaggcggatgccaaaaagctcggctaattttgcatttttaacagaaacggggttacatcacgttggccaggctggtctcgaactcccgacctcagctgatcctcctgccttgcctcccaaaatgctgggattacaggcttgagccactgcaccccgcccaaatactctaaaaagtcactcttcgggtgactcacgcctgtaatcccagcactttgggaggccaaggcaggcggatcacctgaggtcgggagttcgagaccagcctggccaacgtggtgtaaccctgtctctactaaaaatgcaaaattagccaggtgtggtggcacctgcctgtaatcccacctactccgaaggctgaggcagagagaatcgcttgaacctgggaggcagaggttgcagtgagccgagatcaggccactgcactccagcctgggtgacagaggagactttgtctcaaaaaaaaaaaaaaaaaagagtattggaggatgattggtgctgggaacggatacaggaggtttttcgggtgaaggcaagaagccaaccactgaaggaagctaacatggacaacagaagggtctgaagtgagatggaaggttttaggaaagtggtggaaatttcgcataaccagtgtgagatgctagagcgacaagttagacaagagtcactgaagacctagtggagtttagaaaccatcatcgtgtagtggtgtccagctataatctgctataatctggcaaggtatctacagaaatatagctcttagttatgaaacccaagtttcctgcttgcatagaatagaaggacaagagggtgaggaggtggagggcacagaaagactgcgattgcagtgatgggccagagctctagtcctagaggacaggaactgttaataaaaccagcggggagctgatggactgggagacagatgagagaagggctccaaggccagggcctctgaggagaggactggcaaactggcagcagagagtgtggtgctggagttcaggccttcaaatggatattccaggaaatgagacagtttggggtgtggcagctacaatggaatagaaaagtgagatgggcatcactggccttgggtttagtgcccacaaggctggtatgttggacatcgagggtcccaaaaggatggcaggaggtggaggagtcaatcgaggtcaaggaactttagagaattggggttgcggggtgggtagtgagcctgaaactaatagatgactgtgacaaggaaagggagaaggttgcagaacaaatgtcagtgcctttcaagacacaatggaggcctggcgccatggcacacccctgtaatcccagcactttgagaggctgaggcaggcagatagtttgagtccaggagttggtgacttacctggacaacatggcaaaatcctgtctctacaaaaaatacaaaaattatcacgtgtgctggcatgcatcccaggggaggctgaagcaggaaggtcgcctgagcccaggaggtcaaggctgcaatgagctatgaccgtgccactgcactccagcctggacgacagactgagaccttgtctcaaaaaaaaaatcaattaattaatttaaaaaaataaacacgaccaggcatggtggctcacccctgtaatcccagcactttgggaggccgaggtgggtggatcacgagatcaggagatcgagaccatcctggttaacacggtgaaaccccgtctctgctaaaaatacaaaaaattagccggccgcggtggcgg

SEQ ID NO: 1563432 - DNA, 4001 bp, Homo sapiens
cacgatctgggctcactgcaacctccgcctcccgggttcaagcaattctcctgcctcagcctcccaagtagctgggactacaggtgcatgccaccattcccagctaatttttgtatctttagtagagacagggtttcaccatgttgtccaggatggtcttgatctcttgacctcgtgatccgcccacctcggcctcccaaagtgctgggattacaggcatgagccaccatgcccggccctctacttcttttaagcacacaagtaagtttaacaaagtttcaaaggttcagggaaaggctggccctgttttagatcacttcctccattgaggattgtttctggtgtcaagacaagtttttcatttactcttacatgcagtgagcagaaccaagtgtttataggatagcacagtgtagagctgtgctgtctccactacctaataaaaaatattacacagccaggtacgtaattttaagtttctagtagccatattaaaaaagtaaaaagaatcaaatgaagttcatgttaatatatgttatttaacccaatgtagccaaaaatgttatcacttttaacgcacaatgtaagaatgtattagtgagatatttgacatcttttttgtgtactaagctttcagaaatcaggtgcctgtactcagagcacatctcagtacggattttgccacatttccagtattcaataaccacatgtgaccagtggctcccacattagaccaggcaggcctagagcaaataaaagcaccggaagcacccagagacaccttctcagtgatggccatttaaaaagtaatgttagacacaaaagagtacttacctgatgatcttgttctatgaagttctagaacagtcaaagctaagctatgataacaatcagaaccggggttgagtgcggggcctggggtggattgacagaaaggaggtaccagggaactttgcagggtgaaggaaatggtcaatgttcactttgggataatggttacaggagtgtataatttgtcaaatcccgtcgatttgcacactgaaaatgggacattttgttgtatataaaccatacatacaattcttttttatgttgcccccaaaaaagctattctgtagcagcagcgtagttcggcactatgcgccctaaccatctagtacggggaaaacgcgggggtcgttgtttaaggggtgcactgggaccggggagaggacagaaaggccatgttaccggcgctgatcaccagcctcgcagacccccgctcggggcttcacttccgccaacgccatctcagggctctcctggctcccgagggccgggagaagtggggatccgggtgcgggcgctggcgcgggcggaggcgggaagaagcgcgtcccggggacgcgcgggacaggctccaaccgcactgggcacgggccagcgttccccagtccccgcgccacacccggcagccgaggtctgcgagcgcggggctggcggccggacccgactcagcgctgggcagggagccggcgccatcagagagcggacaaaggagcccggccccacaagtgcaccggggctgggggtgcagggcggagaggccctggggacgagggatggcccgggcgccgaggccctgggggtctgggacaggcccagaagggaagttacctgcgcggtggtggtagcaccggggagggtggccggtgggcacggcgggctccaccccgcggctggcctggcgctcacctgtcgggctggggaaggggtcgctgccggggctgtccaaagccgcccccgggatcttcccaccgcccacacgggcctcggggtgcgcggcgccctcctcgcccaccttcccctctcctccctgctgctggcccagctcactcacgctggtgagcttggggtttgcacccgggtttgtgcaatggtccaaaacaagcgcctaaaaagtgattcctccagcacaggcagctcccgtcaccctccgctctggacgcactgggccccaggcctcgcccagcccggggaccgctcctccctcccgtggctcactttgcaaaggcacttcgagtgcgcgggtgaactccacgcttcccggggaaccccggcttcctggcaagccgagaccctcgctcgggtcctcccgtgcagatctcacccttgtaaagaacttcactggtcacaaacgcttgtggatcccctactacgccccaggaactgcaggagcgctcaggagagaaggaaaaggaaagagaatgcctgcctttgaggagctagctcacagtctggtgggaggtccacccgtctgttggaaccagtaaggttccctagaacaatacttctgcagcaaagagttgcgggggtgcagtgaggggaggaaggcaattaaggcttccaagagtgactttttttttttttttttttttgagacggagtttcgttcgccctttttgcccaggctggagtgcaatggcgcgatctgggctcactgcaacctccgcctcccgggttcaagcgattgtccctgcctcagcccccggagtagctgggattacaggcggatgccaaaaagctcggctaattttgcatttttaacagaaacggggttacatcacgttggccaggctggtctcgaactcccgacctcagctgatcctcctgccttgcctcccaaaatgctgggattacaggcttgagccactgcaccccgcccaaatactctaaaaagtcactcttcgggtgactcacgcctgtaatcccagcactttgggaggccaaggcaggcggatcacctgaggtcgggagttcgagaccagcctggccaacgtggtgtaaccctgtctctactaaaaatgcaaaattagccaggtgtggtggcacctgcctgtaatcccacctactccgaaggctgaggcagagagaatcgcttgaacctgggaggcagaggttgcagtgagccgagatcaggccactgcactccagcctgggtgacagaggagactttgtctcaaaaaaaaaaaaaaaaaagagtattggaggatgattggtgctgggaacggatacaggaggtttttcgggtgaaggcaagaagccaaccactgaaggaagctaacatggacaacagaagggtctgaagtgagatggaaggttttaggaaagtggtggaaatttcgcataaccagtgtgagatgctagagcgacaagttagacaagagtcactgaagacctagtggagtttagaaaccatcatcgtgtagtggtgtccagctataatctgctataatctggcaaggtatctacagaaatatagctcttagttatgaaacccaagtttcctgcttgcatagaatagaaggacaagagggtgaggaggtggagggcacagaaagactgcgattgcagtgatgggccagagctctagtcctagaggacaggaactgttaataaaaccagcggggagctgatggactgggagacagatgagagaagggctccaaggccagggcctctgaggagaggactggcaaactggcagcagagagtgtggtgctggagttcaggccttcaaatggatattccaggaaatgagacagtttggggtgtggcagctacaatggaatagaaaagtgagatgggcatcactggccttgggtttagtgcccacaaggctggtatgttggacatcgagggtcccaaaaggatggcaggaggtggaggagtcaatcgaggtcaaggaactttagagaattggggttgcggggtgggtagtgagcctgaaactaatagatgactgtgacaaggaaagggagaaggttgcagaacaaatgtcagtgcctttcaagacacaatggaggcctggcgccatggcacacccctgtaatcccagcactttgagaggctgaggcaggcagatagtttgagtccaggagttggtgacttacctggacaacatggcaaaatcctgtctctacaaaaaatacaaaaattatcacgtgtgctggcatgcatcc

SEQ ID NO: 1563433 - DNA, 4001 bp, Homo sapiens
ctactattaaatcagaaactgagagcctgggtatgggaaggtagtgatataaaaaagaaagggttaaaaatagacaacaccatagccctctgcttgagacaaaatagagcatactcctgatttccacacaatgttaaaaacacaagcatagagaacctaatcttctcaatactaatattcagccacaaagcacttatctcataaatattacttaagttcattcatttacttctctatttaataaacactgtagcactgattacctggcagttacgggtgttgaaaaagtaagtcagaaaaacagaaacacattcaacaaataaaaattaattcagctcaaatacatttttaaaaattgctgattttatatttgcctcaatgtattcataatactctcctcacatatctcaaacacggtctgaacaaattttcctaaaagctgcaggtcgatactttaaaatccattttagtgatggaaaaaatagatgtagtaattgttcctatctttagactagtggtacacagagttactacttctgtgtatacacaatgtttttcactttcaaaccctacctttggaaagaaatgcagagaacataaatttttcttcaaatattccttccaaatgagtttcatgaatacagtataaatctaattataaatcttatttgagcataaaaagatcactattgctacctgcatttctaggcattggataatgtggcctactgaagcataaaaataaaaatcccagcaatgccaaggctcgctatgcacctgaaataaataaacctctttagaatacaaatttctcacctgcaaaatccggatcaatcataccgattgtcagtgttataaggaataacagattaaatacaataggttgaaaaagacctcaaaatactgcacagaaacacccggtgtatgcttcagcacaaggatcctaaccacccccggaaaatgaaccctccaccaaaaaaggacctcccctccacctcattgattatgcataaaacattaggccacctccaaactgtttaatatattaacataaatagagcacgtgacccctcgagtgtcaaatccttattaggtgattatggattttggccttggttacctttaaagttcttgatcactaacttcttagcagagccaggtttgctgttagcaaagctagagacggtggtagaagatttggctaggccgtttgcatgatgcaccgaagccacagaagagattaatatactcttatttttaagttgctgctgctgagatgttgcagcagttggtgaagatgaggaggaggaggaggaggattcctcagccatcttcgcatcaaaccctacaaactccagggtgtcttcaaaacgcagcttcttctgtatcggtacgtggctggaagcagccactgaaacccccaggcagaaggacgaggttgaaggggatgccgaatccctgggttgtaaaggaggagtggaagaggaggaagaggtggaatcaaagtcttctctctcgttactactgttactgctgctactgctgctgctgtttaactttctcttcttggcagaggtgggcggagtggtgctggtattaccatcagtggcagatctgacctcctgagcagcagcagcagctgagggactgggggaagaaaaacctgttggaaacatgaaaatagcggggtcaacaggcagaggagcatcaaaaacctacgtttatatgcctgcgtgcgtgtaggagagaaggtagcaatgctagagggggaagggaagaaagaagagaggagaaacacagaggacgagaaggaaagtgaaggggggggctacaccgggggaatgggagggtttgggaaggcggataggctgacaccaggagtgagcagaacgaggggggagagcgaatgaggaggcagacaggtaaacggccgtgccgtccccctcccctgcttttcgatctctctccccccctttctgcaggagcgactcagcgagtctgtgaggctgcagctcctcctccttttctccctctccctgggaggggagaggctgtggttgggggaaagggggagggggaaagaaccagggcttgttattgtcaatagcacaagaggctaaagatggcgccatttccggtcacgcggcgccgagggaggggcggtgtcaacctcagggagtgggggtgagggaagcgctgcagccgcccggggggcgggggagctcgcgcgtgagggggcggctggaaaggggcggctaaagtgccccagacgctcgcgctagttcgctcctgctcccgctccccttcgcgatcccctttcctggcagcgccttccttccctggcccaccgggaactcccactccctccttaacggtcccgcgggaagcttcgcgccgcagcgcccttaccggaagtgactgggcagacacttttcatagcgcccagatcccgaagcccccaggtccgcaggacttgagtgggggggggaaggggggagggagaaattggggggaagaaaagtggataggaggagggggcgggccttcgagacaccttcggagctcctgattggagctttctgaaggcgagggggtggggggggtggcgggaggagcgggaaggagcctcgggggagggaaggtagtgacggcgaggggcggagtgagctagctgggaaaacggaggaggaggaagaggaggagagagggagggacggaataaaacgtaagggtccgggagaatagaaactttgaaagagatgaaagaataaggagtggttgcaaggctaggggagtaaccctaaatagaggaaaacataatcatgccattatgcccgctgctggagaggaatgtccctatgttaagataggaaaggagaagaaaacgagctaagataggaagaaaaggactttttaattcggtgccggtataaattgtttctcttttatctcaaggcaccacagacccaaggctgaataaggcctgaattttgatgcctttctctttcatgtagctgtaaatccttttatcttactaccaggagcattttctaagctggctggccaaattaagtgtgtattctaaggcgaagaaatggaaaggtaactaacccctcacccacccagcactatgcccaggatcgtcctaacccccactctatcagtccttaactcagtaatttatagacccaacaaagctaagacccacttccttcttttgccaaatctcagtttacacgctgtcccaaaggagacattttagaaccatatcggcaaaagtcagtgttttctactaatgtgtttcatgaccccatgctttacaattgattattgatttaaaaaatctttaagtttggttaaattagcaacaataaaccttgtaaattccctgttgggagtttttacttaaccttggggcattctcagagggaggtaacacaatatcaaaaactaaatttgccaacctgttgatcattctaactgcaaaagcattcagttagcatgtatggtaagactatgcaaggtctctgcccttgagaagccagtaggggaagatagtttcaaaactaatttccataacaataatatgacatatatacaaagtgctgtcagaagaggcaaaacaagaaatttgggagaaatctggaataggaagagttctacagagattatgtttatgctgtgtctcaaagtgggagttgccaaaaagagaagagggaacaggatgaaaggcattctggggaacggaaacaagggcaaagcaaggagtgaaagggccaggcctgtttatggaaacatggaaagtgcagtgaggctgggaagtaggatgtctggctgggagtaaggaagatgaggctcaaaagtgcctggcacaccaagccaagaatttggagtctactctgtaggcgatcatagatagcagggagacaatccagcaagcagagcttttacaaaccaggggtgacaggattgtgagtggagtaaaagcagcttgtatggta

SEQ ID NO: 1563434 - DNA, 4001 bp, Homo sapiens
cttttcttttttttgagacggagtcccactgttgcccaggctggagtgcaatggcacaatctctgctcactgcaagctccgcctcccacattcaagcgattctccagcctgagcctccctagtagctgggattacaggcgcgtgccgttaccacgcccagttaatttgtgtatttttagtagagacggggtttcacaatgttggccaggctgctctcgaattcctgacctcaggtgatcctccccgccaacccctcctcccccatcacctgcccccctctgccccagcctcccaaagtgctgagattacaggcgtgagccaccgcacccggccctgaggtataatttcataagaatttactcaagcttcctagacatgttgttaacaatattttttttttgagagggagtctcgatctgtcacccaggctggagtgcagtgggcgatctcggctcaccgcaagctccgcctcccgggttcacgccattctcctgcctaagcctcctgagtagctgggactacaggcgcccacaaccacgcccggctaattttttgtatttttagtagagacggggtttcaccgtggtctcgatctcctgacctcgtgatctgctcgcctcggcctcccaaagtgctgggattacaggcgtgagccaccgcgcccggcctgttaacaattatttagacttaactcttgagttttactagttcatttactcaccaccgtctttagaggtagtagcctcatcatcattcccatctcctgatccagatgactgtgacatcatccgtcctttgggtctacgatagaaaacagagaattcacttttccagcagtcctctcccatatctgtatagtgttatgaattcattgactctggtttcccagccaattttatcctatttgttccatatcttcaaggaaattatcaaaattttggtctgctaatcacatccttccttgctaacccttgcaattttagtgctattcttttactcgtttttttcttctgtcatttcaagctgatttggcagggaaaacacatttgttaagattctcttaaattggaagcctgacatgccattttaaattacaatggcttgaactcctacgggcttgaatgtcaacaaaacagattcccctcaaagtgtcctccagctatttctggaggttcttcaaagtactatctcacttatgatctgaatcagtcacaaattttcttctgttcctgcctcttctttaagctgcagtgctatggttgttgaaggccatcttgtgatcaccactttgctgggtaggatcttcaccacaaataactatgactctaacgagcttttccctaagttatccgcatcacaggtgaataaaggctgtaacttttaacatacctcttataaatatttgggaataacgaaacctagcacaacattgagaataacttaaaattgcctaaaaatgtggctttgcttaggtcttgtgacccataaccaggtacataaccaggtccaccttcaataagttcctaaacaagatcctccccacattccgaaatctcaaaagggcattttagctcaccgtcagtcactggaggatccgttgtgttcttctatctaaggtccgagctgtctaaagcagaggattgggaagaccttttgaaaacactttagcaatgcccgccctttcggcgggctaggttctgcccgccgaggctggctttcatgtgtatttaacaccttccgggatgatagactgcagggctgaccaatctctgcaggggaaaccccattagtctaacaacagaggcctggttggagccaaaagaaaaacaaaacgaaaatttcaaacgatctcagagttatacagttcccaaagcctgggttattctctaataatactacctatgggacttaaacagataagcctaggttgttctataccaagactggcagtttctaaactgaactgctggggagggattgtgtcttcacaattgggtagtgctgacgtcaccctcatggggaggggtggtgcatcagggtagtgctgacgtctcctccatggggagggtgaggggcatcaggttctccacgtggtctctgctgagcgggaaaaggtgggggatgggagatgggaactggagccttctaagagccgaagtctaggctcctgttccgccattgctggcttgggtaagggtgagtctgcattttttcttttttcccatggcatttggcttgactagattagctatctaaaattttctcgattgctagattgctcctttttgggttctttgtcttgagagacaagttttgttaaggctttagtctgtgtctgttggtgtttcacactgttgtgaatgggatatatatatgcacacataatgtctagttctgttattactagaataagagaaaattattggaatataacaaaagaatgttaattttaaaatctaggtggtgggtgtattgatgttcattgtaaaaattctttaaacttttctgcatgtttgaacatttttataacaaatattggaaaataaaagggagctatttaataatactttgaaaaggaaaaaaatggaaatgatgggattctatatatttattttgcatctggcttgtattaggactcttgtttgcaagtgacagaaacccaacttgaataatcttaagaggaaaattgagtttattggttaacgtaactgggaagaatagggcagatctcagaaccaactagatcgagggactcaaatggtatctaggctctcactccgtctcatctttcatctctgcttctctctgtatcgcctaattctctaagactcttacatggtagagacccgacatggctactaatttctctgggtcacatccttacagttcaatatccaaggaaaagagaaaattacttctttacctttgatttggaaaattccaagggagatcttgtatctctgggccaggtctcatgcctaccacttggagctaccactgagtccaatggggttggatattatgattatgatgttatgattagtccatcctgggttaggtgcccagccacaggcagcggaggggactattgtgattgcctgtcctaccaggactatattgaaaggataaagtaggagcaggtacccaaaggaagaagaatgctgttgctagaagcagagaggaaggaatgctgggcaaagcaaaatagcagatatccactacataggcttattagttttaatgtttttaagttacatttcttggattctcaatgtgtataatcatatctataaatatactttttcctcttttctctttcttttagatttatacagcttattttgttttcttgttttgtcacattccagagccttcaaaacactgtagtggacatctatgctttattcctgaatttcaggggacgtgacttgattatgatgctttctattggcttttcgatactctttactgtgtttagaaagctcttttctagctgggtgtggtggctcatgtctgtaattccagcgctttgggaggccgaggtaggtggattgagccctggagtgcgacagcagcatgggcaatatggtaaaaccagtctctacaaagaatacaaaaaattagctgggtatggtggtgcatgtctgtagtcccagctactccaaaggctgaagtgggaggatcacctgagcctggggaggcagaggttgcagtgagcagagatcacgccactgtactctaacctgggcaacagagcgagaccatggccaaaaaaaaaaaaaaaaagttttttttctattctcattgtactttctatactcattgcactcatttataaggaatagctgctgatttttatccagtgccttttggccatccattaacaggtaagactacatcaaaattaaaaattttgtaaggaagatagtaaagtacagaaatcacctgaaaacaagaaaatggagaaactggaatgtagactttaccttccgtgaaactag

SEQ ID NO: 1563435 - DNA, 4001 bp, Homo sapiens
atagagcagcgggttgaggcagcagtgcatgtagcccaggcctgaggtgaccgacttggccacgtctaccctgctttctcggccacagttgcgggccaaagcgcccaggtccatgaggatgtccaccagcaccaccaggtgatagggggtccagcagagggcaaaggccaccacgaccaccaccaccagccgcatggcccgcaggcgccgctggcccctggaaaccagcagcacggccaggatgtgggcatagcagtaggccatgaccagcaggggcagcagaaagccagccaccagctgcagcacccgcagagccgtgcggcccacctgtgggaagttgtattggcagtgggtggcgttgaggcgctcgtcgtggtgggccgacaggaagatgaagtctgggagggcgaaaagcaggcagagcccccagacagccaggcaggtgagggtcacgcgggccgggggcccccggcggtagagctgggtggcatgaactatgttcaggtagcggtcaaagctgatgcaggccagcaggagggctcctgcgtagaagttgatgttgaagagggcacctgccactttgcagaggccagagccaaagacccactggacggcagcgtccactgcccagagcggcagtgtcagcaccagcagcgtgtctgctacagctaggtggagcaggaaggtgtcggtgctgctcagggctgtccgccggctcagcagcacggctgccaccgcgccgttgcccagcagccccagcagaaagaggaggctgtagagggctggcaggaaggcccggtcgaagttcaggctgaagtcctgtgggcagggcggggaggtacagcacgagtcactctcgttttctccatagtcataggaagagctgaagttctccaggagggcggcaacctcggcgtcatttagcacttggtggtcactcacctgtgagggcgggaacggggaggaaggggctgtgtaaaggcctggcaggaactcttttgtgattgagtctgatttagtctgtgatttactctgagcagctcctcctataactgtccccgccagtcttccagggccgtacttcctcaactccatccgctcagcctgggctctgggatagtgacttcccttctcaaaggctgcttctctcgcattcttctgcgtgatcccatcggcccagggacccctgggcaggaagaagagcgtccctccagtgcccagagccctctctgcccactgtcctctctctccctgctctcccttcaggcttgccttgcgtcctcagtgccccacccccaacacatagttcaaccaccttcctccccagcgcctctccacaatccccttttccagtcactaaccctcctcttccctccttggcccttgtccggggaccccaacttcctgcgcccccccccaccgtgtggcctctctacaagtcaccacgccccccaaatgcatgcagtctgcccagtccttccccctccctacactgaggcttgcacggccatttagctgcccacaaggggatcccccacttagcttgagaaggaatcttctttatcccctcacccccagcactatggacctgcaggtctccccagtaccaatttagtccagcacgccaagagtcaaagttccaagtctcctgaagggagccttcgagtctacttgccccccgccccccccattttgcagacgagacaccgaagccagagaggagaggagaggcacccagggtcagtggccaagctgggttcccaattccccagtgctgtttctgccacaacccatgcggcctccagctactcacccaaccctgtggtgaccctgggctgtgggccagccctggcattcccctgatgccccgggttttccacttcgaattctggcctggcctggctgggcagcagcacttacctcaaggaccatggctgggctggtgctctggctgctgggtggtgtgctgcctgcccctctgctttggtgcttgtggttggaaacctgcagtcacagaggaagtgggagtttcaggcagttctcagcagcagcctcttccagggagttacctctaccagacctccctaaacctcaggccacagagtttccgtgactgggtgaaacctctctggaggagctggctacaagcttgggaccagaaaagctgggcagaggatgactggctgggggcaggtcctttgagaagagaggtctgaagaggaagcaatgcagctgagaagtgaagggcaaccctactgcctgcactggtagggtcagtgctccatagattggaactcatctgtcctggccttgagttgatctttgcatgattgtaaaggctgggtagagaaataagtctgcagaggagatccaccttcttaaaaatttcagctaggtgcagtggctcattcctgtaatcccagctactggggaggctgaggcaagaggatcacttaaggccaagagtttgagaccagcctgggcagcatagcgaggctccatctctaccaaaaataaaaaaagccagccgggcatggtggcatgtgcctgtagtcctaactacttggaagcctgagacaggaggattgcttgagcccgggagttcaagtctgccttgagatataattgtaccactgcactccagcctggtgacagagtgaggccctgtctcttaaaaagggaattaaaatatttttttaaaaagccgttacactaaatctagctttttaccaccacctctccctgctaatcagtggggaaaaagaaagggaactaccagtaatgaacttgctatgtgatagacattgctttaggtgctttctccgacactgccttatttcaaccacacaactcacttgtgacgtgcggggttatctgcatggatgattcagaaaggggacaggccttcgccagacacggcaattaaaggtgggcgtgaggattgatcccacggctgtctgattctccttttcctactcatgaacactgtcttcagtttcttttaagtgaataagctatgatatattcatgcagttaaaaacaaatgaactaaagctacacatttgaacatggatgcatctagaaaagccaacgatcacatggtagaagaagcaagttacagaatgccatgtatagtttgatgccacttacataaactctaaaaaccaccacaaaatcaataccatgttgttttggataacactgttggttctcgaggtttaaaacagggacaggagataccacaaattcataaaagcagttgcttctcgggcaagaaggaggatggggttggggaggaggccataggaacttcttgatcttaaggaaaagctgtaaggcagccttggtacagcacatcagtcactttatggcagagaatggtgaacaattcctctccccacctgccctcagctctcccctttgccctcttctcccctccctgtcgccctcttctcattaccagtgggcaaggctgcccgtaatttgcttctcccaagcagtttcctctttctctctctcccctagttggaaagcaggggtggagggagagagagaaagaagagagaagagagaagagagagagagagaaaagcaagtgctagcccatggtcttggggccagttttcagccagactgccccaccaaagcctccaggctagggcctggaattaaatttacacccacatgaggcatacttgcaaggcatcaaggcccttcccctcctgtggacagatgtgactctccttgctctaaacagcttgtcacctgcagggttcaggccagagggaactgagggcctggcagaggtcaggagcagtgccagtggagggagcaggaaggattccagaaaccaggccagttaggatgagcaggacttggccagtagctacctatgggggtggaaaagggttgggagctgggaccacagtctcccagtgctgacctgtgaagaggtttgagttccatgggcttctgcaaatgagaaaattgaccatggaaag

SEQ ID NO: 1563436 - DNA, 4001 bp, Homo sapiens
ttttgaatcactttcaatgtattttgatgcaaaatgagaggactaaaaaaataagaaacctatcataatagtattgtactgatataaatttctttggtgttataattgttaatcattgttaatcatgttaattatgccaatttcattaacatttacttaattgtaggcatgtcaactacaaatgcaatgcaagattcttgattggatcctggatttaaaacataaaaagattctaaaggacatgtggataattaggaaaatttgaatgtgtatcacatcttagataatagtattgtgttgatgttatgtttccgtggtgttgtaatgtgttatagaagactgcctttatttttaggagatacatgctcaagaatttaggggtgacatgtgtcctaaagtcagcaacatactttcaaaccattcagggaaaaaactgtgcatatgtgcatgcgtgtgtgtgaatatatatatacacatatagagagagagaaaaggacaggcagagacagagaaagacaaagcgagagagaaagtaaatgtggcaaaaagataccactgattaatacacatgatgaaaatatgggtgttcgttgtactattctttcaatttttatatagatttgaaacatttctaaataaaaattgggagggggaaaaaaccatatttagttaatgaaggcatatttacattgtataatgtttattaagagcctagagggacaatatcttatatatctaaaataatcactacatatgagatgagaaatgtctcagtgacttgatataaatacttcaaacatcattttgctctgagataatagaattagtgtactacctttgaatatctccaaaattccacttatgatatggatgtttgacacagacttcaaatactcttcaatcctccagaagcttctcaagctcagaaacaatcttcttctcacactgacctatgcaagaaatgttataaaatatcaatataaatattctgtccaaaccaggtctatatttaagcacagattcatatgcgcaagacaaagaatgtttgagcgagtctaaagataattcaaacaaaactccactcgtacatgcgctatctttaataccaaaagggaagctttccccaaatcacccagatgaaagtcgaaaagcatcctcactatagatcgcattcattttgaatacatcctgccacacagaaaaacactatcacaagcttgctgaactgaataattgagagtcaaatccaattggaaaggactgtgattgttttcgtctctaaaactgcatcaccgtaactgaattcaagagctgtgttgtccctgcaaaaccctgcttaggtttttaggccttcttttaaaaatgcagaagctaaaccagtgtggcaattagtgaaagaggactgcaaaaataacacaataaatatttgctcagatcagtcaaaaattgtaggtaaaaatataagtgttttagaaatgcttagaatgtggacacgaggaggtaaggaaaggaagtattgggcttaatttctctttatttttcaactccactgaatgcttgtttaaactcccacttgtctctgatatggtaagctagaaaagcattttagatgtcataagaatggatcagcgctctcgtgataaagggctaagaaagcgtgagaagacagatgacaaaaaataatagcggagttctagggtcctttgctttctttttcttaccttcactaaccaatctgctcatctgatccggcagaaacacagcaactgaccaaacagagagatgaacaagccagccaatgctctttccagaaattttcacaagcctttcactgatgagaccagtagactgagctgctcagtgcaaagccattctttttataattggtcccatggaaaaagagttgtttttgttcaagtccgatttgtgctaaagaggcagtgggaagtcccgggaggtggggaggcagtaactgacaaagccacatcaagccacagaatggtgtttcttcccctttttcgaaaaatgaaacctatctacgaaactgtctcttattaaaatagtttatggttacacattttgtaagaaccctagcaacagaattaaatttcctttctagaaaagtacattatctgggatccttcacccaaaagaaagccaaagtcacatatgactttaggaaattctgtttcgttactaatctataatttttaagaagtattatttctcaatggtacttataatttttaaaaatgtaaatgaaaaaaattttctcggccgggcgcagtggctcacgcctgtaatcccagcactttgggaggccgaggcaggtggatcaggaggtcaggaaatcgagaccatcctggcaaacacggcgaaacctcgtctctcctaaaaatacaaaaaattagccgggcgcggtggcgggcgcctgtggtcccagctactcgggaggctgaggcaggagaatggcgtgaacccgggaagtggagcttgcagtgagccgagatcgcgccactgcactccagcctgggcgacagggcgagactccgtctcaaaagaaaaaaaaaagaaaaaagttttccctctccaaataccgaaggtcaaaacaataatacatggtgtgggcaaagttgtgaagaaacaagcactctcaaacactactgatgagattgtaaacatatttagagggcaatttcccagtatctctcaaatacaaatattcataccctttgacccaacaattgtattttttataaatttgtccaagctatatgtttacacttgtacacaaagacttatgtgaaaagatatttgttgcagcattgcttgagaaaataaatgactagaaaaaattatatccataaataagatattggccaagtaaatgagaacgtatgcatacttaaaatcctatgtaggttgtgtgcggtggctcacgcctgtaatcctagcactttgggaggccgaggcaggtggatcacttgaggtcagaagtttgagaccagcctggccaacatggtgaaaccttgtctctactaaaaatacaaaacttagccacgcgtggtggtgggcacctgtaatcccagctactcggaggctgaggcatgagaatcccttgaacccgagaggtggaggtcacagtgagctgagattgtgccactgcactccagccagggtgacagagcgagactccatctcaaaaaaaaaaaaaaagaaaaaaaaagatctctaacatatattgtttagcaagaactcattttccagtttgtatttttaaggaatatatgtatatacatgcttatgtaatagaatatttctttttaaaattttgtattttaatttttgtaggtatacagtaggtgtatatatttatggggtacataagatgtttcgatacatgcatatgatgcataataattacatcatgaaaaatggggtatccatcccctcaaacatttatcttttgtgttacaaaaaatctaattatactattttagttatactaaaatgtaaaattaagttattattcactacagtatccctgttgtgctattaaatactttgtcttattcattctttctaactagtttttgcacccattaaccatccctacctgccccaccagccctccactacccttcccagcctctggtaaccatgcttctactctctatgtgcatgagttcaattgttttgatttttagatatcacaaataagtgagaacatgtgatgtttgactttctgtttctggcttatttcacttaacataatgacctctggttccatccatgtcgttgcaaatgacaggatcttattcttttttgtggccgaatagtactctattgtgtatatgtatcacattttctttatccatttatctgttgatggacactgaagttgcttccaaatcttagctatggtgaacagtgctgccacaaacataggagtgcagatatctcttcaatgtactgatgtcctttcttttgggtagataccc

SEQ ID NO: 1563437 - DNA, 4001 bp, Homo sapiens
aggagtgcatttcatagtcttgcaacaaaggaaaattcacactgatattggcttctaactactaagcatatctagatgttctcttgtcaatgtcaagacttgtggaatgaattgttttccattatatcctagatataaactgaaataaaaccaattataatatttttcttgttactgcacagaaaccatccatacaagtgtcccctgaacatccataaaatagtggttgtccacatccaaacattattaccaccagcttgtttcaaaagaaagtattttcagatacacaagtaattgttcaataaatatgtgctaaggtagtgaaataacacaggctttccttaattttacagtgtctggagtaagcaagtactttttgatttaaagaggagttaatagtctcttgagatatactttttaataaaaatatttaaatatgaaaatcattaaaacctgattccatttatatgaaagccaaggagaggccaaactaatctaccatgttagaaatcagaatagtggtcagttccacagggtgattactccaggtactgtaaggaagaagcactggggatcttctggggtagtgaacatattctattatttgatccaggtggtagctaatggagattatctatctagctatctatctacacacacacatatttatttttttgtaaattcatcaaactttacttttgagatctgtgcactttagtaagtaaataatacatcgatttttttaacagagcaaaaattagaacatggaagtcctttttctcattgctcttctaatcattaacataggtttttctacatatatacaaagaaatatatgtaaatttaatctaaaattacggacatcttttttttctgcacatatagtccagctgtattcaacactactttttattaggaatatctcttgaagttttcagttatttattgcttacatttcaaaaattcttatcgcatttcctatatcaaaaatttgcctgagaaaatgtgatcatactgaactaataaccatccattcacacacatgatgtaaaataacacagtgagatacagaggaaattctgcccactttaaattagaagatagaaacaccctctcagaacattaactttcttgatggttagatctgtactaaaaccccctcattagtttctaagttctatgagggcagggctgtgtccattccgtattcctcatgtctattacccgttatatagtaggtgcttaacaaatgtttgttaaaatatgaaataatgaacctttccactaatcctacagttcctggagttatcaggcactttatgattcaaagggcagttaatagagaattttgttctcataattcttaaggcaacagcaaaatcataaaaccaagttgcacagattttgggattgttaacaagtttctaaacccaggttgaagaaatggggaggctctaggtcagcttttctccaccctgccctccccatctcctaatcctaaacaaaacagaaaacaaagagaaacaaaaagagcacacacacagaaacctgtcactgtttcccgggaagcccaatcctccctccatcccggcaggagccagatgactactccctggggcaaagagagacgcagtgtgaggaggcgctctcacaaggtcccgctcccagcaccccttagtgtgtcacctgtggcttgacgggctccttaaatcggattttctggttccagcggcaaatattatgcacagtaatcgggaggcggtacaccctcccggccatcgtgtccaggaacttcacctcagccgggatcacccgcagctgcatgtctctacccgagctatccatatcccgggggacgagggaacccctttggatgctcatggcgagggaacctctgtggacgtttatggtgagggaacccttttgggtgttcatggctgccctctcggtagccagaaaacagatgtggatccgtccggccaaggattagcgtcgacgaccgtcgctaggcaaccatcagacgccaagcgctagtttcaagccctgctctcattggcgcctcccaacccgcgcgagttgctaacgcgaatagaataaccctcaggtcacaggtgttaccagagtaactgaaaaacacgctgtggcagcccaaacgtcagaggcacctcactttgccatggcctggcacggtattaaaatcacagaggcttagtgggcattttcctggacctctcgtaagacaaagtttaaagtaccatgcattttaaagaaatctgcccacagatgcactgtaaactggccttataattcaattaaaatttacatttacaaagaaaaaaaagatcagtgaaagtgatgtgcccacgtggtctattaaggcagcaagatataacagaaagggagatataacaaagtcagtgtctcctagatgtcctgctcagaggtctttacgtcagcgtttctgaatcagaatgtttcttacaatagcaaaatattggattaatatgaataccaatcagtagcgatggatacaataacttactgtttatttatgatgaataataacgtagatctgtgttgacataagagatatccattatacagtattaaattttaaaattgaccaaacaataagaaattgtgacacctgtatctttttaaatgcacacacacacacacacacacaatgtaaaagcaatcctctgggtcttttgttaaaatgcagattctgtttcagtatgtctgaagcaaggtctaagtatctgtatttatgacaagcaagcttccaggtgattacaatgcttctggttccggggccacacattgaatatagaggctttaggaaccttgttaactgttccagggtcctcatttgtgaaatggtgttgctcaggagatagagatcacacgtcttcgctgctagatgaggacttttccaacaaactcatattcacattgcccagtccctactctctcctcgtccttcttctgttatctcagagtttcaaaatataccacacgctttcatttactccttgctactgcacattatgttcactctgaggagaatggcctctccatctgccagccaaacagttagtcattcttgaacagtaaaacctttcccacaacacttttacaaggttctcacagtaccaagatgataaagaatttcttgcttcattttccacaaggatgcagagattaataagtagttctaaatacaaagacaagtagtcacatttcttggaactgctgtcaatagttgaaaaacagcagaagtggtgattattatttgtaaattcttaggaattgatagatgcaaaccatcgacattatctttcaaaattctatagatcttggtttaacaagtgggagatgtgaatcatggctggaatttttatactagtcgctactaccatatcacaatacaaatcctgtccatgttcctgagcccctaagcaggacaattttacagcattgaaataacaatagttcatataacttgactgaatcaagaccacagctcatacaaagcccctcaatcaatttctgaaaaaattggaaactgcgaagaagcctcaaaactccctaattttttactctcaaggataaaagccaagtctggacttctgtgtataatccaaagatatggcaataaaaatcaaatgaagaacaattttgtttatctgttctgttggtattctcatcaacaaaggaggaatgtcacatagctctacaagttcaacaagcctaaagctcaatccattgtccttagtaactatacataaaccttcttggcttcttatatattcttttatccactcaaactattaattttagatgaaatagtctaatatttgcatcacatgtttagctctaaactctcttgttcagtttctattttcaaagaatggccatataaagactttttaattttttcaatttttaatttttgtgggtatatagtaggtgtatatatgtatgggttacataagatg

SEQ ID NO: 1563438 - DNA, 4001 bp, Homo sapiens
ctcttgagttctgcacgccttgcgagcgccctgtgagcagaggcactgacaacctttgttctaaggcagtgttgcaagatagagatagggtctcactcagggaaaagggctgatgtgtttgctgtccaggataataaaataaatgtctcctccaaggcaaaggctgcatgatgggtttatctgcagcccctgataagggactcatgttcctcagttgtactataaccccactgcctgtatggaaagctcgctgcctcacggcatccatccagtcagtggctctgcagtcccagccctcacgggacccagagggtggggggaatgacaggaacatgaagctcaagctgcttgctgtattctgagtaataaaggcctttgtctctgacccaagagtgccctgtggcaggctaataatgtgttagtttgcaagtaaggtaaaatatcagatcctttatagttcttaacaaagaaacctgagaaggaacctggaactcaggcactaagcttggcagggtctcttgtgcccctcatcagcgccttttgtcttatcaagaaatgacctctgtgggccgggcgcagtggctcacgcctgtaatcccagcactttgggaggccgaggcgggcggatcacgaggacaggagatggagaccatcctggctaacagagtgaaaccctgtctctactaaaaatacaaaaaattagccgggcgtggtggcgggcacctgtagtcccagctactcaggaggctgaggcaggagaatggcgtgaacccgggagacggagcttgcagtgagctgagatcacgccattgcactccagcctgggcgacagagcgagattccatctcaaaacaaaataaaaataaaaaaaataaaaataaatgacctctgtgataccctgttaaaatcattcacttctatacattcccttttctttctcaagttccttgccattgcaagtggctcctgtgaattacaaaatgaaaactgttgacaaaatgattgattagttactgcataactgaaatgcacaagcaaaatgggcaagttatcttaacatgaaaaatcttggtctgccttttttgtgtgaaatgatggtcctttttaagtcctagaaaatactagtcacatttacagctcggtgcctttgctcctgctctcccccttaactagaatatttctcttcactctttctgcctttagaagttctacacatcctgaaacgcccagataaaattgttttcatctcttctttgaagactttcttagtaccctctttttcctccacaaaaacagaattatttcctccctagaaatccagaatcctttgtcccaataagtagcacagcattttccccactgtatcatagttggccatggtgtcaatctcccagcccaaccacgtgcttgctgaggccaaagaagatggcatatttgcctttgtagcccaagaacctgcctgtagcaggtgtacaataaagactggttaaattgttccaatctaatgatacataattttgatactaccaagaaggaaggagaaatggactataatcgaactattcaaaactctattattctgccatgaagaagaaagaggaaactccctattttctaactcgaaatttctttaaacatattaattatgaaaaaataaaatgaaatccatactgaggagttctaaactgctcactaattcaaaaaatgtaatactctcaaagatatttctcactctctcttgctgtggccactgcactgcttttcattatttaactctagccacctgctatgattaaacaaagctgtcagctactagaatgtagaaatacaacctccactatgataaagtacctactgtgaataaccaggtcccatgagcttaagtgtttactagtactggtgaaattgaaagtcacagcacatcccaaatccaagcttactctgctaagaactgctcacctgtgtttccacctgggggatctagatcgtgaccgtgccatcctttgacacgtgagccactatccactttttacactgcaaagaaacacaggattagcaggtttgtagaaagaccctacaatttgatctaaaacatagcgaatgctgccaattgacttaaaccctttgtgcctcagcttcctcatctctaacatggaaatgataataatagcaccccttcttattggaatgttgtcaggataaaatgaattaaatcaggggtcagtaaactgtctgcaaagtgccaagtggtaactattttaggctttgcaggccatgtaaggtctctgtcacatctgtttcttcttttttttaaagcaactctttaaaaatgtaaaaatgtgacaacattgagatgtgtcgtaagtgtaaaatccacatcagatttcaaagagttcatataaaaaatgtaaaatattttattgatgtatttctaatattaactacatgttgaaatattttgaatatactaggttaaaggcactatgttggtcaaattaaaaaaataaaagtacaaaaactatttagctcaagtgggtcatacaaaaataggcccggcaagtcaaatgcattgtagtttaatgacccctaaattaaatcataaaaagagcttattggtgtctggcaacagcaactgctaaataagtattccaaaaagaggaaaaattacccagaattcctctatctgaatacaagcactactactttcctgtctttcaccatgtacagaaacacttcatataatcacagtttaaatgtttaggaatacgtgatggtatactctgctttttaaattgttagattctaagaattataatttcttcttttaaaatttcttttcttttgagacagggttttgctctttctcccaggctggagtgcagtggtgcgatcacagttcactgcagcctcaacttcccaggctccagcgatgctcgacctcccaggtagctgggaccacaagcgtgcacatccgcacctggctaatttttgtatttttggtagacacggggttttgccatgttgcccaggttggtctggatctcctgagttcaagcaatcctccgaccttggcctcccaaagtgctgggattacaggcgtgagctaccacatccggtcagaattacaatttctaatactcaactgctgcctaactttccaccagacaaatatgcccaaaatataattgaacattattagacatttagtttgcttctggttttttgctaaaacaaataatgtcaaataagtaaattttaaaaggcacttctaaacttgatttttcaaatattcttcagtctttaaaagaaactgatagcttcggaaactgaattttaaaaacacataagtaggtataatctcctatactagctattatttacaactcagtagtcctcctcagttctgatacgaatattaagtagttcctaacttagtggtcccaaacccctggtggcttctagaacgactgccatgggctcatgaattatcatatagctaccgtgcacagaccacagaataaataagtgtatgtctcatatattatgcacctcgattttgcaaatttctgaagacactatggtgaaactaaaatataaaggcttcttgtcactatgcagtttttccacccacagatacaaaaagtacaattattatgtagacatcagtttaaaaggcggtcctcatactcaaacatttgcaaactactgttatcctgaatttcaaaagaaagtaaaagcatatcaagtcaaagaacttgaactagatcactcattaaaggaagtacaatcaattcaattcatttagttatacacagcctctttctaaaaagattttgaggctaagaacaattagctcacaaagtattatgaaattaaaacactaaaggaaaaaatgtttacttagtaactaaaagtatcaaaatgtattcatttaacaaattttgctgtgtaccaattatttgccagacactgttctagggctacagcagtgaacaaaaaca

SEQ ID NO: 1563439 - DNA, 4001 bp, Homo sapiens
ttaattcaagatggattaaagacttaaacgttagacctaaaaccataaaaaccctagaagaaaacctaggcattaccattcaggacataggcgtgggcaaggacttcatgtctaaaacaccagaagcaatggcaacaaaagccaaaattgacaaatgggatctaattaagctcaagagcttctgcacagcaaaagaaactaccatcagagtgaacaggcaacctacaaaatgggagaaaatttttgcaacctactcagctgacaaagggctaatatccagattctacaatgaactcaaacaaatttacaagaaaaaaacaaacaaccccatcaaaaagtgggtgaaggacgtgaacagacacttctcaaaagaagacatttatgcagccaaaaaacacatgaaaaaatgctcatcatcactggccatcagagaaatgcaaatcaaaaccacaatgagataccatctcacaccagttagaatggcatcattaaaaagtcaggaaacaacaggtgctggagaggatgtggagaaataggaacacttttacactgttggtgggactgtaaactagttcaaccattgtggaagtcagtgtggcgattcctcagggatctagaactagaaataccatttgacccagccatcccattactgggtatatacccaaaggactataaatcatgctgctataaagacacatgcacacgtatgtttattgcggcactgttcacagtagcaaagacttggaaccaacccaaatgcccaacaatgatagactggattaagaaaatgtggcacatatacaccatggaatactatgcagccataaaaaatgatgagttcatgtcctttgtagggacatggatgaaattggaaatcatcattctcagtaaactatcgcaagaacaaaaaaccaaacaccgcatattctcactcataggtgggaattgaacaatgagaacacatggacaaaggaaggggaacatcacactctggggactgttgtggggtggggggaggggggagagatagctttaggagatatacctaatgctaaatgacgaattaatgggtgcagcacaccagcatggcacatgtatacatatgtaactaacctgcagattgtgcacatgtaccctaaaacctaaagtataataataataaaataaaaaaagaataaatatcaaaaatgtaaacataaggcataatgatgactacatgttctttctatgtcacataagagcattgcctaatagatctatcgaaggatcatttaatatctaaagaaattccctttgtctcacttactaattaccattaagatgataaaatggccttagaggacacactttacttctaattcaaggtaataattgtcattctacctggtatgttgctcacatagcaaagattatatatctcatcagaacaaaattttgtgcttcagattgacttttgtcatgtctttaataattagacaaataaaccaaaaaaggcaatttatccctctaaaaagccaaagttctttacaattatcttaccttcttttacactatattgtcactttgactaataggtagccaagctacaggcaatcattgttctcagtgcctatgaacccatcttaaccaagtgttagatcacaacagaatttagagtagagtgacctgagagtccataactctgcttgttgaagcaagaaggaatttaatgatacattaaggacattggagttaattgttttaagcaaagagccagcagaagtgattaatgagatgagtaacataataacatttatatttaggaagagattctgacataaatatgaagaaataattgacagcagataagacagtcagaaatttgtaatagtccaagatgagaggtctggaggactttaattgacacagtggcaatatgaataaagaaaggtaccaaaaaagtttatacatactattggaatattctgagtaagggcttcaaatgctggtgtttcaaactcaaatttggcctctggttgttcttcattcacaataccttcaacataataggcacgcacatcataccttgatttcaataaaattttacaagggtagcgtccagattggagaggaagaaattgcaaaggaagtggaacagatccatctgaagctatcaaaataattttaaaacagttcatttaaaatcatataaaacctaaaattcatcttggtaagcaatatttaatattattgtattaaattgtactgcataacctagaataggtttcactgggataacacaatacttctaaatctccagggcttaccatgcaagcttatttatcaattagagtatatatactgcactggtcagagaacagtgtgctcctcaaagtcactcaggactccatactgtgaaagataccaccatcttgcatttgtaccataagaaatgtctctgctctttggctgagaggtcaggggaaaaggaatggctggaagtttgctcaaggacttttcagttttcagctcaaaattaatataaacattacatttaactggccagacccagctatgtgactctacctaatagaaagggggctgagatagaaggaaatacatgcaatattagatgggctttactgtcagccacatttctatgacttagaggtgctctgtctcacagcaatcaaaataatttgcaacttggccagcagatagaaataattttttcatagctaataaccaagggaaccagaaaagtgcatgtgtaattaatacttctcataacaccccgttacaacatttaccttaagctactagctaattttacttcttacgctaggttgagctatctattctcattctttcctttcaggcaacaccactttttctctgaaggtcaccatttccttggcatccataaaatgagaaaatagttataaaaatttggcaaccctaaagtagaatgcagtataagaacataataaaagtttcatagttaatgccaaactatttaaatagtcaacaaacaacaaatgattttaaaaacatctgacgcctaattctgtacaaggaagttctctgaaaccaagaaaacaaatcaagcatatcaatcaattggccagacacatattatgacattaaatggctacaattttaattctcccaaagtgaacacttcaaatgtgaaaggtggcatgttgttttcaaatacaatgaaatgtatatgccaagatatgcaagaacatttatacgcaagaacattctatgcaagaacattaactaccctaaatcctttatcaaacaagagtttatgtgtgtgttataaattatacattatgtaatgttacatatcttatattaattgaatattatatagcatatattccatgtctatgttgctatatgtaatacaatatatataatgtataatgctacattgaatagtacatattaaaacatgctgataatggataatatttgaaatttgtattacatccaacaagttcaagacttcagctggtctgaggagaaaacagttactctcaaaggctctcagaatgttatttttgttccatcctattcaagcataaacctaattttagaacacatttttttcttggcaaaaaggactccaggcacattttatcatctgttgttaattgattacttttatcctgagagaggtatttgtgttgtggcaatctcaatagaacaaatcagcacagaaaattatttgttgttttaataacaggcataaacagaactcatttttttttcttggatgaagagaatgaaataaaaatatttagaatatgtaatttaaatagaattctattaatttacgtttattttatttatataagaattaaactgttcagacaattttaagaattgcagaatatctattgttttcatcaaagataaaaacctcttgctatttaatgctacacaatcattgcaacgcacaagttcaagtataaaatttctgtcaaaagctttatgttatacatttc

SEQ ID NO: 1563440 - DNA, 4001 bp, Homo sapiens
ttctactttgttcccagtgacttgtgtcctggactatggcaactggtctcacagcccctgccaacaccaccagtccgtcctgtccactttgcacgagctcttcccaaatcacaggtctcatgttgcccctccccagcctaacactctcagcatggcctgcagtagagattcctcaatcagtggtctttcaaaaatgcctttaaaaacgcttaatatgcctttaaaaaggcttaataggaaaagtccacaccaactccataaaatacctcacaaaagaagtttaacatttttgattggtatttctatctattatttctatttagtaatttggttgagtaagcaaagatgtctttgattaatacagattgcaaataaaatcattgttaattaatgccttttgtttggtcaccaaatcttaaaagcgtaagttaggtcctttgaggaagatggaggagaaagggcatatatatgacaaagggtctttggtactaaaaagactggaaaccactggtccacaagattaaggccccaattccttggcatggcaattaaagaccccctgccccatatatcccttcaacctcctcctctgtcatgcctccacatacaccccatgctctagctaagcacctctcacttcttcccacacctttgcttaagatgttacttccaccttaagcccttcacttcccgttacttttcagctcatcctttaaaaggctttgctcagaataccttctcctggggaagcccttccccagttcccatttggaattaatggagctcctggaggtcctttacactgccctgcatcagacaaagccttattattattatttataacatgacccccttgtcctgacctccaggaaggcaatgaccagagttatagttgctgtcaccccagtacctgctagagtttggctgtggtaaaggctcatggactgtgtgttgataggcttaaattccaagtgtgatgccattctttgctgagagccatgtgcattgcaatttactaagctccagttttcctctgatcaaggcaatctctcacaacagaaagctggctcagaaactttggagcaaaccgtcctggtttgaattccacagctgctacttattcggtggtgaccttgtgcaagttacttaatcttttttaaaaaataaattttattgtgtatatttaaagtatacaacacgatgttgtaagatacatatatatagtgaaatgggtcccatcatctcacagagttacccatttccccccactgaagtcactttatctggctatgtctcagcttaccacctcaataatgggggaacaccattaactctcacaatgatttaaaataggtgtcacattgtaggctttctataaattttatttcccgcccactgtgagaaatgaacttgataaactcaacagtcccaggctactccattcataggaaagaaaacttcaagctttcagttcaaaaggaaatgttggatttagcatttagggctggaatttggcttcacatcttgccctcttacccaccccaacttcagaccattaccactctgattaaatggatttgtttcagctcccacccatattacatcctgattccttttcaacaaattcctggacatcttcacaagaagggaacagaattttgtgattcagagttatttgattgatattctgaccttatttcttctttaaagaacttcttgcaaatagatgtcccgatgcaggcattgcatttatcaagaccgaggaaagtccttccaaaattgtagctggttctgacttggggcaccagagaagaaagggaagaagctggcaaggagaaagaacagctcagggctgagacccacagcagcagggccagccagccagggcggagggcggcagcctcaggccccagctggggctccatcttgggctctgggctccagctgcagcctctggctgtccactcgaggctgtacagaggcagggcttggccaaagaggaagctgtcagagggggctggcttctgggtgctgaccccatcccagcctcccaggtttctctttgaggatgctgaggagcttggggctaatgaggctggggaggaggtgaggaagtcagtggaggatgctgataacgctgtttccagagttactcttcctttgccgggggtggctgcttcaggctggggaggggctcgctggcagatttcgggaaggacaattgtcagggcttccctgtgtggtccttttgacaaacacaggatatcccggcagggcaggaaaggtccatgcaggatgtgtgtccaacctgcgttccacctgggagtttcaaaggatcctgaaagcctccaccctccactgttttaattccaggtttatctgtccctatggattacacgtgcaccccaatttttgacccctctgtgctaggtcatttgtcctgccccttaatcagccctccttcccccacttttaccatatttgcctgtgaaataactagaggttagcttgcttgccattaactggcacatttagcactgatttgaaagctttttgctgcttagggaagagaaaacctcaggttagtccatcttctcttgctggtctgagaacaagagaccagaaagaacccggtggcctctgtggcatgatgaggggagcaccagaaagagccctctgacagcacacagctgtgtctatccctctcccacagacctgaaagcttctcttcctttaccaacttgcttcacttctcggggtggcttggccggatttggtaggatttaactgccccaggattgccttcctcaggataccaagataaggtccgcagcatggagtagatggaagtgctaatttgggagtagagagaacctctgagaaccaaatcagggaagtcaggctgcctcacattctgtgagagggtggaggtggggagcggggcacggtttgaaaatatgagaaagtgcataggaagatggggctgggggtgaggaaaagggaggtaagagggagtggggattgcctctggacaattgacaagttttgctaaagattggtgggaagagcaggtaaaggcaattttctgatgatgaagcacgtgcttattagcatttgtatagcttcctcagtaaaatgtctggtcatgtttgctttttattggtgagttttgacgcttgtttatatattctagatccgagtcctctgttggatatgtggcttgcaaatattttctccccagggctaacttgtcttttattcttttaacagagtcttctgcagagtgaaagttttgattttgaagtccaatttgttaattttttctttttgaatcatgcttttggtgtcaggtgtgataaaagaaaaacttaagcacatttaaattttaaagagtttatttgaatattcagcgattcatgaatcagggcagtatcagactgcaaacattctgctgggaggggcaagaaaggaaacttttatagtgtttgcagaagcaggacaaagaaaacaatttttattggttagagtggaaagtccctagttagagattaattggtgatttttttgattggtacaatttctagtttaaatttactatttacattaggctttggtttgttcacacaggaatttaaagtgccagagccacctcagtctaatggccttccaattagaattttaaaacataattcatcctttttgatcagcctctcatttaagagatattgactaaaacttgggcataagctccactctctgtgaccatcatggctaagttgtccttgtctcagtgtgaaactcataagtcacaacatcaagctcattgaggaaagattccttttgttgttcatctcatttttgttgctctaattacagtgagatcatctggcataccgttgatgactgtgaacacacatttaagaccctcaagtgaatgtagttcaccagggagattatgatgactaccaggaggataatactgaaagactgcagtatgttcc

SEQ ID NO: 1563441 - DNA, 4001 bp, Homo sapiens
ggtgtggtgggtttaccggctcgtgatacccaaaagtctggggacccctgatacagttcaattttttaagacagggtcttgctctgtcacccaggctggaatgcagtggtgtgatcacggctcactgcagcctcgacttcccaggctccagtgatcctctcacctcagcctcctgagtagctgggactacaggcatgcaccaccacacccagctaatttttgtatttttttgtagagacggggttttgccatgttatccagggtggtcttgaactcctgagctcaagccatcctcccaccttggcctcccaaagtgctgggattacaggcatgagccaccgcgcccggccccaattcctttcatttttttttttttttttttttttttttttttttttttttttttttgagacggagtctcgttctgtcgcccaggcgggagtgcagtggcgcgatctccgctcactgcaagctccgcctcccgggttcacgccattctcctgcctcagcctcccgagtagctgggactacaggcgcccgccactgcgcccggctaatttttttgtatttttagtagagacggggtttcaccgtggtctcgatctcctgacctcatgatccgcccgcctcggcctcccaaagtgctgggattacaggcgtgagccactgcgcccggccgtcctttcatttttgagattggggagcacaagctggcccagtgtcacaccacggcagctgatccaggactcagatcatctgcttcccaggcactgctcctttccagtgcccaccctgtgcctgctgataactactggcatgtagactgactgctaaagtcaatttgtgttaggaagccacttctggctgtccctctccgtcccttactgggcaaaaaaatttcctactcgatctacttagtaagtgacattgccaagatctgaagacagatccggctgcctaccccattcccagctacccaaagtgcctttaactgggcacttaaggtgctattttagccctaacttcccttggcttactctgtcatccttacggcatcctatagccaaaaaagagctgatgagctgttcagcgagccttaccctcaaacaggccacacaagagtctccctccctccctgcctgtgctcatgatgctcgctctgcatcttgccccagtatctcttgtagaactctttcctgtaactttccaagcaggggtaacaaactcaaatgccctcaggaagcagacgggtagaagaaagcttctacttcactaagctgggttgggtcccgcataccacccctgaaccgcctagacccttgatcaatctctctctctgcatctgtttatgaggccccggcgaccacaagaccagatagccaccccgagtgctgggtgacccgccgcttcctccttccgtccccgcctcaggcgcttaccttggccacctcccaggcgtccacgggccagcggcccggccggcagtttccccagtgcacatctccatttctgttgacatgatgtctcaaaatctcccttttccattcagcgcacacctgacactgaggctgaaactacagggggcggcggtgaggaggggcccaggagggagggacgtcgcggtgggccccgcatcgcggagggaacaggacacttgcgctctgggtctgggacaggaacggggatgaggaggggtggggtgggggcggtggtcaaggccccgagccaggtgctcacctggcgggcgcgagggctgcaccgtgagccgccgcggcagacggcgcggggccccaggccgggggctgcggcgagtaggccgcggtggaaggagagcacctcgcggccgacgaaaccctgcaggcagctgcgcagcagtaacaggcagtggcccgccttcacccagttcttgtactcggcgcagttgaggcgcgccgctagctccgacagcaccatgtctcccacttggaaccaggaggttgcggggcgtggcggacggcagtgcgcaggcgcggagcctgggaagtacccgaggcagcggcgcctgcgccggcggcagcgacgcctgcgcctgcgcggcgcggtgccaccgatcccggggcggggcatcttgacttccggggcacgtcggctccaccccacttgggtgacgtctgacgtctgacgtctaacaactttggtgcttggggaagcagttaactatttgaaacccttaggccctcttcgtcccccaaacagagaccctgtcagcatccgattcgactccctctcctaatgtagggcacttctgttttaacttttttttattgtccagatgtacaaggtgctcagggcacattgcttgaatcgtgtatgttctttgcattatacaattctagagttactggttcctaagcccacagaccagctgtagcaaattgaggtattagtgaaacgtgaccgctggctgcctgcggtgtgccaagctaacccaaaactcaaaatcccccgccactggaccacccagaagggggcgtttgcctgtttagggcaacacatcacttggattctagaaggctgcacacctgagccagataagggcatcctgaagcacctagcaaaggttagacgataattatctagtattcttgattatatgataattagtgctccttgcacatggaagtctgatttaagttccaaagaagtgccacaaaggtcagaaggcactgggattgtcaactccaagtgacaagtcaggtcagttttagttgtttttaatgagctttctgagcttggaaaacatgtcaaaattgtgtgtagttaaaagcctctgaggaaagagtctaaacattaaaccttcccgactgtggttcacagcaaaaatgtccagtgtttaggagcactagctcagactcaaactgccccttcttagcagtttgatcttaagcaaccttaatttgatctcaggcaaattacatttctctgggcctccatttactcatttttaagaagaggatatcaataacctaccacattgggttgttgtgaggattaaatacacattgaaatattaagaaaatgcctagcacacagtaagctctcagtaaatacttgctattattttatattgacctaaatatgccctttcatcaatcagttatattcttgggcaaggtattttaacaaatcactggccacttggaagtggaggcaacttgcagaaaattgtgagcataccatggagttcctggagttgtgcagcacagtgctggctggcctctgctaactttgtcttaataacctcaatgctaaatccatcctaagtaaatttaaatcacatccttagacacactgtccattctcaaaccgaatgaaaaaaaaattccacaagaaacaatgaaatacacattaacattttccctctatgtcccttgaatgtaagttctcttaaaattttctgtatactgattttatatcaagaacacttggatgataaataaacattaaggtaaaatgtaataggcacttcttttggggggaaaaactatgaaaggaacaactttttatattgaaattgcatcagaatccagggtagcaaagttataacttcttgaagttatcaaattaaccacagtccaaagaatggctgttagtatcctttggctgaacagattactgtgttaattagaacacagttattagtggttcttaaattcaaagtcatataaattttagtttatgcttgcacttaactcactcagttaattttcaaacataaggttcgactcctgttattagcgacttgacacgttctgctgaagctctcacttttcttctaattctgaaagtacttttatacattctgaaatggcatttcagcagatggaaaaatgaaggtggcaaatcaggaccaatttcttatttcaaggttaaattaatactaaaccagactattaatgaaaacatcttcatcaaaattaactagagagttggtagttctctgaaactttgtataaatttta

SEQ ID NO: 1563442 - DNA, 4001 bp, Homo sapiens
gataagggagatgcttctacaagctaatgagtgccaaagattgccggccagccgcctgcagctaagagaaagggacagaccagattgtctttcacagcccacagaacaaacgaacctggccaccactttgatttcagacttccatcctccagaactgcgagacaatgattgtctgttctttaagccagcccttttatggtcctttgtttcagccatcttggcaaactgctgttcccaacacatctgcacaggctagggcacgagtttgccatttgacagcacatcaagcccattctttccacctgacaatcttcatctaccttgtttttcactgcctgggtgatatcccattgttggtcgtctcataatttgcctgaccattcctccactgatggagagttacaagttgcttcccacttttgccactagaaatgacattacctctaacactcgctgtgtgaagacatgctgaaggaaatgcctcggccgcctggcacgcccatctaagatgctgatatctgccagcaaatgactttccacaaagactcacccgtgtaccctccaccaacccatccatggtgccatttcctcacacacttgtggcccctgagcatgattattcttctgatgagtgaccaaagataaccaggttccttggttctggattacttctgatggaggctgaatgtcccccacagggcctggccacttccatcgggataaatggctacagtgaatgtttgcctcttttctgccgcccagtttcttagccaacccttttctcgtcatcaccacaaaatcacaacagacgccaactgtgtgtatgtggaatccctagtaggaactgatgtaactgaaaaggcaagaagggggttgagtcccctcctacctggtgctgcagagagtacctgctttacggccagaggaggaaacactcttccacttagcttctttacctgcacaacaaggaagataaagaggaaaggtcattaagtgcaagacagcaaagctggttaatggccctaagaaggtcatgtacttagcaggcattggaaaccaagaagagctgggaggcctggtcttatcagtaacacacatgtgcacatcacagtttggttctgctaatcacagcagtgggaccctccgcacctgtctgggtcaaggaccacagggtgcaccagcccgcagggcagaaaatcatttcaccatgttgagcagcattcttgcagccaagcatgctccattcgaagggagaaaaatgacacttcccctcccattgtcacggggcgagtgtttgggactctaaatcccattgtcctcagcttaattctgggtaggtcacgctgagcacggcgccacaggccacagagctgtgcaccgcccggcctcaggtccaggcgagctcacagcagaagggccaacgggaggcagggaagaccggactgaggtggggccgctgtgtgtggagcagtacacgggctttctactcgcagacgcacgtcgcgggtacacgcgcttagaaggagcggagccgagaccctgccgacagcaggggacaggaaaaggcgcctcggtcgcgccccgcacgagttcccagccccacatccagggaaaccccagccctcaggtaccgtccgcaagaaggctgagcacacaggctcccgcagcatgggccctggcacctgtcagccccggcaggtctcacggcctccggaaccatggaccctgcgagtcgtgggtgtctagggccgactccggcttttcgccacaggaatgaacagtcctctgcttccccgagacccagcgaggccaccggagccaggacgatgggctcccaagcaaggagacgtgggccgctgtgagaagagggagcgcctggctagtgtccaggctgcaaggtcgttgccgctaactccgggaaaccagtggccagtgacaggtgttagcggtctataactcttccgctttcatacagctcccgtcatccctttcacgaagaacgtacgtgggcgcgcaatcacgcatgtatgcacaccacgcacgtacgcgggaggcacgtactcagccatgcatatagacagcaaacattatgaatctcgcattctcgaagacacgcactgacgacatcacgcacgtacgcacgccctggctgctaggagacgctattctctttacctggccctgatgcgcgccagccaaccaggccaaggccaggggacctcgagaccggcagcctcgacgaagaaccggaaggaggaaaaggaacgggagggaggaagagtaagtggaagggtgggacgaggacaccaggcaggagttttgggcccagagctgctataccagcagggaggagctgggagaaaccgctggggagggggtggaggcggggctgagaggaggagggcggagctgggggaggggccgagcgggactgacagaaacaattgggggctgggttgagggcggggctgagataagaggcggggtgtggggcagggccgggcggggctgagagaaaccattgtgggcagggccgtgggagagctgagcgaggagaagctgcaggaagagctcgcggactcttgagaatcagcagggggaggcaggtgtccgctgagagaaggagggagggggagaaagaaatcactgggaggggctgggggcggggtttttaaagcagctgcgtgagaagtagggcggggctgggagaggcggggctctgggggggctgagaatgctggggaaggtttgggggcggggctttggaggcagccacaggagaagcaggtcggggctgcgggcggggctcggggtggggcggggctgagagaaactgctggggagggggccgagggcggggctttgggagcagccgcgggagaagcggggcggggcagggaggggaggggcggggcagggaggggcggggctgagagaaactgctggctgaggtcggggctttggaagcagccccgcgaagagcagggcggggcaatgggagaactgagcgaggagcagctgcgggaggacccctcggactcctgagaaccagcttaggggagcgggggcttggggaggtgtagggtggaatcacgagaaagctctgtgggagggcctggtgcacagctcagctgcagcgtggagctgagggaaagccgggcgttcctggaggaggagcagggcggggctgtggcaaagaggtgtgggagcagatggggcggggctgcgggaaattgctggagaagggggagccaagctggagtaaggctggcgggtgagaatggtgggggaggagctagtgcagagctggaggaaagagctgaaaggtgctggggtgggcagaggggtaggagaagcgggacggggctagaggaggcggagctgggactggagatgcagggtgagcagggtggggctgcagcaggaactgggttagagcttctggaggagccgcctgcaagaggagggcgtagttgtgggaaagagctgtgggtggaactggttaagtgctgggaggaggaagagctgggggcggaacagctggggcggagctgccggaggaggagctgggggtggagatgctggtgaaatgaagcagagccgaactgggggtggagctgtgggtggagctgggggagggagctgaggcccttctgtgatgcacccttaggcaagagtcaaaacttgcccgcagcgacctaactgcacctccagtgtctacccccatagggcacggaagcagcaagaagggcgggaacacttgactggggtctatgcagctctaggctgagtcttgcagggctgagccccccaggcctgctctcctgtgtcctagccgctctgtcagtgcctgccagtggggtccggaggaaccgtctctttaacgtctcttttgcaggtgatgagaaacatccccactcttaatgtcttgcctcctccgacctaagtcgcccagcacacagcccaacttccctggcaaacttgcttttcaaactctcttc

SEQ ID NO: 1563443 - DNA, 4001 bp, Homo sapiens
cagaggagagggccttgtcctcatgaagccacacaagtaagaggcaggtccaagccagacttctgagggcagcggttgcagattggaagggcaccagccactgcctgggaagctacaggtgatgcctgagcaggtcaccaggggacagatgctgatgtcgggcctcagtcacctagaggttaggggactttcccagggtgctgtgagtggtggggctggggcaggttcatgaagccaggcgggcagcccaactctagaggccacctgacccattcggcgggctgggctgcttttcatggtctctgccacacatgtgcactcacacatgtatgtgcaaatacacacagccaaacaccacaaacaccatgtgcacatggccctgaccaggcttctcactgagatcagaaacaggaactgaggcccagagtggagaaatgatttaccagaactcgtggaagccagccataccaacccccagcccaaggtccttgccgcccctttgaaggtgtgttgccaaaggaaactgtgttatacacgccaatcagttcagatgacaagagaagcccccaaattcccaagcaagatcttgggcagcagccctaggcgttgtctgcgcatttggtacattgtcacttacccgctatcactcctcgaccaaacttttcccctttcctgagcaaggcctgaatctgagcaggagtcatcccgagtctctccaccagcagctcccgccaggcatcgccttcccagtccctgtgagcaatgtggacggcgatggtacagttccgctggctgctcagcaggggacgccagcgcgtctccacagtcttgattccatttaagacaaagccagcataaggctgccggaaggagaggcagccaaacttcatcttcgcaagcgccccgggcctcccgtagcctgcggaagcacagaagcgcatcacacgccagccctccaagctcatgggcagtggcctgaccttccccccgtgtctctcaggtggcctaaatcgcactgaccttgatggtctcctgcttccgtctgtcactgatgtccagcaccacagcaggcccaagggaaggggctgggattcggctgactcaggtccatcccatggagtctttggggcggtccggagtagggcggggacagctagaggaaggcacaggcaggataccatgtggtcagtgctatgacagaggtcaccgagccctagggcaacacagaggacagagggcccccttggcctagccagagtggagagtccgggctggtgttagccctcttccagcacagagggagagtcccaccctctgcttctcttccctttcccctgctgtgccctgccaatactctcagtgccctggccctgccgccaccaaggcactgaccttcccagctcctactccagggctgctgagcccacatcgttgatatccaatctcagctctgtcctcaggatgcaccgtgacctcagatggccctcagtcagacatctcctctccacccctctgggtgccaccttcctcaagccccttcccctaccactgctctccactgtcagcagatgcccctgtcccaatctgagctgagaaaagaagaatgataatcagaacaactagcaaccccacacacatgccttccacgtgccagcctctgggatggcatgatcctcggatcatcaaattgaatcttcaagtaacccagcagggtcagtggtactgtgaggcccactctatggctgaggagaatgaggcaccagcccacagtcacacgggctctgacttcccacaactcttgcccagcctcctgcgtgtctggcttgggagagggtcccctcctcttgcatggaggacggccctgtgccttggaaggaaccctgggctcgaaaccagaacctcagcccagtcatagactcttgagatgcctcagtttccacatggctgtgaggaagggagataaggcaccaagagcacccagcccagtacgtggcacctaatagaacagtcagaaatagtggctgccctcacccctcaggcccgtggccccgcccccggccctgaactccacccttgagctgcccctactcctctctctgtccttcctttcaacacataaacgcaacctctagtacgctctatgattttaagaaaatatacccaccctcatgagacaaagccctgatagggccaaagctgcctggtattcactcctttcccagtctgcactgcagccttctgagctccagatctcctgcttttctcccgcctctggggtgagctgcctcagctgagccggttgcctgctgtgctctggaccctgctcctctggctcactccgggccctgggtgccaccagccaccatctatgctcgctcagcatccctactctgagcacacgcgcgcctcccactctgcctcccttctctacaaccctgaacagccgagacctcagaagagctgtctacatgcgcagtctctacttcctctctgaaccttctgcccccacccccacctttctccctttattccccaccccccccaccacccactccactgactgacctatccccacaagcacccatggccggcctcatgccagtcctgtcttcatcttagtccatgctcagcagccccagcatggctgggcacactccttccctccttctgggacccccacgttgctcaccgtcctgctctgaatcccgtggtgcaggccaccccccttcagactcagccttaggtggacaggcccgtacatactcaggaccccaaccatcaccaccaagtccacctcccttccacctctgtgagtggcatcaccagctacagcgttcctgccccagacctagctgctctctgccctgcctttctttcccacatctgcggcccacatcccgtggcactgtgtccaaaaccgacattgaatctgatccctttccataatctctatggccacaatcccaatccaatcccctaaaaccccctgccttctgaagaagtctcctgatagcacccccacccccccccagcacttgtcctctgcactcttgtgaccacactgccatcggaatgatcttggtacagggacaatgagattatgtcactcctctactgaaacttttcaagggctccctgccccaactagcacagaatccacacttcctctcagggcactcaaggtccctcctgatctggtttcccaccccagccacgtcctctcctctcccctttattcaccaccctgaagccacacaggccttccatcccctgagggaacatgccaagcttgtttctacctcagagcctttgtcagttgtgatgggttgcattgtgtcctcttaaaatgcgtatgttgaagtcctaaaccccagcacctcaaaatgtggccttatatataaaaacagagtcattacagaggcaatcaagtgagactgaagccatcagggcggacccgcatccaatgtggctggcgtccttatgaaaagggggatttgagagacagtcacgcacacagggagaacaccatgagaagataaacgcagagataagggagatgcttctacaagctaatgagtgccaaagattgccggccagccgcctgcagctaagagaaagggacagaccagattgtctttcacagcccacagaacaaacgaacctggccaccactttgatttcagacttccatcctccagaactgcgagacaatgattgtctgttctttaagccagcccttttatggtcctttgtttcagccatcttggcaaactgctgttcccaacacatctgcacaggctagggcacgagtttgccatttgacagcacatcaagcccattctttccacctgacaatcttcatctaccttgtttttcactgcctgggtgatatcccattgttggtcgtctcataatttgcctgaccattcctccactgatggagagttacaagttgcttcccacttttgccactagaaatgacattacctctaacactcgct

SEQ ID NO: 1563444 - DNA, 4001 bp, Homo sapiens
acagggagaacaccatgagaagataaacgcagagataagggagatgcttctacaagctaatgagtgccaaagattgccggccagccgcctgcagctaagagaaagggacagaccagattgtctttcacagcccacagaacaaacgaacctggccaccactttgatttcagacttccatcctccagaactgcgagacaatgattgtctgttctttaagccagcccctttatggtcctttgtttcagccatcttggcaaactgctgttcccaacacatctgcacaggctagggcacgagtttgccatttgacagcacatcaagcccattctttccacctgacaatcttcatctaccttgtttttcactgcctgggtgatatcccattgttggtcgtctcataatttgcctgaccattcctccactgatggagagttacaagttgcttcccacttttgccactagaaatgacattacttctaacactcgctgtgtgaagacatgctgaaggaaatgcctcggccgcctggcacgcccatctaagatgctgatatctgccagcaaatgactttccacaaagactcacccgtgtaccctccaccaacccatccatggtgccatttcctcacacacttgtggcccctgagcatgattattcttctgatgagtgaccaaagataaccaggttccttggttctggattacttctgacggaggctgaatgtcccccacagggcctggccacttccatcgggataaatggctacagtgaatgtttgcctcttttctgccgcccagtttcttagccaacccttttctcgtcatcaccacaaaatcacaacaactgtgtgtgtgtggaatccctagtaggaactgatgtaactgaaaaggcaagaagggggttgagtcccctcctacctggtgctgcagagagtacctgctttacggccagaggaggaaacactcttccacttggtttctttacctgcacaacaaggaagataaagaggaaaggtcattaaatgcaagtcagcaaagctggttaatggccctaggaaggtcttctactcagcaggcattggaaaccaagagctgggagggccggtcctaagagtaacacatgtgcacctcactcacggtttggttctgctaatcagagcggtgggaccctccacatctgtctgggtcacagggtgcaccagtccgcagagcagaaaatcatttcagcaagttgagtcacattcctacagctgagcacgctccatccgaggggagaaaaatcacacttcccctcccattgtcatcggacgagggtttggggggcctaaatcccattgtccactgcttaattctggttaggtcatgctgagcacggggccacaggccacagagctatgcaccgcccggcctggggtccaggcgagcttacagcacaggggccaagcgggaggcagggaagaccgggccgagatggggccgctgtgtgtggagcagcacttgcagacgcaggtcgcgggtacacgcgcttagaaggaggggggccgagaccatggggagagcaagggacaccaaagggcgcttcgggcgcgccccgcacgggttctctgcccgaaacccaggggaaagaaaccccagcccgcaagtaccgtctgcaagagggccgagcacacgggctccggcatcaggggccctggtacctttcagccgcggccggtctcacggcctctggaccctgagagtcgtgggcgttcagggccgactctggcttttggcctcagagtacagtcctccgcctcctcgcgacccagcgaggccaccggagccagcgaggagacgtgggccgcggtgagaagagagagcacccggctcgtgtcagggctgtaaggtagctgccgcttactcccggaaaccggtggccagtgacagatgctagcggtccataacttcggctttcatgcagctcccgtcgtccctttcatgaggaacgtacgtgtgcgcgtaatcacgcacgtacgtacaccacgcacgtacgcaggaggcccgtattcagccacgcctatacaccgccaaatcgctaggaagccacgtattcacgaagccacgcagtgacgtcgccacgcacgtacgcacgcacttgccacaaggagacgctgttcagtttaccggatcctgtcccgcgccagccaaccaggacaaggccggggagctcgagacaggcagcctagaccaagaaccggaaggaggaaaaggaaccggagggaggaagaggaggggcgggacgagaccaccaggcaggatttttaagcccagagctgcgagaccagcaggaaggaactgggagaaaccaatggggaggggatgggggcggggctgagaggaggagggcggagctgggggaggggaagggcgggagtgaggaaaccgctggggcggggttgagagtggggcggggacttgaggggatggggcggggacttgggatggggcggggactcgagggggtggggcggggctgagagaaaccattgggggcggggctatgggcgatctgggcgaggagaggctgcaggaggagctcgcggactcctgagaaccagcgcggggagggagggggctggtgagaggaggaaggtggggctgaaagaaaccagtggggaggggttgggggcggggctttggaagctggtgctggagaagcagggcagggctgggggaggagtggggcggggcggggttcggggggggctggggctcggggaggggtggggcggggctgagggaaccgccggggaggggctcgggggcggggctttgaaaacagcctttggagaagcggggctgggggggcggggcagggccgaggggaacctctggggtggggctggggggtggggtttgcacgcagccacaggagaaacagggcggggctcagaaaagggttggatcgggctgagagagaccgctgaggggggtgctgggggcggggctttggaagcacccgcgggagaaacagggaggagatggggagaggcggggctcggcgcggggcggggcttcggaggcagccgcgggagaagcaggggggggttcggggcagggcgggtctgagcgaagccattggggagcggctgggggcggggccttttaaccagccgcaggaggagccgggtggggctggggcggggcggagctgagagaaaccgctgaggatgggctgggggcggggccttggaagcaggcgttggaggggcggggtagggccgggccgagagaaaccactggggagggtctggggtcggggctttgccatcagtggtgtgaggagcaggccggggcagtgggcaattgagcgaggaacagctgcgggaggactccgcggactcctgagaaccagcttaggggagcggcggcttggggaggtgtagggtggaatcacgagaaagctctgtgggagggcctggtgcacagctcagctgcagggtggagctgagggaaagccgggcgttcctggaggaggagcagggcgaggctgtggcaaagcgctgtgggagcagatggggcggggctgcgggaaagagctggagaaggaggagccaagctgcaccaaggctggcgggtgagaattgcgggggaggagctagtgcagagctggaggaaagagctgaaaggttgttggggtgggcagaggggtaggagaagcgagacggggctagaggaggcggagctgggagcggtgatgaaggggtagcagggcggggcagtgggaaagagctgtgggaggaggagctgggggtaagaagctggggctgtggctgcagcggggactgggtcagagcttctggaggagccgcctgcaagaggagggcgtagttgtgggaaagagctgtgggcggaaatggttaagtgccgggtggagcaggggctggcgtcggaatagctggggcggagctgcgggaggaggagctggggggcggaactgtgggaggaacagctggggcggagct

SEQ ID NO: 1563445 - DNA, 4001 bp, Homo sapiens
gtcgctactgctgaattctccacgacgcacagacaggcgaggcagtcctggcctgtgggtgggaagctaaaacagaaacttctgagtcgggctggcgatgggggccggcggtgagtacacgtggggaggggttgtggtaaggtggagactcctgagcctaatctcattagcactttctccctcagtcagcctcaggccaggaggcagaggccagccagggaaaacactggggatactgagatagcccggggccgcctgccaggtgggttgggcaacagctagggaaggaggaatcaggaagttgatgagcctagatgccccagctttgcagcccacactttaaggcatcacccgatccaaaccagctgccagccctgccttccaccccagctcctctctgcgggcggaggcaggacccctgcagagcgtccagaggcatggccatcacacaagaagtgctccctttaacgtgtgcccttatgaggaagacacccatcgggcattctagtgtccctgggctcccgatgacaaccctcgagcaagggacagaggaggcatgggtaaacaggtgtgtgctggaagagaggaggtgtggggggaggagggtaaagagggagaggagggcgagaagggcctactcacttgggctcttgggacctcatctctatttgggtcattatcttctctggccgcagcctgggactccctggtcttcctccctgctggtttcttcccagggctgctgtgcttaggcttttggggtttcttggacatcccctgtggccgcacaccagagaatggcgggaaggtggccggctccgggggagcggctgagagtctctctccgcaggcaggaaagcctctccccagggccagttgagaggcaccccctagggacttcttccccccggccatcttcctcctcgaaaggccctggggcagggcccctgcagcagcagctcctgagcagctgggcctgacctccacctttccccaggccctgctctgcattttcttctggggagagtcctccagctctcccacagccggcctctctgcgactggagtgagtccgcggggagcagaggtcaggaaacggcccggcacaggcaggtaactctccttgcagtggaagcttgcctgtctggatgtgtctgctcgcttcttggggctgccgggcttggcctggcttccttcgttgcggcaaatgcctaccttcatcagtggtaagtcgctgctctcatctgcggaatcagagtcgtgggtaggcagcctggtggggcctttcgcagagggctgctggggatccacgcggaggctccatctgctcttcgagcccctttccgggttcttccaggcccgcactggcccaggaccgcagaggtggagacggccggcagaggcctgctgccattttccagggctgtggcccagcacgtctctcccactgggaccgacctccgcatctgcccaattctcagccgacccttcggcagcggcaccttctgggaacgggtgtccctggacgctgggcggcggcacgatggcggctggttcgtcagccaggtagaatgagtagtccacaacgtccccttggtcatccaccggggtgcctggccggccttcccggccccagagcaccacccttccttgctctatcaattcgctctcagactcgaagctgaagccctctggatctgtgaacccgctctcgctcttgccatcgccgctgcccggcacccccaaatcgaggccgtggctgtgggcccctggggctccggggctggccgtgcgggagccagcctttttgccaccctccaggtcgaaaccggccccacaaacggacaccttgtcgggggagctcatggcgccagtccgggcagcctgggctgcggggagacggtcgtcctggtaacggcgggagcggagagctgagcccagccaagcccagctgagcgggccacgcgacagaaacagtgaggccttcgggacaccaccgccctcgccccaggcggaagtaccagatgtccgggacagcgagtggcttcctcgcgcccttgacgccggcgccgagccttctcattggtccccgtctgccaaccagcacgccctttgtggggcgaggtgcctgagctttaaccaatcgggacacaggctcttggtttgcctccatgcccgtcatttgactgggtggctgcgctctggtcgggtcttggggccagggggcaccgtagctctcgatcacctctttcttcctgtccttctgcctctggccgggcacctactttccaaggagagccacgtctctgagccccagtgtcccatctgtaaggtggggattaaggggagaccttcccccagctcatcagcttgggagagtaaatgtcgtgatgcacgcaaagcacccggtgcacagaggaggtctcattggaaagtaggttcccagccagaggcagcaggagagcaagaaggaggtggatcgagagctccagtgccccctggccgcaagaccagaccagagcacagccacccagtcaaatgacgggtgtcggggcaaaccaagagcctgtgttccgattggttaaagcccagaggcctctgccaacaaagggcgcgctggttggtagagggggaccaatgagaagtcgcggcactggcgtcaagtgcacgcgcagaagccacgcgctgtcggggacatctggtacttccacccggggtgagggcagcggtgtcccgaaggcctcactgttcctgtcgcgtggcccgctccgccgggcttggcaggactcggctctccccttctgccgttaccaggacgaccgtctccccgcagcccaggctgcccagactggcgccatgagctcccccgacaaggtagccgtttgtggggccagtttcggcctggagggtggcaagcaggctggctcccgcatggccagccccggagccccacggggccagggccacggcctcgatttgggggcgccaggcagccgcgagggcgagagcaggttcacagatcccgaggtcttcagcttcgagtctgagagcgaattgatagagcagggaaaggtggtgctctggggccgggaaggccggcctggcaccccagtcgacgaccaaggggacgatgtggactactcgtcctccctggctgacgaaccagccaccatcgtgccaccggcccagcgtccaagggcgcccctccccagaaggtgccgctgccgaagggtcggctgacaactgggcggacctggaggtcggtcccagtgggagaggcgtgctgggccccagccctggagaatggcggcaggcctccgccggcccctgggagcccagggttgccctcgggtaatgctttgtgtggctcctagaaatagaagtccacgttagatggtgggatccgtgtccaggttaaactgatttctgtgtccccccgccccgccccgtcaccaccttctgcatcccacggagagagggtgcctcttttacattgagggtttcatgccaacccacctcaccactgggctgcaggctatgggggctactaagggctgggggagacagggaagacgaggagagaggaggccagaattgactaaccatttatcttcctccggtgtctgctggtctagtgcatccggctgcagagggaaattgaggaccttacacagcagctaggtatgatggagccctggctggggcagggatggacagcggtgtctttctgctggtgcggggggcgggggtgggctgtaggtacaggcggcgtcactggaactgactttcctttggggaagagaaccaaggaaagcctggccctggagccttctgtgcctttccagctaggggtgtgcacagacagcaatgtgtcgtctgaactccgtgtacacttagtccacgagtcccagaactctccttctcttaggagggttagagataccgcatgtgttttccctttaactgctgcctggtatggcttgtacggtgtttgcttgctg

SEQ ID NO: 1563446 - DNA, 4001 bp, Homo sapiens
ggtcgctactgctgaattctccacgacgcacagacaggcgaggcagtcctggcctgtgggtgggaagctaaaacagaaacttctgagtcgggctggcgatgggggccggcggtgagtacacgtggggaggggttgtggtaaggtggagactcctgagcctaatctcattagcactttctccctcagtcagcctcaggccaggaggcagaggccagccagggaaaacactggggatactgagatagcccggggccgcctgccaggtgggttgggcaacagctagggaaggaggaatcaggaagttgatgagcctagatgccccagctttgcagcccacactttaaggcatcacccgatccaaaccagctgccagccctgccttccaccccagctcctctctgcgggcggaggcaggacccctgcagagcgtccagaggcatggccatcacacaagaagtgctccctttaacgtgtgcccttatgaggaagacacccatcgggcattctagtgtccctgggctcccgatgacaaccctcgagcaagggacagaggaggcatgggtaaacaggtgtgtgctggaagagaggaggtgtggggggaggagggtaaagagggagaggagggcgagaagggcctactcacttgggctcttgggacctcatctctatttgggtcattatcttctctggccgcagcctgggactccctggtcttcctccctgctggtttcttcccagggctgctgtgcttaggcttttggggtttcttggacatcccctgtggccgcacaccagagaatggcgggaaggtggccggctccgggggagcggctgagagtctctctccgcaggcaggaaagcctctccccagggccagttgagaggcaccccctagggacttcttccccccggccatcttcctcctcgaaaggccctggggcagggcccctgcagcagcagctcctgagcagctgggcctgacctccacctttccccaggccctgctctgcattttcttctggggagagtcctccagctctcccacagccggcctctctgcgactggagtgagtccgcggggagcagaggtcaggaaacggcccggcacaggcaggtaactctccttgcagtggaagcttgcctgtctggatgtgtctgctcgcttcttggggctgccgggcttggcctggcttccttcgttgcggcaaatgcctaccttcatcagtggtaagtcgctgctctcatctgcggaatcagagtcgtgggtaggcagcctggtggggcctttcgcagagggctgctggggatccacgcggaggctccatctgctcttcgagcccctttccgggttcttccaggcccgcactggcccaggaccgcagaggtggagacggccggcagaggcctgctgccattttccagggctgtggcccagcacgtctctcccactgggaccgacctccgcatctgcccaattctcagccgacccttcggcagcggcaccttctgggaacgggtgtccctggacgctgggcggcggcacgatggcggctggttcgtcagccaggtagaatgagtagtccacaacgtccccttggtcatccaccggggtgcctggccggccttcccggccccagagcaccacccttccttgctctatcaattcgctctcagactcgaagctgaagccctctggatctgtgaacccgctctcgctcttgccatcgccgctgcccggcacccccaaatcgaggccgtggctgtgggcccctggggctccggggctggccgtgcgggagccagcctttttgccaccctccaggtcgaaaccggccccacaaacggacaccttgtcgggggagctcatggcgccagtccgggcagcctgggctgcggggagacggtcgtcctggtaacggcgggagcggagagctgagcccagccaagcccagctgagcgggccacgcgacagaaacagtgaggccttcgggacaccaccgccctcgccccaggcggaagtaccagatgtccgggacagcgagtggcttcctcgcgcccttgacgccggcgccgagccttctcattggtccccgtctgccaaccagcacgccctttgtggggcgaggtgcctgagctttaaccaatcgggacacaggctcttggtttgcctccatgcccgtcatttgactgggtggctgcgctctggtcgggtcttggggccagggggcaccgtagctctcgatcacctctttcttcctgtccttctgcctctggccgggcacctactttccaaggagagccacgtctctgagccccagtgtcccatctgtaaggtggggattaaggggagaccttcccccagctcatcagcttgggagagtaaatgtcgtgatgcacgcaaagcacccggtgcacagaggaggtctcattggaaagtaggttcccagccagaggcagcaggagagcaagaaggaggtggatcgagagctccagtgccccctggccgcaagaccagaccagagcacagccacccagtcaaatgacgggtgtcggggcaaaccaagagcctgtgttccgattggttaaagcccagaggcctctgccaacaaagggcgcgctggttggtagagggggaccaatgagaagtcgcggcactggcgtcaagtgcacgcgcagaagccacgcgctgtcggggacatctggtacttccacccggggtgagggcagcggtgtcccgaaggcctcactgttcctgtcgcgtggcccgctccgccgggcttggcaggactcggctctccccttctgccgttaccaggacgaccgtctccccgcagcccaggctgcccagactggcgccatgagctcccccgacaaggtagccgtttgtggggccagtttcggcctggagggtggcaagcaggctggctcccgcatggccagccccggagccccacggggccagggccacggcctcgatttgggggcgccaggcagccgcgagggcgagagcaggttcacagatcccgaggtcttcagcttcgagtctgagagcgaattgatagagcagggaaaggtggtgctctggggccgggaaggccggcctggcaccccagttgacgaccaaggggacgatgtggactactcgtcctccctggctgacgaaccagccaccatcgtgccaccggcccagcgtccaagggcgcccctccccagaaggtgccgctgccgaagggtcggctgacaactgggcggacctggaggtcggtcccagtgggagaggcgtgctgggccccagccctggagaatggcggcaggcctccgccggcccctgggagcccagggttgccctcgggtaatgctttgtgtggctcctagaaatagaagtccacgttagatggtgggatccgtgtccaggttaaactgatttctgtgtccccccgccccgccccgtcaccaccttctgcatcccacggagagagggtgcctcttttacattgagggtttcatgccaacccacctcaccactgggctgcaggctatgggggctactaagggctgggggagacagggaagacgaggagagaggaggccagaattgactaaccatttatcttcctccggtgtctgctggtctagtgcatccggctgcagagggaaattgaggaccttacacagcagctaggtatgatggagccctggctggggcagggatggacagcggtgtctttctgctggtgcggggggcgggggtgggctgtaggtacaggcggcgtcactggaactgactttcctttggggaagagaaccaaggaaagcctggccctggagccttctgtgcctttccagctaggggtgtgcacagacagcaatgtgtcgtctgaactccgtgtacacttagtccacgagtcccagaactctccttctcttaggagggttagagataccgcatgtgttttccctttaactgctgcctggtatggcttgtacggtgtttgcttgct

SEQ ID NO: 1563447 - DNA, 4001 bp, Homo sapiens; identical to SEQ ID NO: 1563445

SEQ ID NO: 1563448 - DNA, 4001 bp, Homo sapiens; identical to SEQ ID NO: 1563446

SEQ ID NO: 1563449 - DNA, 4001 bp, Homo sapiens
aaaaactcagattatttattcctttattttaaaatcaatgactgtactattattgttttagaaatattgtttaaatgctggtgtatgtgtgtcatacaggaccatggcttatggcccaaagtgcactgcaagaaataccacatccttaggagcttgctttagaaagaaacagcaacaactgagtcaggtgatacctgaggccaatggtataacaggaaattatctgcatgaatttccttgtagaatacaataagtattcattaaaatataatgagaaattgtgctgttttaagaccactcccgtagacacatgattaaaacgtattgaccacagcaatcttttaaaaagcagaccaacaaaacaaaatatctttgggaaggaaagatagttgttctaagaagctggactagaaaaaaataaagagtacatatcttatgattccattcttacaaacctccagaaaatagaaacagatagtgacagaaagcaaatcagcgggtttttttgagaatgatggtggaggtagggacagggaagaattgccaaacggcatgagaaaactttagggggtaatgggtatgttcactcttatagttgtgatggtttaacaagagcagatgtgacaaaactcatcaaactgtatactttttaagcatgtgcagtttgtcatatgtcaattatacttcagtaaagctgttgaaaaatgatattctctttagggataaaaacaactttggaaaaataaaaataaaagacggagagagagagctatcttgttttaaaattctctgtagacaatgctctcattcactgcccgcactagaggtagaccactcccattgccctgccccgccctaagctttttaagaaggtgggctagtcagtgttggatttgtggcatctagtaaccattatttcaggtgctgctggtaacttttagagatatttggccctttgaagggcatttagttgcttatatcatagggtggggtgtacctcatacctaccattatgaggtagatggcctgcaggttatctcttgtctgtttttggggatagtactgccacccacacacctcaccccatacaggttctgacaatcaatacactgaagtcacatccctctttccccaccaaaacacacacaggtagaaacaccaacccctttcactctttgtgtattaaaaagtgttcaggaaatttatcttcagtgcttagtcctgagccagtccttatccccccagtttccagctgtggacctgttggtctggcctcaaaccccacagaagccacctccctgccttctcacacacacctccctcttcccctcactccttccttcctcaccatcagagaagtcacagagacatatcctttcgattcaggttgattttattttcatggttttaacctgttggtgtagaattcactgactgtatgattgatgacttttcagtggcggacctctagagacatcacagaactgaggtctcgctttgctctttgtcggcctcttctttcttcattttttctttcagccggtgataacgaccacgcagtattggtcctctagctttcttaggttttcctgcaggggtgttagtttcaccggctttttggctcgagctccctcgaaggggtcttttcgccttcctggtggtctttaggccctacagggagatcacagtcaggccagagggcgttggttttgggaaagaaggtgggaaatgcataggaataggcttcatgagaagggtgtgagttgaggagggggtttgagtgaggcaaggaaaggataggagtcttggggtggcggaatcagtggggcaaagagaaggggtttggtcgggatcatctcaccttaacgccgcttctggaccttcgttgacggggtgtcttccccttcttcctccctttggtacttgaggttgatggggtctgttcgtccacatcttcattaggcttctgtggctcactggtcacctttgccatactgaattgtcccagtggtctgctcacagctcctgatcatcctatgtatacccctcccagcacaatgaggggccacacccttcaactttgattggtcagcaaggcactcgcccagccaatgagagctaagggacactaagacgtcacaaagcactactcttgtcacttctatgtgagagaggggtggggaggtacctggggagtcttagtcatcagaatgtaccactcctgccacctctgttttggatggtgggggggtgatataaaggcaaggatagcctggtggtagaaaagaggcttctctatgacagcctcttctatgccttcccatcatgaactaccacccctcctcatatacccatgttcaattgtggtggcccacatagcagacagtttcctttaatctattccccaaggccacacctactcattggtttattctgaagtctccctccctaagtcattagctgttatttttgatattttacctaaaatcccactaaaaacaatatggctgtctttcaatgtcagtggagaggtgagtaattctacaaacaaaagacagttcccacaaataaacatctttctacctatcacatttggcattaaaggcagcttattttcattaatttctgctagccctgcaattgatagaaagggattagaattaactgtctatttatgaaggttgcttttatctttacttttatcctattcttgggctctgaccacattatcattattgatttttgaaaggttatttctctattttattggatttttctttctaccttcctagtttctcttactaatttctttcccaccaaaagacacctgcatgtgacacacctgatgtgtttgaatgatttgctttcctatgtttttattcttgttaaacatatggctttgttaaatacgtgcatgtgtgaaagtgtaacatttgacttaagctgctatatgcatctcttgttcattgcttttaatgttgcatcgtgcttgttcattttcttccccctttaagtgtaacctatgttgatgctgttccttactgctactaatgatgctgctatgagcctcgttagtagctcatgaccctttgtggaattctgcctatatttctttaaggtgtatgttcaggaacagaatttctaggtaatagacatatataattgtcttagtcatttcaggctgctataaaagaatcctatagactgggtagcttaaacaatagacatttatttatcacagctctaaaggttggaactgaaaaatcagggtgtctctggtaccagtttactgtattggtccattttcatgctgctcatgaagacacacccaagactgagaaatttagaaaataaagcggtttaataagcttacagttccacatggctgggtgcctcacaattatggcgcaagttgaaaggcacatctcacatggtgacagacaagagacttattaaattacaaattcattctctttgttagttgcaggactaattatatcacctatataattttattaaatttatttttggtagtttgtgtttttctaacgaattgatcaattttttctatatttttgaatttatgagcatacggttgttcacagtattctcttatccatttaatgcctgaaaaatctgtaatgctatgtcctttttcgtccctgatattgtttatttgttgtcttcttttttttaagctgtcagttgtgcttaagttttatcaattttgttgacggttttaaagaaatagctttctgtttaattgattttcctattttattcctgcttttaatttcattgatttttgtttttatcgttatgatttacttccttctgtttgctttgggtttatttttctcttcctttctatattctttaggtaagaaattaggtctctaatttcagacatttccttgtttctaatgtaagcatttaatggtataaatttctctctcagtataatgttagctgtattccacatgttttaacatgtatatttt

SEQ ID NO: 1563450 - DNA, 4001 bp, Homo sapiens
aaaactcagattatttattcctttattttaaaatcaatgactgtactattattgttttagaaatattgtttaaatgctggtgtatgtgtgtcatacaggaccatggcttatggcccaaagtgcactgcaagaaataccacatccttaggagcttgctttagaaagaaacagcaacaactgagtcaggtgatacctgaggccaatggtataacaggaaattatctgcatgaatttccttgtagaatacaataagtattcattaaaatataatgagaaattgtgctgttttaagaccactcccgtagacacatgattaaaacgtattgaccacagcaatcttttaaaaagcagaccaacaaaacaaaatatctttgggaaggaaagatagttgttctaagaagctggactagaaaaaaataaagagtacatatcttatgattccattcttacaaacctccagaaaatagaaacagatagtgacagaaagcaaatcagcgggtttttttgagaatgatggtggaggtagggacagggaagaattgccaaacggcatgagaaaactttagggggtaatgggtatgttcactcttatagttgtgatggtttaacaagagcagatgtgacaaaactcatcaaactgtatactttttaagcatgtgcagtttgtcatatgtcaattatacttcagtaaagctgttgaaaaatgatattctctttagggataaaaacaactttggaaaaataaaaataaaagacggagagagagagctatcttgttttaaaattctctgtagacaatgctctcattcactgcccgcactagaggtagaccactcccattgccctgccccgccctaagctttttaagaaggtgggctagtcagtgttggatttgtggcatctagtaaccattatttcaggtgctgctggtaacttttagagatatttggccctttgaagggcatttagttgcttatatcatagggtggggtgtacctcatacctaccattatgaggtagatggcctgcaggttatctcttgtctgtttttggggatagtactgccacccacacacctcaccccatacaggttctgacaatcaatacactgaagtcacatccctctttccccaccaaaacacacacaggtagaaacaccaacccctttcactctttgtgtattaaaaagtgttcaggaaatttatcttcagtgcttagtcctgagccagtccttatccccccagtttccagctgtggacctgttggtctggcctcaaaccccacagaagccacctccctgccttctcacacacacctccctcttcccctcactccttccttcctcaccatcagagaagtcacagagacatatcctttcgattcaggttgattttattttcatggttttaacctgttggtgtagaattcactgactgtatgattgatgacttttcagtggcggacctctagagacatcacagaactgaggtctcgctttgctctttgtcggcctcttctttcttcattttttctttcagccggtgataacgaccacgcagtattggtcctctagctttcttaggttttcctgcaggggtgttagtttcaccggctttttggctcgagctccctcgaaggggtcttttcgccttcctggtggtctttaggccctacagggagatcacagtcaggccagagggcgttggttttgggaaagaaggtgggaaatgcataggaataggcttcatgagaagggtgtgagttgaggagggggtttgagtgaggcaaggaaaggataggagtcttggggtggcggaatcagtggggcaaagagaaggggtttggtcgggatcatctcaccttaacgccgcttctggaccttcgttgacggggtgtcttccccttcttcctccctttggtacttgaggttgatggggtctgttcgtccacatcttcattaggcttctgtggctcactggtcacctttgccatactgaattgtcccagtggtctgctcacagctcctgatcatcctatgtatacccctcccagcacaatgaggggccacacccttcaactttgattggtcagcaaggcactcgcccagccaatgagagctaagggacactaagacgtcacaaagcactactcttgtcacttctatgtgagagaggggtggggaggtacctggggagtcttagtcatcagaatgtaccactcctgccacctctgttttggatggtgggggggtgatataaaggcaaggatagcctggtggtagaaaagaggcttctctatgacagcctcttctatgccttcccatcatgaactaccacccctcctcatatacccatgttcaattgtggtggcccacatagcagacagtttcctttaatctattccccaaggccacacctactcattggtttattctgaagtctccctccctaagtcattagctgttatttttgatattttacctaaaatcccactaaaaacaatatggctgtctttcaatgtcagtggagaggtgagtaattctacaaacaaaagacagttcccacaaataaacatctttctacctatcacatttggcattaaaggcagcttattttcattaatttctgctagccctgcaattgatagaaagggattagaattaactgtctatttatgaaggttgcttttatctttacttttatcctattcttgggctctgaccacattatcattattgatttttgaaaggttatttctctattttattggatttttctttctaccttcctagtttctcttactaatttctttcccaccaaaagacacctgcatgtgacacacctgatgtgtttgaatgatttgctttcctatgtttttattcttgttaaacatatggctttgttaaatacgtgcatgtgtgaaagtgtaacatttgacttaagctgctatatgcatctcttgttcattgcttttaatgttgcatcgtgcttgttcattttcttccccctttaagtgtaacctatgttgatgctgttccttactgctactaatgatgctgctatgagcctcgttagtagctcatgaccctttgtggaattctgcctatatttctttaaggtgtatgttcaggaacagaatttctaggtaatagacatatataattgtcttagtcatttcaggctgctataaaagaatcctatagactgggtagcttaaacaatagacatttatttatcacagctctaaaggttggaactgaaaaatcagggtgtctctggtaccagtttactgtattggtccattttcatgctgctcatgaagacacacccaagactgagaaatttagaaaataaagcggtttaataagcttacagttccacatggctgggtgcctcacaattatggcgcaagttgaaaggcacatctcacatggtgacagacaagagacttattaaattacaaattcattctctttgttagttgcaggactaattatatcacctatataattttattaaatttatttttggtagtttgtgtttttctaacgaattgatcaattttttctatatttttgaatttatgagcatacggttgttcacagtattctcttatccatttaatgcctgaaaaatctgtaatgctatgtcctttttcgtccctgatattgtttatttgttgtcttcttttttttaagctgtcagttgtgcttaagttttatcaattttgttgacggttttaaagaaatagctttctgtttaattgattttcctattttattcctgcttttaatttcattgatttttgtttttatcgttatgatttacttccttctgtttgctttgggtttatttttctcttcctttctatattctttaggtaagaaattaggtctctaatttcagacatttccttgtttctaatgtaagcatttaatggtataaatttctctctcagtataatgttagctgtattccacatgttttaacatgtatattttc

SEQ ID NO: 1563451 - DNA, 4001 bp, Homo sapiens; identical to SEQ ID NO: 1563449

SEQ ID NO: 1563452 - DNA, 4001 bp, Homo sapiens; identical to SEQ ID NO: 1563450

SEQ ID NO: 1563453 - DNA, 4001 bp, Homo sapiens
tggtggcacatgcctgtaatcccagctactagggaggttgaggcaggagaatcgcttgaacctgggaggtggaagttgcagtgagccgagatcgcaccactgcactccagcctgggcaagaagagcgaaactccatctcaaaaaaaaaaagaaaaaaaaaaaaactagccgggcctggtggcgcacactacttgggaggctgaggcaggagaatcgcttgaacctgggaggcggaagttgcagtgagctgagaccgcgccacagcactccagcctgggtgacagagtgagactccctctgtctcaaaaagaaaaaggaatggaggtggtaagaagcagtcagatcctgcatacattttcacgaaagcacctgcaggatttcctgatggactggacagatgtaaggtacgtgacagacagaagtcaagactgattccaggttttggtctgagatactggatgaatagttgtactactgactgcaatagggatgactataagaggagcaattggagagggggtgtagagggtcatgaactcaattttcagcacgatatatttgagaggcccattagacattcaagtggagatgttgaataggcaattggagtctcaggagaggtgcaggttaaagatgaacatctgggagttaccagcatgtcagttgtatttaaagcttgggaatgaatgagatcacctagggggtgggtacagagtgagaacaggtgagagtactgagctatagggccttggaatgcctaaaagtctgagagagaaaagggagccagacaaggggaaaaatctaaggctgggcgcggtggctcacgcctgtaatcccagcaccttgggaggccgaggcgggtggatcacgaggtcaggagttcgagaccagcctggccaacgtagtgaaacccccgtctctactaaaaacacaaaaattagccgggcatggtggcgggcgcctgtaatcccagctactcgggaggctgaggcaggagaatcacttgaatccgggaggcagagcttgcagtgagccgagattgcaccactgcactccagcctgggcagcagagtgagactccatctgaaaaaaaaggggggggggaaatacgaggtaggaggaaaatcaagtgagtatggagtcttggaagcaaataaaaaacatgttgcaaaaggaatgaaatgattacctctgtcaaatgccactgacagaattaaaatgaacattgataactgaccactagaactgttaacatggagccaaatacggttaagatgatgaggtgggaaggaaagcctacctgaagtgaggtcaggagagaattagaagtcaggatgcagagacagccaatataggcaactcttttgagaagctttgctataaaagaagcaacgaaatggggttatagctggaggggaatacaggatcgagggagggttttattttcgtttgctgtgaggtaagagcaactgcagcatcttggtatccagcagaaaagttataaagcttctagaggcagtagtttttgaagacagtggattaagagggaaatacaatatgtttgtgtttctatttttgttctcctgaaggagtttagttttgaggaaggtctggatacagagtcacaaggctaaacaaaaagcaggaaaaaaaaaaatgccctggagtggggcggggatgcgtagggaggatttagtcggagagagaaaacccaccaatcttcgttgagaagtggctcccagatcacagccagaggaaattcgccttcaagaacccgaagtctggctccttgcagacgcccccgcagttcccggctactcacccagcactaggaccatctggccgcacaaacagtagtaaacatggaggggcttctcgccgtcgtcatattcctcccggtcccgagtgtcagagcagactactgaccgagacactactttcggcatgattcccaagagcaatctgaaaactctacgccaagaagagggtcgccccgaaatgacgtcacgagtgcgccttgcaccttttccttgtggctacgctggtcacgtgttagcagaagtcttataaacttccgggctgtcctatcaggctaagatatacgggggtgcgcctggagcctcccagaacctactttgtcttggccaagttagctgggactcctgtgatctgggagtcacttctcaatgaagattggtgggctttctcacaacacccttaatattatataaattctttacatttctataacgcatgcatttatatgtatatatacacatatgtatatataagaccagctaaataaaggactatgcattatatagtttatattatatatatatatatatatatatgatactgatttgggtgtgtttctaaatatgattgtgattttaatgactattccagatgagtacataattttttaggtatcttattttttagttgatataattcacgtaacataaaattcacccttttaaaatgtgtaattgggtgttttttagtgtattcacaaagttgtgtaaccatcaccactaattccagaacatttccatcatctcaaaaagaaatcttatacccattagtagtcaccacgacccgcacatcccccaccttcccagcccacggcaaccactaatctactttttatctctatggatttgcctattctggacatttcatataaatggaatcctacaatatgtggccatttgtctggcttctttcatttaccataatgttttcaaggttcatccatgttacagtacttctttcctttttatggttgaataatatttcatcatatggatatatcacattttgttcattcatcaattggcagacaacggggatgttttcactttttggttattatatagataatgctgctatgaacattcatgtacaagaatacttccaccgcaaatttgtgtgggaatataaatctggatttttaacttttgacagcacgagaagtgattaaagcaccttgacactgtttgtgattcaaacaatgtgggatgtcattgaatgactttactgcagtacaggtttcaggtataaacactgttttgccttgtaattttaggttaaattcattaaggaacattactaagtctatggcaaaagccattttttaaaactattcatgttcaataatagtggtcaagggtggggttcttctcatttagaaaattttctaaaattttgaattcaaattcaaattcaaattttctaaaatcttgaactcctgacctcgtgatccacccaccttggtctcccaaagtgctgggattacaggtgtgagccaccgcgcccagctgaacttcactgttgacactactgtcaagaataacacaagacagattcaagtttgtttgtttgtttgttgcaaagtacctgctgtttaataatacaattaataactacaggattttaaacaacttacattttgacaagtattgtacatttgtctaaaccttttctgctccatacatatttgtaatacatcttagcaaattatgctttagactgaattgaattagtgttttcctgacttctttgaaatactctcatctgcagttgttccacacaagaccatacacccaggccaatttttttttttttttttttttttgagacagagtctggctctgtcacccaggctggctggagtgcagtggcacaatcttggctcactgcaacctccaccgcccaggttcaatcaactctcctgcctcagcctcctgagtaactgggattacaggcacatgccaccatgcctggctaatttttttttttttttttttttttgtatttttagtagaggcagggtttcaccatgttggtcaggctgatctcaaactcctcacctcaagtgatctgcccacatcggcctcccaaagtgctgagattacaggcgtgagccaccacgcccggtccaattcttcagtcactttaaagtcaacattgactccttgagtaaaaaacaacaactg

SEQ ID NO: 1563454 - DNA, 4001 bp, Homo sapiens
ctactagggaggttgaggcaggagaatcgcttgaacctgggaggtggaagttgcagtgagccgagatcgcaccactgcactccagcctgggcaagaagagcgaaactccatctcaaaaaaaaaaagaaaaaaaaaaaaactagccgggcctggtggcgcacactacttgggaggctgaggcaggagaatcgcttgaacctgggaggcggaagttgcagtgagctgagaccgcgccacagcactccagcctgggtgacagagtgagactccctctgtctcaaaaagaaaaaggaatggaggtggtaagaagcagtcagatcctgcatacattttcacgaaagcacctgcaggatttcctgatggactggacagatgtaaggtacgtgacagacagaagtcaagactgattccaggttttggtctgagatactggatgaatagttgtactactgactgcaatagggatgactataagaggagcaattggagagggggtgtagagggtcatgaactcaattttcagcacgatatatttgagaggcccattagacattcaagtggagatgttgaataggcaattggagtctcaggagaggtgcaggttaaagatgaacatctgggagttaccagcatgtcagttgtatttaaagcttgggaatgaatgagatcacctagggggtgggtacagagtgagaacaggtgagagtactgagctatagggccttggaatgcctaaaagtctgagagagaaaagggagccagacaaggggaaaaatctaaggctgggcgcggtggctcacgcctgtaatcccagcaccttgggaggccgaggcgggtggatcacgaggtcaggagttcgagaccagcctggccaacgtagtgaaacccccgtctctactaaaaacacaaaaattagccgggcatggtggcgggcgcctgtaatcccagctactcgggaggctgaggcaggagaatcacttgaatccgggaggcagagcttgcagtgagccgagattgcaccactgcactccagcctgggcagcagagtgagactccatctgaaaaaaaaggggggggggaaatacgaggtaggaggaaaatcaagtgagtatggagtcttggaagcaaataaaaaacatgttgcaaaaggaatgaaatgattacctctgtcaaatgccactgacagaattaaaatgaacattgataactgaccactagaactgttaacatggagccaaatacggttaagatgatgaggtgggaaggaaagcctacctgaagtgaggtcaggagagaattagaagtcaggatgcagagacagccaatataggcaactcttttgagaagctttgctataaaagaagcaacgaaatggggttatagctggaggggaatacaggatcgagggagggttttattttcgtttgctgtgaggtaagagcaactgcagcatcttggtatccagcagaaaagttataaagcttctagaggcagtagtttttgaagacagtggattaagagggaaatacaatatgtttgtgtttctatttttgttctcctgaaggagtttagttttgaggaaggtctggatacagagtcacaaggctaaacaaaaagcaggaaaaaaaaaaatgccctggagtggggcggggatgcgtagggaggatttagtcggagagagaaaacccaccaatcttcgttgagaagtggctcccagatcacagccagaggaaattcgccttcaagaacccgaagtctggctccttgcagacgcccccgcagttcccggctactcacccagcactaggaccatctggccgcacaaacagtagtaaacatggaggggcttctcgccgtcgtcatattcctcccggtcccgagtgtcagagcagactactgaccgagacactactttcggcatgattcccaagagcaatctgaaaactctacgccaagaagagggtcgccccgaaatgacgtcacgagtgcgccttgcaccttttccttgtggctacgctggtcacgtgttagcagaagtcttataaacttccgggctgtcctatcaggctaagatatacgggggtgcgcctggagcctcccagaacctactttgtcttggccaagttagctgggactcctgtgatctgggagtcacttctcaatgaagattggtgggctttctcacaacacccttaatattatataaattctttacatttctataacgcatgcatttatatgtatatatacacatatgtatatataagaccagctaaataaaggactatgcattatatagtttatattatatatatatatatatatatatgatactgatttgggtgtgtttctaaatatgattgtgattttaatgactattccagatgagtacataattttttaggtatcttattttttagttgatataattcacgtaacataaaattcacccttttaaaatgtgtaattgggtgttttttagtgtattcacaaagttgtgtaaccatcaccactaattccagaacatttccatcatctcaaaaagaaatcttatacccattagtagtcaccacgacccgcacatcccccaccttcccagcccacggcaaccactaatctactttttatctctatggatttgcctattctggacatttcatataaatggaatcctacaatatgtggccatttgtctggcttctttcatttaccataatgttttcaaggttcatccatgttacagtacttctttcctttttatggttgaataatatttcatcatatggatatatcacattttgttcattcatcaattggcagacaacggggatgttttcactttttggttattatatagataatgctgctatgaacattcatgtacaagaatacttccaccgcaaatttgtgtgggaatataaatctggatttttaacttttgacagcacgagaagtgattaaagcaccttgacactgtttgtgattcaaacaatgtgggatgtcattgaatgactttactgcagtacaggtttcaggtataaacactgttttgccttgtaattttaggttaaattcattaaggaacattactaagtctatggcaaaagccattttttaaaactattcatgttcaataatagtggtcaagggtggggttcttctcatttagaaaattttctaaaattttgaattcaaattcaaattcaaattttctaaaatcttgaactcctgacctcgtgatccacccaccttggtctcccaaagtgctgggattacaggtgtgagccaccgcgcccagctgaacttcactgttgacactactgtcaagaataacacaagacagattcaagtttgtttgtttgtttgttgcaaagtacctgctgtttaataatacaattaataactacaggattttaaacaacttacattttgacaagtattgtacatttgtctaaaccttttctgctccatacatatttgtaatacatcttagcaaattatgctttagactgaattgaattagtgttttcctgacttctttgaaatactctcatctgcagttgttccacacaagaccatacacccaggccaatttttttttttttttttttttttgagacagagtctggctctgtcacccaggctggctggagtgcagtggcacaatcttggctcactgcaacctccaccgcccaggttcaatcaactctcctgcctcagcctcctgagtaactgggattacaggcacatgccaccatgcctggctaatttttttttttttttttttttttgtatttttagtagaggcagggtttcaccatgttggtcaggctgatctcaaactcctcacctcaagtgatctgcccacatcggcctcccaaagtgctgagattacaggcgtgagccaccacgcccggtccaattcttcagtcactttaaagtcaacattgactccttgagtaaaaaacaacaactgagtaatattggtaaacattcatcag

SEQ ID NO: 1563455 - DNA, 4001 bp, Homo sapiens
tattaatcccctcaacttttcttgtagggcaccagtttttcatttacatattcaattctaaaaattaaagtgatcaacatttagagtagtaatgcactactgccttatttcacacttgagataaaatcactccattttttcatccctgaaatagctatcttgctttttaaaatttagttatttaaaatatccttacctacacatttctataacatcttttttccttacaactggatgtgactataattgcatggtttttgagctagttattcttttactttcaagtttgttgctcttacacgtcacagtaagattatccgtgatttagcattgtgacaacattgtaaaagggactgaaaagcagtaatgtagaaaattatagtctttctccttccagtactttctcttattttattttttgcattttatttctttccccatttcaaacgtgttcatgcctacagtactatcattccccttaatttcatctgttagagaaaaaaaacgtattttagagcagttgctgatggcaagctagtgttttcaagctaacttcctacttctgatacagaaaaattgaagttcccagatcagtactctttgtggtgagtaataagaaacaagaaaatgagaatgtcaagccttcccataaaaatcacaccgttaaaaggtgatatttacataactgttacacggcgtttcaatcaatgtaaagtattaaggaatacatcacggagcatcctttttgaatgaagattaaaacatgcaaacccgcaaatttttacaacctttatgctaaattcaaatctataagctcttcaaccgacacaacgtactatttccacaactggattgggaataaaactaagattaattccaccacaatcaaacatgtaacgaacgtatgaggaatactgactcccacatcagtacgtttgccagactgaattttaagatgtagtcaaacacacttcctgaattggccacttttgcaatcaaagaaacaaacaaacaaaaaacaccaacaaaaaccactggctgtgcaaatttcattgagcatcccttggtcatttaagaaaacttgtctacctaccactcctggcttgtaattaacaatacaaaagcattttcatttcctttcccgttcacgcaagctcctgaaaactattttttttaaaaccctctgccgttctttccaaacacttaccgctaaagttgtgttcctcaggttgcttgtctgttaaccagatatctccatagggatcttcgttattccacagcgccaggtaatgactcttcccgcctcttaaaggcctctctggtttctcctggtgcgctctatttctgaagggagtttctaaagaaatactgtctgaagtctccccacagtggacgttatctatgcacaggatcccctggcctatccttttctcattgtaaagacatgagaccctggaaattctcatttgaatgccaactttaagaatattttgatatacgagagagttcaagctggggtccaggtagcacttctcctggtacaccccatctgagatcgtcacatcatagcaataaaggggaggcttgggcaccgtgtcgcgtggctcatcctctaacaggtacctctggacggccagcacagttacaggcaccacctccgagggggtgacacactggcgaggtgagtccataatctgctcaagaaccttttggatccaggacctgggcccttgggaaccagctcttcggatcacccctcccgggaccccagcccgattcctctcagggttcggccaatctagccctgcatgtgagggaccagcctcaggctgtcctgactcaccagacattgttggataactgcgtacccgcttcactcccaaaagctagtttgccccgtccaaagcggagagaaataaaaccgcgcgctttggcgacgatcgctactctgcccctgctgacaggcaagactccgccccgtagcgaggctgcaaagactttacgcgtgcgcgcgccagctctcccaccccgcccctcgctccgagcgcttccgactcgagacactgttactaggcagtcacacgcgcgagttacgtagcaggtcgtccgaccttgtgcccgccgggttgccgtctgggggagggatgacaggggaaggggagggggaatcggtggttgtcatggttctcaaagagggagggggagagcgcttgtggtcccctggaaaggaggatgcctagaggcaagggaaaagagaaagtggcaagaatcagggtgcagagtcaaagctcagggatttgggggtttgggctttgggccaggaacagaaagtaatttagagttggttaacatatgttaatgttataacatgggtttcctgtagtatgaacaaaaccagataatttatgcagagcctccaggacagactctagcacaaaaagtcctcagtaaacattagctgctattgcgattagcattagcataattatctgtagtggctccctgagtgtagggtgggtgaattagtgtttaagtgcaaatgaaaatagaaaactagaactggcttgtaaagggctgcctttagattagacttcttaaaatgcagctagttttaatataatacctggcctaatatacatctagggtagagatttcagaaactttgtttaatgtttgtttgtttaatgcaaggcatatatcaggaacgaatgtaaagtgaaaaagctgataagaatagtaaaaattaaggataaaatatttaatagatgtacttagatccagtatacatagaagggagtaattgttctaagaatactttttaagatggttatgagctgattttgtttatactaatttcctttggctctctattttatcattctttattcactatttatgaagtctctatatgaggtaggcactgttttaggccactggggataactgtagtcagggtccttccctcaagtttcttctcattgcttgggctaaagagccctgccgttattaatacttaactaatttactcattctatacagatttcttgagtgtctggtctgggcagggtatagccttgctagggagaccaaaaaacatagtaaggggaaataaagtggagggaacaggagttaatattttataaaaagtatgattacagaaaggttctctagtaagagactgaacagaacagagatgtgcaggaagtgaggaagtgagctatgtggatatctaggggaatggcacttgaatcagagaaaacaagaagaataaattccatgagacagaagcatacttgatattttcaaggaaatgcataagccaatcagccgcagtggaggggcgagggggagagtggtaggaggtgaggtcagagaggtagcagggtttcttctattatgagcaaaggagtgacatgacacttagtcttgaaccccacttccttcatgatgcctcccctcaccaattcagtctaggataatctttctcttctctgtatcaccttgtatcactcatttgatacttatcatctaatacttgcagttaaaaaaaaaaaacttaatgtatgcgtaactcagagtttctcaacatgggcactcttgattctttgggccagaaagttttttgttgtgggctgtcttgtgcactgtaggatgcttagcagcatctctggcctctacccattagatacctgtagcacctccccctccagttgtgagaaccagaaatatctccagacattgccaaatgtcccctggggtagcaaagtcgctacaagttggaacacccgattatgatctgcattaactagatcttaaacttttcgaaagcagaaactgatttgttctttcactactgctatgcataaaaggcactcaaatattttaaataagtaaaacatataattcccagtgcctctctaccaaagggaatatacaagtgtggctttccataaacaaacaaatgcaatatacaaaaatccaaatttaccaaacataaaata

SEQ ID NO: 1563456 - DNA, 4001 bp, Homo sapiens
aactttttaactcaataattcaatctcctcactctccagctgtctaccaacaagctcattgagggcaggaggcatcttgttaactacagagtcctcagtgcctagcacagtggagagtttttacatgtttgtctaaaaacgttttgtcccagttttatcaccaaatagcagtgagactttgggcaagtcacttaacctctcagtggttcagttccctccttggtaaagtgagagggtatacactaaatttctgattccacctccaactttctattctttaaagcaacgagtttggatgcagtaatgctccaatttggatgcagctcccaaattcttactcactgcttggtctctgttactaaaccaggggctctttatcatttcttttggtgccatggacccctatggacagatctcttctaagaattggttttaaaacgcataacataaaatacataggattacaaggtgctccaattatattgaaatcatcaaaatattttttaaaacaaaattatagtaaatgtgtcttcttaatgcattaaatgagctctaataactactgtatttttgtagtaacgagcataaatatttcaagatccctgacatgactgcaatgtaacatgaaaatatctgtgctttccattgatgacaaagtcatcaatgttaatactactgtggcttgttatctacactataattgaaagaaacaaagttcagttagaggttagtgaaaatgaagttgtcattttttcccccatacaagttcacataccccctgaattaagaacttctgccctaatttatcaatatgtttcacatttttatgtatgtgtgacgttacactgctgatgcagagagccttctgagtctattcagtatttctccttggggatgccttggaatatacaatcctcttaagaaagagaaaagcagcccttaacatctgggagctaagctgggcttaactaacaccaaggctggcagtcacagctgggccttggtgttaccactgcttcctaacaacacccgatccagagcaaagctcctgcttccttgaactcgccccaaaatcaccgaaccaaagcccaaatcctataataaatctaactcttttactgaaatatgtcactgtgttcctacgtgtgcgttctccttgcagcaatgagaaacccaatttcttcaactacaggtgtgcccctagtggtctttggctggagggcagtggcacgtcactgtacaaattctaaatttttccagatgctcgcctggatggggcttacactttttataggattagggcagaaatacagaatgaaataggaaatacatcctcattatgagacagtgcaacaattgttttggctagaacacaggtttcaaaggcagactaatgggtttggatcctagcttcccacttcctatgtggtcttgtacaaattacttctacgtgcctcagtttcttcatctatgtattgggaataataatcatgcccacctacttccgttgttggaaagattagatgaatgtgaataaagaacttagatcagggctgcgcatatcaaagtgctgtatcagtgcttgtttactcttgttaataagataattattgccattatcagttacttctacaagtattaagggacaaacatttgatttccagagaggaggcttaccgcttgtttcttaacgggaaaaaataaggtcagagccttttccgattaaaggacacagcatattagtttaaatttaaaacctgagaaacctcaagtccttggttaaaacctttcgtaaggtaaatccaggccgccaaccggcggcttccggctgcgaagctttcgaagccgccggtggccctccaagcgccccctctcggcagcctctgctcacagaaatcccagtacacgccgctgggcgcccagtcgccgctgcaaagacagtttcccagcgccgcggcaacgccaggcgcctccctcctcgcgcctccgcgtaccgtccacacagagccggcgctttcttgccgcctagcaaccgccggcgcaggggcggagcctcctggagggcggggtttgcgttcacccgctgcccgggcgcgacgcgctgcggctcagcgacgcggcttctagaaccgggtgattgaactaaaccttcgccgcaccgagtttgcagtacggccgtcacccgcaccgctgcctgcttgcggttggagaaatcaaggccctaccgggcctccgtagtcacctctctatagtgggcgtggccgaggccggggtgaccctgccggagcctccgctgccagcgacatgttcaaggtgagagcgtggagtcgagtcacagctgtcaccgccccctcccggccgcccgagccctccccgcgctctcttggggcctctctgcagccaggcctggctcaccccgaggcttttcccgccactgggccggctgcgtcccggccccgcggttcattcactggtctactggggatgagcggctgccgggcggaggcgggagacccccgggtgggtgggggcggccctttgggttgtgctttcgtgaattaaacactttgaaaatttaaagtgccttcccccaaagtacccatcccctcggctagtaccctcttgggatcgtgggtagggtgaggccagctcagggcactgtggggttcgcggctttagttgcctggcagggtcaggtttcagaacctgatgtgtggatgggggagggtcattttaggagaagctgtgcagggtatgggggaggctggggtgggatggctgggtgacgagggaagctggagctttgctccactcctcagggaacattatttaatacgggccagtggacccccttccctgcgttttgtgaactcgtgtcctttggaaaaaaatcgacttttacgatgaagacttaatttcgaaaatctgcactttagcataaagccattattctactttttaaaaagtaaattatatgtattttgtcataaaaaatcacaggctaccagaaattaatctacaaaattgagtcttcaagaagcatagtacccataaaatagtgctaatgaaatctcagaattgtactattcatttaaaagttttattgagctctgcaatgtgctttgggtacgttaataaaggctgtaaaatcagaacatgcattctgccttctagtcctggcattgccactttctagctgtgtgaccttgggcaagtcactgtgcctatcttcctttggtgaagttggggtaataacatctacctcatagggttgttataaggagtaagttggtatgtgtaaagcacttggaaaaggcctagtatttgctcttactctgttttcaggcagctcacagtttagtcaggaagacagatcctataatcaacattcatttgataaatttgtgtgttaaacacctgttatgtgctaggagctcagctccatttcagggttacaacaaggaaagatatgctgtggccagtttaactatatgtgtaccaacagtgtagtaaagtagtaaaaaggagagcaggatccacttggcttaaccaggggttcctaacctggggccctcagctcctcaaaggatctgcacatagatttcagaggatccctgaactttgatggggaaaaaacataactatttttagcaatctccaattggaattgagcacttcctttagttacgcatatgggtaatgtctcagttatctattgttgggtaacaaatcactgcaaaccagtgccttaaaacaagaattgtttctcaaaatctgggttggctgggcagttctgctggtgacttgactgaaagttggcttcactcccatgtctgggggcttggtgcccctccatgtgcctaggttggacttcctcacttggttactgacttccaagagggcaagtcccaaggcacaaacacagcatcatgtttgctgatgtcaaaacaagtcacgtagccaagtccagagttgatatggtggggaaccacacaaggtca

SEQ ID NO: 1563457 - DNA, 4001 bp, Homo sapiens
ttcttgaggagaggcacaaaagctctgtaagcattctccagcctggttcctgtgaacatagccatgtgctatctccagcccctgtcatccagtctccacccttcagaagtccaagattccaggacctaacactaaagactacccgccagatgcggtggctcacgcctgtaatcccagcattttgggaggccaaggtgggcggatcacttgaggtcaggagttccagactagcctggccaattcgagactagcctggccaatttggtgaaaccccatctctaccaaaaatacaaacaaacaaaaaaaattagctgggcatggtggtgggcgcctgtaatcccagctactccggaggctgaggcaggagaatcacttgaacccaggaggcagaggttgcagtgagccaagatcatgccactgtttcagcctgggtgacagagcaagactccatcacaaaaaataaaataaataaataaataaaaataaagactaccttgccgggcacagtggctcacgcctgtaatcccagcactttgggaggctgaggtgggtggatcacctgaggtcaggagttcaagaccagcttggccaacatggtgaaaccccatctgcactaaaaaattagttgggcctggtggcgggtgcctgtagtcccagctactcaggaggctaagacaggagaatcgcttgaacctgggaggcagaggttgcagtgagctgagatcgcgccattgcactccagcctggacaactggacaacaagagcgaaactctgtcccaaaaaaaaaaaaaaaaaaacctaccttgagctggtggatatttcttccccttaggtatggacctaggggagagtatgtgtgaggtaacctattattatagaggcagtacccttccttaggctgactagagatggtcaatttggatctggttgagggtgttctgttgtttgagggtgttctgttttttgttttaatttggttttggttgtttttggttttggttttggttttggaggcaggctcttgttatgttgcccaggctggtctcaaactcctgccctctatcgattctcccgccttggcctctcaaagtgctgagattacaagcatgagccactatgcccagccttggatgccttgttttaaagataaggttcataatctatcttgaaggccttattctatttctggggaacactcctgagcctctacctggtggcccacgttccaccttacaaacgtagtaggtgcttcgagctgtaaggtatttgctggcatactctgcatgattgggcttcatcaggaaaagcatcttcattttccccgtttgttcacacaaatcgatggtgtctggagggagatcacagggtaattggggcagctaaggaaagagagtgggagcaaaaggggccagtgatcctatacaaaatgggttggaggaagctctaaggatatgaggaactcccttcttgccaggaggagggcttgggggttagagatgacccaactccttctgacctttggccattagtcccctccctaagctcctcacttgttttaggcaactttactttactgcggatgtaatacagcaacacgacgacagcacagttggtattgaccagaaactgctgattatctgagaagagataggatgggacacatgggcccatttctgtgatctccactgccctcagatccctccacccccatccacagactctagttctgtgctgcccctcacctccatgtttgatgaagatgaacatgccctcaagatcgcctcactcttcacaaagtgccctgatgagtcatgcagaaggagggtgttctagaggccttgtgtggggcaaataggcctatagggttggtggactagagaggcagatggatttcataggctgaggatgcccaggctggacaggcaggagagagctgttgatagttgtggataaccagtatccccaggggtggggcctgagactgcagttaagggattatgaggtcagaagtggcaggtgtggccaaaaagtggagtaagggtaaggagagaaaaacttgggtggggtatgttaaagattagttggaaaggggggacaacatggtaagtctaactttttttattttttttatttttttagatggagtctccctctgtcgcccaggctggagtgcagtggcacaatcttggctcactgcatcctctacctcctgggttcaagcgattctcctgcctcagcctcccaagtagctggaattacaggagcacaccatcacgcctggctaatttttgtatttttagtagagacggggtttcaccatgttggccaggctggtctcgatctcctgacctcgtgatccacccgctttggcctcccaaagtgctgggattacaggcgtgagccaccacgcccagcccattgtaagtctaactctaaactaaaccctggaatgagtgcagggcacctggaaaaaagtcagtttccagaacagtactctttctagcaaattggtaatactcctgcctccacagcatgaatgtactactcctttttcttcccctcccaccctcattgcatcccaggcttcccctgctccccacccccatgacagacatttttgatgattatcaacagaaactttatttctcatcggttcaggaacaatcggagggtagatggaaagaggaagggagggaaagagggagggaggaagaatcctgcgaaaaggaagggccagactgagggagaagaaaaacatgttcggggcaaaagggtaattctcaagtggggaatgccaaatgaaggggtgcttacatgggggcacaaaattccaaatcagccacagtggggtgaggtgagtatgagacgcaggtgggttgaatgaaggaaagttagtaccacttagggctacaggaccctggggttcttctgtcagaggattggggttcaggtttcaggctttagggtgtaacatgggggggcccagtaggggctatgctggttgcatggggaggccccaggcccctccccaagggcccctccttttgggggaatctcactgacgaggcagagtcgttcactgtagtctggctgcagactctcagccagtcccttagacacaccactccaggcctaaagacagatatgtccaggtcaggggtcaattaggggcaggaagtaaaagaccgagctctgtgccaaaggagtactcatgatgtctgcaaccactgtaattgattacagaagggatacacaggctcctgggcccccaataccagttgccatctgcctcattcaatctataatctgcacttctgtgtgtgtctctctctgtatagtccatgccccatttggtcggccacatcctgacagttagtgcagggcctccttccctctcctctctgcccccacccccacactctgtctgtcttgctggcaggcagttggcagttgatagactgcagcatgcttatgacagcgttctcaccgaaaagttcccgtggtattcagtaacaagatcctctaggttcttcagggtgggaattcggggcatcgtcctgacaggggagaaagagggagcaggagcacataggttaaagcttttttatcacccttctcccagttgtcccatatgaaataaagtgattctgtgttctctgtgcctgtggcttccttccatcaccaaaccctcttgggtaatctctcattacttactgtctcatcctttactcctaaagaccctgcaaaaccctcctctgctattgtcagctaccgttcccctcatttttctgggcttctccaaatctcaccgttccagccagaaatacacacagagaaggctgataatcaatcccatggagccaacagagataaccacggcttccaatgcaaacaggaaaggattctctatagaaaaaagaaaagcaaagtggaccttatatttgttgtgcccctactacatgccaggcactggtgccaggcaccgcgctaaagacatact

SEQ ID NO: 1563458 - DNA, 4001 bp, Homo sapiens
atcaagctaccactgactttcttcacagaattagaaaaaactactttaaatctcatatggaaccaaaaaagagtctgtatagcaaagacaatcctaagcaaaaagaacaaagctggaggcatcactctaccttacttcaaactatactacaaggctacagtaaccaaaacagtatggtgctggtaccaaaacagatacatagaccaaaggaacaaaacagaggcctcagaaatgacaccacacatttaaagccatctgatctttgacaaacctgacaaaaacaagtaatggggaaaggattccctatttaataaacggtgctgacaaaactggctagccatgtgcagaaaacagaaactggatcccttttttacaccttattcaaaaattaactcaagatggattaaagacttcaatgtaaaacctaaaaccataaaaaccctagaagaaaacctaggcaataccattcaggacataggcatgggcaaaggcttcatgactaaaacaccaaaagcaatggcaacaaaagccaaaattgacaaatggaatctaattaaactaaagagcttctgcacagcaaaagaaactatcatcagagtaaacacgcaacctacagaatgggagaaaatttttacaatctatccatctgagaaagggctaatatccagaatctataaggaacttaaacaaatttacaagaaaaaacaaacacccccatcaaaaagttggcgaaggatacgaacagacacttctcaaaagaagacatttatgtggtcaacaaacatatgaaaaaaagctcatcatcactggtcattagagaaatgcaaatcaaaaccacaatgagataccatctcatgccagttaaaatggtgatcattaaaaagtctggaaacaacagatgctgatgaggggaggagaaataggaacgcttttacactgttggttggagtgtaaattagttcaaccactgtggaagacagtgtggcaatccctcaaggatctagaaccagaaataccatttgacccagcaatcccattactggatatatacccaaaggattataaatcattctactgtaaagacgcatacacacgtatgtttattgcagcactatttacaatagcaaagacctggaaccaacccaaatgcccatcaatgatagactggtttaagaaaatgtggcacatatacaccatggaatactatgcagccataaaaaagaatgagttcatgtcctgtgcagggacatgggtaaagctggaaaccatcattctcagcaaactaacagaggaacagaaaaccaaacacttcattttctcactcataagtgggagttgaacaatgagaacacatggacacagggagaggaacatcacacactggggcctgttgtgggggttgggggcaaggggagggagaggattaggacaaatacctaatgcatgtggggcttaaaacctagataatgggttgacaggtgcagcaaaccaccatggcacatgtatacctatgtaacaaacctgcacgttctgcacatgtatcccagaacttgaagtaaaaaaaacaaaaaacaaaaataaacccctactgtatgttaagtcccttgccagattcatttatatagtattagctagtttggtggggacaggttggtatattgagtggggaagggtggtaaaggaggaccataagtctgtcatcttgatgcttatattttgcttaagttttttaatatcagctgttgtattagaaattcttgaagacctactaatgttaacactgctaaaagtaacagcagatttcttaaatacagctggcgtttctaattaaatactttaatgtatactgtaacagatcataatttacaagttttaaggttaggcacctacctgtagtagaagatccattggtttggtttgtagtcatgcaattatttttccaaatggacaaaagtaggacacaaataacaagattcatgtccgcaacttggttcaaatgatttgtctactaaggtaactactgaatttatacagttcagagtgttctaggcatttatgacatcattaccattgtgtgtcatactctgacaacataatctcaccatagggaagcataagcttctgtatacaaattttaccaaatgacttttttttttttttttttttttgagacggagtttggctcaggctggagtgcaatggcatcatcttggctctctgcaacctccacctcccgggttcaaggcacggtggctcacagctgtaatcccagcactttcggaggcggaggtgggcggatcacttgaggtcaggagttcaagaccagcctggccaacacggtaaaaccctgtctctattaaaatgcaaaaatagctgggcatggtggtgggcacctgtaatcccagccacttgggaggctgaggcaggagaatcacttaaacctgggaggtggaggttgcagtgagccgagattgcgccactgcactccagcctgggcgacagagcaagactctgtctcaaaaaaaataaaataaagagtaaaaaagaaatgaaagaacatgtcctataaaggtgacagtgtttgaaattatgcatttggggccattggaatataataaaattaaacattaattggaaaacccccagcctggccaatattgtgaaaccccctctctaccataaaaaaaaaaatacaaaaattagccgggcgtagtggcaggcacctgtaatcccagctactcaggaggctaacacaagacaatcacttgaacccaggaggcagaggttgcagtgagcctagatggcgccactgcactgcagcctgggtgacagagcaagactccatcttaaaaaaaataaaaaaccaaaaaaaaaaaaatacaactcagttttaccctgaaggtctaaataatcctgctcatactttttaactgtataaaaatcagaaaatgttattctattgcttttgaataagctgcttttgaaaatttgaatagggcttataaagtgaaagaatgtatctgtcaccttttttaaaaaaagaaatcaggtttttttttttccctagtgttggatacatggtagacaaatatcttaaagccagtatttcagaaacagcttccaaattaatttgaacattaacttcatattcataatggttacaaaaacactttactttctttggctttaacatagatttatatgatttttatttcatttgcaagtttacatgactagcatgttagtaataatagatttcactcagaaattctaggtattattttgataaaaattgtatataataagtacactataaaaccccatttcttgcttcatatttgttgttgttattgttttgattgttgccaggactagagtaaaacccagtgagatatttgcctgtagcacaaaatttaaggggtgttgcaaaattcagtaatcaaataagattttaacgtgatatttaaaaaccaaaattaatgccaaaaatctatgaccaacaaaatattgaacatttaaataaagacaggatctgattctgcatttgcatgagcctgtcccactcccctcaccctaatcccagctctgtatcttgagcctgcagggccatatttattcttttccactttaaaaagcagaggggaagggtccaaggacttagccaggtacttaacagggctgtgtccccaagacccctaaaaatctcactaggtcattttccccagagagctgctcctgggcccttgtgtaatgattcttggtgaagaatggctgctcctggtttctctctccttggttctccagagattaacctgtaccacttttctgatttccgccattatatttgattgtcttgcttccaatgtctggctggcgtcatatctataggaatcagtagtaggaaaagctcctaagctcttcccagcacccacatggcaagtttgaacctttgccctcatccgggtgagaggaacctttctggggttgccaccttggggatt

SEQ ID NO: 1563459 - DNA, 4001 bp, Homo sapiens
tttctttaaccctccaaatatgatataggattaacgatttttcgaaccgcaataaaaaaacacacctctacattttgtttaaacaaaacaatttattttactaattaaaacatttcataacagaaaagcaacttggaaaacagaaatctcagctcaagggcaaaggcaaactcttgaggaagaaggtggcccagaatcaaaggccaacagcaggttaagtgctaggtggtggagtcatggggaggagaggcttctaaactactcaggatgttggttaacggctggaactttgggagacctcgcagctaactacagggcaggcagcccattcacaaagtgggtaaatgttgattccttctgtgggtcttagaggatgcttatagagggtcacggctcaggcggtgttgcggggtgagctgtgctctctatttctgcctgctcttctggagggacagggctcagagcataaaactcaggcatcaaagcatacctaaggctttcagggctaggagtggagatagatctcaggcccaaaaactcaggggaaggggatgaggggcttaggccaggagacctactcggggaggaggagttggaagcataggaggaggaggagctctcatcccactgctgagggatgggaaggaagaacctcccagggggtgagggtgaggaggcacgcatacggactgcatgccaaacaggcggggaagcacggcttgggacctcaggatcaggagagcctgatctgctctgaaaggcaagcctttctgagccagtcccacaggaaggattctcatcagctgacccagacagagagcggcggctgagaagggctgatctttgctgggtggaacggctccggaggccagtgcctggcgtcgtgctggtgctgcgatgaccggcgtctgaccttgctgtgcggacgcgaagggcagggcctggcgcagaatcgcggcctcggcgggcagagcctggcgcagaatcgcggcctcggggggcagagactggcgcagaatcgcggcctcggcgggcagggcctggcgcagaatcgcagcctcggcgggcagggcctggcacagatgcacggcctcggcgggcagggcctggcgcagattcagggcttagacgagcagggtctagatgagtggcgcggtgtggaaaagcagggcctggctgggcggtgcagcctcggatgacagggcctggaccagatgcacgtctgcggagagcagaagctaccagggtgatgcggcttcgggtagcaggccttgcctcagatgcgtggcttaggagtgcagggcctggctgggttgcctgactcgacgtagaagccccggaacagggatagctgctgggccggaaccctggagaagatggcggcaaaggctcaggaaacagacgccgccctggaggcttctgagccggggcagcctggttgcggcagggctgcttcctacgacggctgttcccggggctcttggtctgggccaggtgctcgtcggcgtggccagtggccttctggggccccacagcggcctggctgcccccctcgggcaccacacacccaaaaacttcgtgaggactgcggcagtcctggcggtcagaatgcctctccgtcagcacagcagctatgattggcagccccgaggcctcatcggtgatgaaaatggcggcggaggtggcggctgcagcggaagaaccggctgtgctgctgcttagggcggcgccgcccgagggagatgcttggctggagactgtggtgacggaagcagcaggatcttgattcccggtcccgcaggcatccccggaggcaagggcggtttcgttgttcagccctccctgcccctcgtcctgctggtgcttctgctccttctccatgtctgactgagtggccataacgccaggttctcccccagagagcaagagcgcagctgctacttctgccggaggagagcgcgaactggtagagcaagaaggtgggtggagcccagccagtcctcgactctgattggcgagctggacgtcagatgactcctctctcttcccgggagccgtccaatccggagccgtgcaacccagagccaggcgcctatcgtcaacccggagtgtgtgctccagccctctggggtcgaccctggttgctgggtcagtagtgtgaatctcctctcctcacacggggcccctaagacacgtgtttgtgtgtgtccgtccctaagacacgtgtgtgtgtatatgtgtgtgtgtgtgtgtgttccacatgaacgatttgagtcaccccaaatcgtggctgaggcttaagtggtcatttgaaagaaatgccacactggccggcaggttatatctcctggccaggtgtccctcctcgcacccggtcaggacaatgaaaccaggcatgacgcccgaagggaccaccctggaactcctccaggcatctagatgaccccatgtggggtctggtgggttttagggttatacagaggcctgaaggcgagaaaagggaaggggcccacaccgtcttgcctccggatgttcagcactgctgcttcccccaggtcccacacacctcaggtcccacacaccagagggggatttagaactgtgccttttcccccaaggcacagttagggattgcctaaggttaagggtgacaccgtccttaaatattttatgggctgcgtagtaatccgctgatgaacatatattaatttatttagtgtggtctctagctcctaattaatataaatatgctgtaatgtatagacttgaagtttaatatttggccactcatttttagtcattatttattacaaaaggtgtcatgttcagtactcaaaacagaaaagcaaatgtaagaaaactacacctaagtcctcaggcacccatgggaaagtgctggaaatttttacttagactttggtagaaaggccctattcatacatatttcatagttttttaaattttttattttatgaaatggaatagtttctccatagatactgcattgtaacctgctttgggttccagaaagcacattttctatgtcagtaaacaaatttctacgaggccactttaaattacaaaatactccatttataaaagaagtttacattttcaaacattcccatattggccaccgtttatgctgtttccaacattttacatcattgtgagacacatccttctcattaaaaattgttcatatccttaaatgtgtcattgtggataaattcccagaagagaaaattcttggtacaagtctatgaacatttgtaattattttaattacttaattaatttatttatttatttttgaggtggggtctggctctgtcacccaggctcgagtgcagtggcatgatctcggcccactgcaacttctgcctcccgggttcaagcaattctcctgcctcagcctcccgaatagctgggactacaggcgcgtgccacccatggccggctaattttttgtatttttagtagaggcagggtttcaccatgtcggccaggctggtctcaaactcctgacctcaggcgatctgcccgcctcggcctcccaaagtgctgggattacaggcgtgagccactgcgcccagccacatttgtaattctttgattaaaaatattggcaaactagtctcctgaatgtcactgttataacattttgagcacaataaaatcggatatttaatggaattggtgaacaattgggctgaaatgcaacacaaaaatagaatggaatggtatttggagtgttaaataatatagtatggaaaatggatttgaaatggtatgcaggatgggatgaaatggagactgcaatggaaactggaataaaatggggagtagaatacgggtttgaacaggatgtggaatggaatattggaaatttaatggaatttaattggaaaatggaatggaacagaaaatggaaagaaatatctaatgtcatatggaataaaataaaaatatatgagaaaaggaatgagtgcaatacagta

SEQ ID NO: 1563460 - DNA, 4001 bp, Homo sapiens
gataagggtcaggacttccccaagtccaactttgacaaaggtagtgacaaagctggatataaccagcttagagccagctctttcctcaacagtgtcactacacttgtctataattaaaacctctccaccctgtgttgttccccatgattgttttatgatttggccagtataccaaattatcagtcttacattaccccactccctttttttcccctctcttttgcttaaccttggataggtagctgatagcaggccactccacttaaaatgagaaaggaagggaacatattactattgctttccctccaccagtatgacactgcgttctgttctcacaggtgctaatcacctccctctaccacacagtaatccagctagtgaattctcatcagctaaaatgccaagccttccattttccttgattagttttacttaatgcttcaaggagagaatattgagcatagtgaggggcttgggatttacaacaaaaacagctttctagatcatgacagttcattttatcctaagcactgactggatcaagtggtcacactacccagttctctaccttcagctccatagtgatcttttctcaactatgctttgaagctattatatgctctagacacttgataatattctctctttacaaagaaaaaagtgctaaagcaacttcccaatttcctgatcttgtcattctttctttactctgactttccaagctgtgttttcactttcaagtgcatgagtatataatttagaaggaggtcatttcctgggaaaaattgtggcgagagctaaaagtttaatttgaacttactttctatagaaattatttgcccttaaaaatggtgataagaagttaagtttacagcttcgaatactcggaagaattctctgttgcagtagaatgttggtttggcgtaaacattttttataacaaaatatttgttgtttttatttgtgccactaattgctttctatatttaaaactcaaagactcattatttttcatgataaatttttacaaaagctccattcatattccattcataattgtactttttaacatctgtgtaatgcttctattggttatttagaaaggctatttaaaaatcgtatttctatctacccaatttgtccattattgctttgctgataacaccattttaagagaacagttgattttctttgttttaaaaagtacagaaatcattctgtccacttgtaaattagctatatctttacttacatagtttctccagactatattgatttatatatatatacaattatatataaatatacatactacatatttatgaatctagatgacttatttcaattctgttcttttgaatttttataaatcttataaataactcaagtttagatctctgaaaaaagaaggtacttgtttttgaaaataaatttgagaagttttattatatttagtgtaattactgaaataaaggcctacttcccatacatgagtcaatcttatattttttatttagaaaatggtataaaatttcaatttgtcatttttaaagtagtataaacacatagacatgtgcgtctgagtaaacattactaaacaactcagaatcagagatcattagcatgaaatattttctactccttctgcgaaatgctggctaatttattcctcctaggaattcagaagtaagctagaagtgagcccccagatatgttctttccattaaggaatttggaagaatggactcagtctgtttacagatagatataggttcacatggtaaatcagtttcaacacaattcctcaaatgaacaaaaaagctttggtctattttagttccaagataaccccgagaagtcagagaatttataacttatctcttgttggtacttacaatgacaaaaatggagagcccctcattcacagcccagttccccatggtggcagaggttgaatgtgttgtgtttgcctttcttctatactatgcttcttcttccaatgaggaaatgaaaacagcagccctggggcaatcggtttccttttcttttatcagaaattggctaataatcattggtcaactgaaaagcttgcatccataacaaacttaaatctttaaacctcaacaactacaaaaaaagggtctataatgatccagtcacaattaaacatagtggaaaatgaaaccaatttctacaactaagagataaataacagtgcattttaagggatgtattttacacagtgaaataactttttaactaaccagctatttgatcacaatttttaagccactcaactagacatgacttcgtgctgggtaaaacacattaaacaggtgtgattttgacaggctggaacagcattcatagccttgctgagaaaagtagtaacaattgtaatggttgatatttacaaaatgcttaatatgtgccaattttatgtgctatatatgtctatatatgtgtgtgtgtatgttcatgtatagctatcatatatatatatatatatatatatatatatatatatataatttgaaacatacatatataaatacagatgctttggccaatgatgaaccacatgtatgacagtggtcccataagattataatggtgttggccaggcacggtggctcacgcctgtaatcccagcactttgagaggctgagtggggtggatcacttgaggtcaggagtttgggaccaatctggccaacatggtgaaaccccgtctctactaaaaatacaaaaattagctgggcatggtggtgggcacctgtagtcccagctactcaggaggctgaggcaggagaatcacttgaacctgggagtcaggttgcagtgagccgagattgtgtcattgcaccccagcctgggcgacagagcaagactccatctctctctctctctctctctctctctctctctatatatatatatatatatatacatatatatataatatataatataatatataatatatatacttgtgtgtgtgtgctgaaaaattcctaccatctagtgacattgtagcataacacattactcatgtgtttgtggcaatgctggtgtaaacaaacctactgagctgccagttgtaaaagtatagcacatacaattatgtacattacatagtacttgatagtaaaaatagatgactatgttactggttcatttatttactagactatacttttaatcattattttagagtatactcctacttataaaaaagttaactgtaaaagaatctcaggcaggtccttcagaaggtattccagaagaatgcattgctgtcatagatgacagcttcatgcatgttagtgcccttgaagactgtccagtggggcaaaatgtggaggtggaagacagtgatattaatgatcctgactttgtgtgggcctaggctaatgtgtatgtttgtgtcttagcttttaacaaaaatgttttaaaggtaaaatataaaaataaaaaatttaaaaacagaataaagcttctagatatggatattaaaacatttttgtacagctgtaaaattttttttgttttaagcttagggttattacaaaagagtcaagaaattaaaaaagcaaaagtttataaataaaaagttacagtaagctaaatttatttcattattgaaaaaacaaaatgttttgcatatttagtatagcctaagtgtacagtgttcataaaatctataggagtgtacaaaaatgttctaggccttcctatccattcaccactcactcactgacacatagagtaacttctagttctccaagctctactcatggtaagtgccttatacaggtgtaccatttttaatcttttatactttatttttattgtctattttctatggttaactatggttagataccattgtgttagaatctctgacagtattcagtacaataaaaaacgataaggtttgtagcctagcagccataggctataccatgtagcctaggcgtgtagtagactataccatcaggt

SEQ ID NO: 1563461 - DNA, 4001 bp, Homo sapiens
attaagacaaaggtacttttggagaaagtgatagccagacggaaaatcatcacaaaatgaagtagagtactaggagtcaggtgatgaatacaaggaaaggtcacaggtgatataagttgatgacatgagattcaaagttggctatttttggaagtaagaaaggagaatgacctggaaatagcattgaggaataaagcagactttattgcatttttgggttcagtggtaggagaggatgtaggaaggaaaacatcaccccctcttgaaggctgcaggaaaagcaatgaatttgagagagagttgggtttcagatacagcaagaggacagagttatcattcagattggagtcagaggaggacatagagggtgttgctgatgacagtgagtttcaaagagataatgcctaatggtgacataaacctaaggtctttgtgatctaagagggaagatcagatgtaggcagaatcaaattagaaatgtctttgtaaaagcgctagtgatttgagacgctcactttggggagctcaattttaatttctagatcaaatcactctttttcttttcttttcttttctttttttttgagacggagtctcgctctgtcgcccaggcgggagtgcagtggcgcgatctctgctcactgcaagctccgccccccaggttcatgccattctcctgcctcagcctcccgagtagctgggactacaggcgcctgccaccacgcccggctgattttttttttttttttttgtatttttagtagagacggggtttcaccgtgttcgccaggatggtctcgatctcctgacttcgtgatccacccgcctcggcctcccaaagtgctgggattacaggcgtgagccacagtgcccggcccactctttttctttctttcaaacttattgaattttcattttctaaaagtaatacacactaatagaaaaaaatatgaacattacagacatgtatcatttaaagagggaaaatgtctgcaattcctttctagggaataattctccaaaatttgaatttctgagtgaaatattttctaaattttctttttatttcgaatttgtgcactttttaaagtttactggcaattaagattttttcctataaattgcctggtcatatacccatatttttattccacattaattgaatttttttcatagactttacaagtgttttttattaggttgtaccatgagaaatttccatttttgtaggtcaaaatagtttaatataagcaatctcatatagttcaatttaatatatatgggatattatctggtaggtgtaagttagcatggcttacattatcttaatttttaaactactttcagaaatattctttaagaggaaattgacttttaaaataaaaaacaacactacagcaactaaagacttcagaaaactgtttaattccatatgaataatactttatcttctacttaatgaagtctttaaaaaataaacttactgcactttcttggacataataatgtatttatcagaaaaatagaatggtctaattttgcctacacatacaattaagtttaccaaactagcatacaaagtcttactacattgtatcctgctttacattttaaagtgctttcacataagtttattctttccatgattcctaaaacaagatgtagttataagaaactgagactcagagagatcaaacagtcaagattcgcaggtattttgtaaacaagactgcactagtgaaatttcaaagcaaaacatctaagatattattgaaaatttcatatctctgtttaaaatacaagttctaattcataaataaaacgactatgaaagaaacattctttacagttaaacatatacatttgtaactaaattgagcatattggctatttaaaatactaaaaaaatattaaaaagaggacttacaaccttggaagagacatttcccctgcctgtacgttgcctggacttgagcatagtaagttgaaactggtaatgttgagtgatgacatcataaagggattgtaaataaaagaaatttaaaagggacagagtagtcatattttaaagtgcacaggtgtttttgaaacctatttttaaattgtggatgtgttcacactccactttttaaaacttgaactgaattagtcagtattcattaattgaatctacctgtttggtttattaaatatttaattatttcatatcagcctattttaacactaactttgaatgtgcatgtgtgcacaaagatgtgtttatgtgtgtatatttgtgtgtgtaagagatatatgtgctgaaaggaaaatagaagaatataagttttcctctaaaaagagcagtggtagcttactacattttcttcacttttaggcttttctcctctacaacctttttgtacatttatagtggtatttccataaaataacttgaagatgtcttattcttggatatgtaaattcagcaaaagtaaactatctattaaactactattgacaaatctgaaaaaaacttttcacccaaagcttaaaacaactcttattatgcacagagttgtgttagaacaagttataaacagctacttggtatataaaacccataaatgtgaattattcattatagataaaaaacctttctgggcaggtaggaatgtatacaggtaaaattgcccatatgtgttttagataacagtgaccatatttctagccacaggagaaaaagcaattcattagtttttatttttcaccactttttgtcattgaatttttatttcatttttgtaagtttatatttcttatataataatgatattttatcttttaatgaaaaaaatgtgatccaagacaccaagataatttttacctgagcagtacaaagcagtatatctcataactttttcattgaacaaactaatttcacaagctagtcaaatagcattatcttaaggaaggtaatataaggccatttaatttctaagtaaaagtgaaccactattatgtatttgaaaggaatattaactatgagttaaaagccataaaaatgtaatttcactcctctggcagagtaaattcattcctaagtaaattaatatttagcacaaaggcattaattacagttctacataaatattaaaatctagaaatactctaaatgttcgaaactacggaatggtttcagtaaatcctatattttcatgacagtaggaatcatgttcattttgctcatcatcatatacttaacatttacttgaaaaaatggaacataaaactattcatgcagtttgatatatatcatataaagcaaataaatttattgtaaaaattgatgtaaacacataaaaatgctaataattataggtaatttttctgcatataatattttgcatttaaacatttctacaagtagagtgacatcagcaagatgccaaaataggtggtcccaggcttcactccaccacagaaatatcaactagcaactatagaaaataaaatttaaaagaacaacttggttaaaacctcaaaatgtgggaattatcctaagtcaactgcatgctcaatggaacagaatgaaaatctgcattgaaatggtagcagaaacagtttcactctgagcatatcacccctcaaacagccccaggttggcacagcaccacacagagaggattccccaggatttatggcatctacagtgggaaaagatgaccagggaagttgacatccagcttccccggcattgtgagacaggaggcctactcagtttccaccttatgggaaacagggaatatagagggaaaattcataagtagaccacttgggatcaggtagaaatgaagaaaggaaacagagcccaaggaaaccagtgaacagatttgggtggtagctcagtgtaccagctagcagtggtgctcaatcaagctgcagtaagaattaatcagcacaatgacaacatttgatattactaaattagaagaacaaaaagaaaaatgaataaaaaataatgg

SEQ ID NO: 1563462 - DNA, 4001 bp, Homo sapiens
gaccaaagtagaggtccatacagggcaatgttatttgggagattatgatagttaccattcatagtattgaattcacaaggttgggtatgtaccttaagaatcagcaccttccctttattatcctttattattggtcaattatactgaaaatacaaatttataattttctatactgtggaagagtcttgcttttatgacagataaatagtttctaaatgcatcaaaatttcattaaggggaggtagtagaaaatgagaattgatgattcttgattaggaatacactaacatgctagattaagtctaaaagcaaatagcaaacttttcttaacctaccattatctgtgtgcttactggctcccaaactgacttattttatttggaggaaccctgattggctggtgtagtcaatacttaggggaactggggaaaatttttttatcatggatgaatgtaaatatagcacttgaggttgtttatgatgtaaaaacagatagcttttagttctaattgagccattaatagtaaaacaacaacagaaaacatttctgaatgattaagacttctgtaataaagttaaaattgtcttgtaacaaattttcctaatgtattttaaatgtaatacagtcctttgtattttataatgcattgtaaaaatataaatatttttgtttttaaaacagtgtacaatctagtccagatttagttacaatttcttttaaaataatcatttgttagacatatggtatcatagtttctctctaggtttcaaaataatcagaatactggaaagcagaaccactgaattcagtaggtggaacttacaaacccatttgtttcctcttgaaaacagccttttttgtcgctaagtagaaaaatgttcctggctaaagattttattaaaatgtatgaatctttggctctgtgtaaacttagtctacaccagatgtgtctgagttactaaatagatcatgcaattttcttctattcatttatagttgagagagctttatttttacagtctctggccagaactggccattttctagttgtacggtgtgtttcaagaaaattttttagcctctctgagtcaattttctcattcataaacatggacagtaacacctaccttgtctaaattataggatgttgaaaggttcaggtgggataacaaatgtgaaactaccttgtgaaaattttactctccactggtttaccttcagtaattactacatatttattttccatattgaaggaaaatgtcactacattagagaaactccactgaaccctcaaaatggggatttgaaaatgtatcttacatttctggcttaaattacaaaggcacaggaggtttgcggagtgtgtctcctctgtattttgccacgttgagccctagcagaagcactgagcaatatttgttgacagactgatcatattatcagatttctggctaagaaataaagcagaaagaattcatactagcacccaaacttaaagcaggcaaggcagataacttatccccaaactcctgggaatttgctaaaatttaccatcagcaacattttactacatactgttctggtcttagtactgaatactgagtctccttacctgctaacttcaaggtccacagtttactgtccttttgcgtttgttctcagaagcaagctccaagtcttcagtaaattcgatctaccagtccttgcaattaatccttgttggcgagctgcacagtatcttgataccctgtagggtcgtaaaagcacagtccattcacagagtgcctgctctataggcaagcttctttgcaaagatgggttgctgctatttttaagaggggagagagcagggcacatttgctagccaatatatacagatatacagattcttcttcctctttcagattagccttcaaactgttaaagcactcccggagtctgacttctctggtgcaaagtgggggaggggaagggtcaaagaggaaggaagaatagaaactggagacttgcaggttgcgtgtatgtataaataaacttttcttcctagcttcaggaatagaattctcaggaaattattcagctgctctaagatgggaagcagggacgagtgttctctcttcagcttagttctctgtgatttctgtgactgtgaggtcattagactatttgtaggtggggaaagataatcctgccagtatatgctaatataactggcattatgtgaaacttgatcttaagtaacataaatttcatctctccgtttctctctctctctccttaatgacacttgtggctctatccacattctaaaaagccttttcctttctggttcctttttgagctttgtttcctgaaatcttcataacaataaattgcctccattggattaaaactgttgttttctttttttgtcccactgaagatgatctggaatgactgggcttgctgtcaatggtcctgtgttggaaatttgggggatcaggcaagtgttcttggcctttggctaggctctgaggtgttagagctgtggggtgctcaatatggcttctggagaaaagggacatagcagtctggtatgtgctgattgaagcctggggcagcactttgatgttaaaaaccaaattggtaagatcatgatgtgaatttgttacatcaattatcttgagttatattaagaagattctatatggagatgggcataaatatgttgatgttaacactttgtaaacatgccccataactaacaactagttttaggtacttgtaaaatatgagcccagcagtagccttctggcttgctacctgctgtaggaacaaagtcatttactcaaattttgtatctttaggtacaagaattacctcacaaccaacctgggacaatcgctttaaggcccttgaatctttatctcttttcacagagttctggattgtggtggtgatggtgatagttggaggaaaaggctatccaaccacatttgaagggatgttaacatttggattcaagactagactttctaatcctctcctagggagttttagtaactaaactgacattcaaactagtatttcttcaactgagtttggatccccaaatatctacaggaaaatttataagtgagacacagagtgaattatcacttttcctccagtctgaaatgttacagccattttgagctacagtggaagggcaattcatactcaggaaatgaagaaaagagaaaggagctagatcctttgtggggataagagagatcagattgttactgtgtctatgtagaaaaggaagacacaagaaattccattttgatctgtaccaggaaaaattgtttctgctttgataccataccccagcacaacacccgtaaagggtctctgctgaggaggagtagtgaaagagggaggtctctttgcagttgagataagaggaaggcttctgtctcctgctcctccctgggaatggaatgtctcctgtaaagccaaccattcccattctttctattctgagataggataaaaccgccctgtggctagaggcgagatatgctggcagaaatactgctctgttactctttgctacactgaggtgtttgtataaagtgaaacataaatctggcctacatgcacatccaggcacagtacctttccttgaatttatgcatgatacagatcctttgctcacgttttcctgctgaccttctccccacctgttgctctgctacactccccttgccaagatagtaaaaataatgatcaataaatactgagggaactcagagaccagcgctggtgcaggtcctcacatgctgaggctgccggtcccctgggcccactgttctttctctatactttgtctctgtgtcatttcttttctcagtctctcgtaccacctgatgagaaatacccacaggcgtggaggggcaggcccccttcaatccttgagcttcaagttggcaccgaaatagctgtggcagagagggtgtttcctgtggttcttctttgt

SEQ ID NO: 1563463 - DNA, 4001 bp, Homo sapiens
tgcctacaagttgtcagtatcattcaactatacatggcaatttggattttacaacagatgtggcaaactgttacagttttagttcacagacccagagattttatgatttaaagttcattttgagaaagttgttggttttttattttatttttgcaaaataataagcagtagtgctgttttacaacaaaatcctttgctccttttaaccacgtgatggtgatttttgtgccaaatctgtgctttcctgagatgttaccaaactggagatggaataaacactagaagactaattcacaggcgtttaaaaagtcagataatcttgagtatactttttttctttttaaactcagaaacattgaacacaatttgcttctcatatacaaatggacatttattcactagtgtacttctaaactgtgatatgaaggaggtacacttacaaccagggaagctggccatcatcatttaaggaatcctgtctttaagggaatgggatccttccaactgttcgcctggaagagctgagagcatcctctctagaaatctgccaacttgtacaccaacctccaatccagtcccagccacagtggttcatgccccacattgccctctgcagataacccaaaacggacgatcccaggaaagtgatatttgtcgtcgtccttttgtaaaaatagtatccatcgactttcctgtatcgtgtactggggagctttgcgcagcaagcatgagcatacgttctcacgcgcacttgcacacatacacaccaacaccaccacaaacaacaacaccacacaccccacacattctcacaacaaacacacgggatggggatcgaatcaccctctgggatggattctagacttcccaccccctgcatgccccaaatgctgtgttctggcttgccagcttaggagcccagtttacagctcagccagcccccagagaaagcccttggtatccgtgttcagaagaaaacctatccgacccgtgcggccacaaaagagcaggaaagaaaaccaaatagagaaattaacaaataaccacgaacagccaaaagccatgcaagatatgggcaaaaggctggaaagtttcaatagaggactgcaaactcaagtttgcgggacttttttagaccgaagcccttgcactgagcgtggactagaaggcaccagcattaatgaaagcttctagtcctctttccccaccgatttacagcgtgaagaatagaggcaaactagttaagactcactctacaaacaaagttggatgagggtggtgaggcatgcagaagaggccaaaggggtaagagaagtgggagagccaagaaacgagtgtctcacctggcattggtgcaatcggtgaacaaagtttcgaagtctttcctggtgatgagtttgcagcggtttaccccgggctggatggcccccagcccgcggaggatccggacctgctcaacagtacacaccacgggggatatatccagtctcttcagcttggtgtacacagtgtgcaagcctcccaccaggtgcttgagaaaaagatcaaagacttgcggcaggcagatcagttcctggccgtccatcaggaacgaagccaccttcatcccgtgcatgtcgaccatgcggcactcgttggtgttggtgttgcccctgccgccgcctccggcactgttgctgtggttattaaccacgaaactattgatcatattaggagtaagacgagggggctctctgggagtcgagtacaggggttcggcccggaataagccccccgggacgccggcgccgctggaagttgcagagatcactggagatgcggagacagccatggtcactctgtctctatcgtgggtcctccggccctcgctttctcgccctgactcctctagatcccctcgcactcactccctcactctcgctctctctggcgcgctctcgctggctccgaactgttcgcaagtcttcagcagccggctcacgctcaagctcaacaaacagtgagcagccccgacccgctgcggccccagaccccacccccaccacaccccctccggagactggcagcgtcccacagccaatgggccccagcccttctgcgcccgagcgctccgaatggctgccgctggtgaggaggtggagactccctggccggcgtccgactacctgagtgggtccaggctcgaccaagaacagagatccagtccgagaagggggcggtgtggtgcctctgcttcttgcctctctgccagacgagagaactcccagatgtcacgcagagttctcaaagtggcctatgctgtgaacccatccgctccgcgctccgctggtgtcggggtggaaacgcaaagcgcgactcctgaacgtgcctccccatgccccttccgccaccttacaccgggttagatcgtggaaagtgaggtggcagctccaattccacttgcgcatctctcccaaactctgcgggggctaatagatggcttcgcctagcttccgggagaaagacgctagcgagttcagaagtaaacagctcagccctttagcccacctaagtgcgcttggtgtaaattttcccctacccagcgcgcagaggaacaagcgtccgagatcatactcagatcagagttctggttgctaactcgcactgacattcaggaagcgtagtgagcctgtgaacactttgggaaacagagagacttgctctgtgggtggcagatggacacctcattttatggcacttccgccactgtcctggaagagacttgtctgtgtccccgtcccttagtgtcgagattgccctggccctactccccgctaaaattgataggaaatgtttgtttaggactcaaaacagtcatcacggaatatgaggaaagggcgagggtttgcattcttgaacgtgcattttccttcctcttccattggctttgaaggtccagtgattggagctccagtcctaaacaagattccacttcccccactcatcaagcgtcccaaacgtactaagagcttatagaacaaaatgtctaagcagggtacattccagggaaaaggaatggtcttttccacacagcatatggtggttagatcgccttagcaaagttgtttttgtttgttttgagacagattctcactctgtcgcccagactagagtgcagtggcacagtctcggctcactgcagcctccgcctccggggatcaagcgattctcctgcctcggccgagtaactgggacaacaggtgcgcgccaccatgcctggctaatttatgtatacatatacatatatatatacacacatatacatatatatacatatatatacacacatatacatacttttttttttttttgtagagacagggtttcaccatattggccaggctggtctcgaactcctgacctcgtgatccgccctcctcggcctcccaaagttctgggattacaggcgtgagccaccgctcctggcctagcaaagttgttttaagactccttgtcaagctattcattctctaaaaccaagatatttcctttcctgtgctcctcttctctggaggctgttagttattcataaagtgaaatccaggtttcgtttctttacaaaacgttaccaactacatggcttatggtaacttctctgatattcttctaaaatataaataatgttggaaacttactgaattttattcagccctagttgtacttagcaggatcaacgagaaatgtgtgggttctttttgctcccttatttagttacagataccctaaattggatttttctgcctctttctacaacatattttcttcttttctcatttcatcaaccaggtttaagaactgccctttgaatctcttcatactgtttcaatttcaaattgtacagggttaaaatgctaagaagttgtgatgatcattgctttcaaaatgcagtgatatgactctaacataatagattgggatataggcagccacgagacatttttaaaaggcatcaaaatgttttt

SEQ ID NO: 1563464 - DNA, 4001 bp, Homo sapiens
ttctcctacccctaggtttgtacttcagcaaaaatgataaaggatgtttcccacagagacctgagaacttgggaattatttttcttgaatctaaaagaaatcaattgattggccttcacagtgaggggcaagtctatatagcatagtgccatgagctgtgaaaaaggagcctaagcccatcagttctttcataacacgaccaggcctctctttcaataatactatttataatacaaaaatagaagtattgggaaagattttgccttttcacacaaacagacacatgtagtaagtaacagtgttggttcaattgtaagacaacagtttcgtaacatctttaggtttttaaaaggtcatgagattgaactacccatttaacctggattgggcagaactagtaaagatatcaggcttttagtataaaggatacaaccctacagtttcacagatacaaattttgaatatctttatactatctaataaaaatgagtttgcaaaaattattaaacatgtaaataaactggtaattgagctggcttagctgagagaaaaggctacttaaaaactttcgcacaataagtgtatgcaaatatgtgttcattaaaatagtctctgacagccgccagaaaagagcaattcaagctactaaatgtacatgaaaaattataactttaaaaaatatcctgtcaaacttttcattaattcagaatgttctctcccaagtgcaagttagtaatttgattttacctttttttcctacaaatttgctagttttgctcaaccctctagatgaatccagttttgcaagttgcttgcaataactaattcagagaaatattttaagcatacactatacataaattatatacagaaaatcattttcttttcatgtagctaaaaagcaatgtagaagaagattccttaggtttttaaaaatattattcaactacctatgactgctttataaaattatactaagcttggcatgtaactaacaatcaattgcctcttgaattttatatccaaaagatctaaaggagatggaagttttagggaaatgagggaagaaaataaagttctctttatccagtcttaaagaggtatacctaattgttttctgcatgccttaaaaaaggtcccagtctgggtttctacctgatgtaagcccatttgatttgtacttagtgaatagtcatgggtgatcatgggtgagagaagtaaactcttagattcacacagagaagaacagcacagacaatggcatcctgctggcagcctggaaggaagctaaacattcttattcagtgacatccccaaagtcaagacaccatttttaaaagcagcttgaactgtcacaaaaagggtttctcttttacacattttatttctgacctttttctttaaaaagaaaaaccttaatattcaatttattcaattaaattcaagaaaaaacaataattgcattaaaattcaattaaattcaagaaaaaacacatccactcccacccatgttgttaatctacttgttgttaatctacttgatgtctccaacctgaactcacacatatggtgcatttaatctaaataaatctaaataaatgcaaaatttaaataattagtataaaatactcctgcaatgctattcttctaatgccgttttttaaagctatgttacataagttaaataaagcccattttaaaggcattggctacttaggtgataaacataagcagtaaattcactttcctaaattgccccatatattatatttaatcctccttctgcaatcaccagcactgaagtatacattcatagctgctttcttttgacatggttcttttattactgtctcttttccttacataatgtcctgcagcagctggtctattattatgatgcttttttctcctttttctttagcggttttgctagcacaaagaattaaaatgtacttaccttccactgctttggctgcaactaagagtgctttgggtgcatatgtctgggaatgggatgggggttgttttaatgtggagggagactgagattgtttgtttctttctatttctgaacagtgacatattgatatttctgataataaatcattccaatttgttcatccctgcaaccaatggttttaattttcatgtacatgttgcaaagtccattttgttagaagcatttgataaaatactcaattaccattttttccactgtagttcaactgctttgctgataaaaggctccagctcagaagataaactgtaagtaattcctgaagaacaaatgtcagaggcggtatacaatgaatggcatttttttttttggagcagattattctatcaccaatgtgacagggtggttcaaatatttattttgttgaaaatgtcatttaaatattgtttgacacctgctccctatagtcatctgctcatcacatttcaatttcaagggatttaaaagtgagatttaactctatgtccagcaagaaaagagaaactcatctacaaaccaagataagaatacactgctgatatatgcaaattatttaaataaatggaaatgcaattgattcagttttgtggatctatatgggagaagaatatgtaagtttcagcaccctctcctgtccttagctttcaagtgtttatttttttgtttgtttgttttgttttgttttgagacagggtctccctctattgcccaggctggagtgcagtggcaggatcatggctcatggaagcctcagattcctgggatcaagcaatactctgcctcagcctcccgaggagctggaactacagaggcatgccaccgggcccagctagtgtgtgtttttttttttcttttatagagatgggatcttgccatgttgaacaggcctgttttgaactcctggcctcaagcaatcctctcacctcagcatcccaaagtgctgggattactggtatgagccactgtgcctggcctcaagtgtttatttttgacaccacatttgaaatttggccagaaatgaacctacctgttcattcattaaattgtctttttctaggtaatctactgttgaaaataatcacttcactcaccctacttcaatttccctccatatgcaagctctaggtggtattaatcattggctgaaaagacagcttacagtgcagaaggctataataagctaacttttattaatgggaaggagcttattttattgacctctatttgctcaacttggaaagttcctattaggtgctcagcaagtggggatggttataatttcaagtatgggccccagaatgaaatgtactccactaagcatttttcttcctagaaattcctcttcattttccactcccagtcaatcatttttggcagttttaagtccattacattttttgctgtgaattttaaatggttagaagatgtctccacataaaatcaagcctttatccctgcctcactctttggaaagccacaaggcagtagaaaatggagtcaagaaggaaaagataaagagaaaaaggataagagccatcaggtgaagaagaaccaaagaactggctttgaaattttctgtttgctttactaccaattgttttggtgctatgactttatttttcactaaatctccctgcattatatcattagattacctcagggatccaacgcatgtcatgtatttgcatactaccttcactgcaaacgtgttttaatctttctagtaaaattataagaaactgctccattcaagaaaaatgctgagacaccactgagtaaagaagtgtgaaaattgtgaagatttattcaccagtcatttaactctttagctcctagaacttttctgaagcacttgggagctctgaacatgtgaaatagctggatttgaatcactgacaaaaggcaatgcaggcaattgaagtaatcaactctgtctacttaattaaaattgctaaaattactggaagcatcatttagactgggcaacgttaagtaagagttgaac

SEQ ID NO: 1563465 - DNA, 4001 bp, Homo sapiens
aaacaaggaaaacaaatatacataactgaaagaccatgactgcatcttcttaaagaaacagaatgtatgaatcactcaaagagagaatgcaactaaagattaacgattaaccaaatttctttgtatgaaaattccaaaagatggtgttggaaaggagtcaaaaagtcttaaagccaagttttcattgaccaaaggaccactcactctctctgcttggaggagtacaaattaagctgggctggttccacctggaaaacaaaagacgcacagagttaaaagcaaaaaaatgcagcatgaagggcagtcgggcggaactgaaaggtaaatctgtgtacctggagtacaaggcggtcatccttagctccagaggcctgcatagttcccatggaggcctgcagggagaggccccccagccacaaagagcttcatctcaggccagttgtagcagtgggtgtagagcgcattgggaaacacttccatgccaccaaagtaattcacccagaaatcattgtggttgagccagcctctgccacaggcaagcctgagcttcctccttgcaggtcccgaagaggactccagggtggcggaggctctttcctccaggaatttctgggcccggacgtcatagaagagcagggagccctgaccggtgcccacagtgatgatgtggcggtagaagctcagcgaccgcacgcctgtgccaccctctcgagaacacaggggccggatgttctgctggtcctggcgcagatccaggaaagagacgtgggaatgggagcccacggcgtacacagacatatcatcacagtaggtcaggcacacattatcccggaagtagggcagcctgatggacagcagcctggatagtgcgctcccggctttccacaggtggaagtagccgtccaaggacaccgctcccagttcctggttcttgccgccgcaggccagggcccgcaccttgcggttactggggttgatgatggccctggggatggcctccacatccctcggacggatgtgggcatatacggggagacccacctcgctatgccaggcaacagtgtcatcgaacttgtccgggtccatccgccacagcgccacagtgccgtcgcgggagccgctcacggctacggtgtcactcagccaggcgacggcgaagatccagtccttgtggccatggcggtcgcccaggcacaggggatccagggagggcagctggtagatggccaggctgttggggttttcgccgccggtggccagaagcgtcttggagggattcagctcgatggcatggatgccgcagccctgttggtcctgggccagcctggcctcactgtcccgcaagaggggaatgcgcgcgatgtggcctgactccacgtccaccacgaaaagcgtgttacacttggtgccgcacaccacctgcctggagttcagccactgtgacgcgaacaccttgttgaccgtgcccagctccagttggcgctccgtcagcagctcgggcagcctctgtaccgcgtagccccgcagctcgccatcgaagccctggagcctggcggggccccacccgcctacctcccgaaccttcagatagtgcgccatcgagcgatacgtcgccggccgcctctgcctcttgagtagcagcggcccctcaccgtccgctgccgccaagccctgcgacggcgagctctcggcgtccgcctcgaccgcgggcgctttccgtttcctgctacctgtttgctgctgggccatggtgggcggcgggcgagcggcggcggcaaggcgttggtggcggttgcagcgcgtggctccggagtcggtcgtggcggcggcgtggatggctgcgctggaaccgagccttcggattctgaggcgcggcagtggcggaccgggtgagggacgcgcgggagagggcggcggtggcggtgcagacctaggcgaaggcgggaagtgcgtctggccgggcagtgagagcaaagtcagcgtgcggcgagatcgacgcggggggccgagtgggaggggcggaggcagtgggaggagcaggcggtcgggcaggcggttgtgagcgcgtggggtgcctgaggagtagctgaggccgggcggggtgaaggctgggagggacagggaggggagggggtagcggagctgcaagggcagagtctaggagggcccgcaagccaggatcccaagtatcagacacgcggcatttcgctaccctcaggacaacagctaactacccttcttaaaatccctacttcaataaaatctgaaacctacgatatagtcaagcacggggctagaaggagcccaggccacgatctgtctggagaaaccagtgtgcacttggtgtaatcctgggacacccttcgctaagattagacattaaacttggcaagggatgggggattcggcagcgcagggagacctttacccatatgtcagacctgcaacccctcaagtttcagcccctcagttgatgtcttaaacagtttcaaacaaatattttttccctcctcaaattgaggtctctgagctactgccacagtcccttgaggagtacaatccaaatgcaaatccctgggacccacatttggcccatggtgatatcagcgaacacttggtttggtgcagccttgagaaaatggtaggctgtactaatgggggaggaatcctgaggggctttttggaggtgtttgcttcctttgagcctcagagccctaaggagagggagtggaaggatcctgagagggggacctcttccccactcctgagaagcaaagttaatatccctgttgtcagtcccagaggcgcccaagcagagtccctgggaccttgggacagggtctagaggcagaggattttcacgtgcagagaacataacgttccagaagaaggcaacaacgtggatacaatgatgcaagtttagaggttctgtgcatgaataacttctcagagttcataaagttcttatccagttctgctgcttcagagcagccagtcaggtggcaggcgcaaacggggcatactcagttacccagtgatttcagttacacagtgatacattggggagagagggcagtgagaacaaagtcagtgtgtggacagatccacgaggaaagccaagcgggaggggctgaggcagtgggaagagcaggcgagtgggcaggccggcctgagggtgtggggtgctgacacctgcggtgattaatttacttcctgatcagggaaaaccataagagttattttgttgctgcttctccccaaccccctctttatttttctggttttctgtccccttcccccatccctttttgcaacttcgcctcaagtgcacaaattccaagtaaaagccataggtccttctcaccactccaatccagcagctgccttccagtgtaccccaacactcccttgcacctcacttttgattcctccccatatcattcatcctatagcaatagaaaggctgcatctgctggtggtaatagtgaacatgaaatcagggacaggtacatagaggaagctgcattttgtttccacacgtggacacaaatgggatgaatggacattttagaaagaggcaaccatatgtgaaaaggcacagatagtgcaaaggattgtttcgtgaattttagtgtacattaacatctcaggagcagcttaatagatgtgcatatcctttgattctatccctaaagatttgatgcaaatgatcagtggacaattatttgagaaacactggtctacactcctctcactcaggtgggaacaggatgtgttgcaggtaggaggagataaatatcttcatgtacttcagggttaccctgaaaatgggccttatccaggtgaatattgtgcaagaattgggaattaaaaagattatgatgatgtagatgtcagagcaaagagtggcccagggaggaaaattgtacctattatgcatgtagaacttaactattctttactattgccttacacctttactatattgttatattaacagg

SEQ ID NO: 1563466 - DNA, 4001 bp, Homo sapiens
acaccacacatctaacatgtgtaaaagatctgaacactattgcaatattgataaaactaacgtactgaatagtagtgaagactatgactacatcaacctaaagaaggagggtatgtgaatcactgaaagacagaacacaattaaggtttagccaaaactctttgaatgagaaggcaaaaatatactgctgttgggaaacgtgaatgagagttttaaagccaaagttttgactgccgaaaggaccacttgtgctctctcgctcccgctctctctctttctttctctgcctaatacattaagcacacgtaagttggactggttccacctggaagacaaaagccacacaaagttaaaagcacaaatgcagcatgaagaaggaaagtcaggcggaactgaaaggtaaacctgtgcactttgagaacaaggcgtccatccttaactccagaggcctgcgtagttcccatggaggcctgaagggagaggccccccagccacaaagagcttcatctccggccagttgtagcagtgggtgtagagcgcattggggaactctcccatgccaccaaagtagttcacccagacgtcatcttggttgagccagcctctgccgcaggcaagcttgagcttcctccctgcgggccccggcatggagtccaggctggaagaggccctctcctccaggaacttctgggcgcggatgtcatagaagagcagggaaccatggccggtgcccacagtgatgatgtgctggtagaagctcagcgaccgcacgcctgtgccaccctctcgagagcacaggggccggatgttctgctggcgctggcgcggatccaggaaggagacgtgggactgagagcccacagcgtacagggacaactcatcacagtaggtcaggcacacattctctcggcagtagggcagcctgatggacaggagcctggatagtgtgctccgggctttccacaggtggaagtagccgtccaaggacaccgctcccagctcctggttcttgccgctgaaggccagggcccgtaccttgcggttgctggggttggtgctggccctggggatggcctccacatccctcggacggatgtgggcatatactgggagacccacctcgctgtgccaggcaatgctgccattaaacatgtctgggtccatccgccacagagccacggtgccgtcgcgggagccgctcacagctacggtgtcactcagccaggcgactgcgaagatccagtccttgtggccatggcggtcgcccaggcacagggggtccagggtgggcagctggtagatggccaggctgttggggttttcgccgccggtggccagaagcgtcttggagggattcagctcgatggcatggatgccgcagccctggtgggcctgggccagcccggcctccttgtcccgcatgagggggatgcgcgtgatgtggcctgactgcacgtccaccacaaacagcgtattacacttggtgccgcacaccacctgcctggcgttcagccactgtgacgcgaacaccttgttgagggtgcccaggtccagctggcgctccgtcagcagctcgggcagcctctggacggcgtagccccgcagctcgccctcgaagccctggagcccggctgggccccgcgctcctacctcccggcccttcagatagtgcaccagcctgcgacgcgtcgccggccgcttctgcttcttgggtagcagaggcccctctccgtccgccgccgctaaaccctgcgacgacgagctcccggctcccgcctcgaccgcgggcgctttccgtttcctgctacctgtttgctgctgggccatggtgggcggcgggcgatctgcagcagcggcggcggcggcggcggcggcggcggcggcccggcggcggtggcggcgcgtggcacccgtgttggccgtggcggcggtggtggggatggctgcgcttccgcgtcagccgagagctcaggatctctaagaccaagaagctggtgcgatcgcgggcgcccagacttcagtctgaggctcggcggcggcggcggcggcagcggtcgtcctggccagagatgcgcggcctgacgtagcagagccggggcgaagcgcggcggcaagggcggcagtggcggtgcagacctaggcgagagcgggaagagtgtctgtctggatggctgcgggagcgaagtcagtgtggggggaggacgacgctggggcccgagtgtgaagggcggaggcagtgggaggagctgctgggctggcgtggggtgcctgccgggtagcggaggccgcgcggggtggaggctggaagggggcggaggggagaagggggtagcggagctgcaggggcagagtcgcggagggccagcaccctaggtccccagtatcagacatgcgttgtttcgctaccctcaggacaacagctaactacccttcttaaaatccgtacttcagtaaaatctgaaacctaagatataatcaagcacggggctagaaggaggccgagccacggtctgcctggagaaaccagtgtgcgcttggtgtaatcttgggacacccttcgcttagattatacattgaatttggcaagggatcgggtgcgggggtgggggggtgtggggttcagcagcgtcagggagacctctaccctcgtgtcagacctgcagcttctccagtttcagctcctgggttgatgtcttaaacagtttccaccaaataatttttttccccttctcaaactgaagtctttgagcacctgaatccctgagcatttgaactgcgttccaaatgcagttccctaggccctgctttccacccgggtggtatcagggaccctttagtcagaaagcagcctcaggagcatccagggctgcagtgatgataggggtggagacatgggggtgaggggtgaagagaagggtttttctgtaaggcattgagttctttcgaactcagcccagggcgggtggagtgaaggggaagaggtccaggagaggggtacctccctctctctcctgggacggaaaggtcagcccaaactttcagtcataggaatcttggcagagccctctcttggtgtgggggcccccttgggcattggtacagtactcagaggaatgcacaggatttccacaggcacagatgataaagaactttgcaaagtgactaaatggcaaaatggtgagagtgtggatattcaaagcatgagtttggcagtctgagaagttacatgatccacacctgctctaaagctttagggcagtcaatcctaaagcaagcccccaattccacagtaataccttgcactgaaatgctggtggctgataccaggtctgcacaggccccaatcgtcctccacaaaaaaagtctttgttaagcgtgtttgcagaagtcaggtggtgagttaactgtccttgatcagagatcatgaaaatactttgttgctgtttccccccaattctccctgctctttttacaaacttatctcaaacccagaaactccaagtgcaccatggatccttcacatcactccagtccaactgttgcaccttagtgcccatcctccccttctctgcctcaatattcctacccatgtttagtgctgtatcaagaggagggtgagggtgacggattgggagtaatctgacaatgaaaaaaatgctgacgatttcataattggaagtgacattactagagaaaaactgatcacaaatttctttaacctaacctatcttaaggctttcttttcttttctaaaaaatcttgacttagaaaacttgatattatataagacttcatggcatattttttactgttgcggtaaataaaataggctcaaaatcttaggctattatcagactagttggtcatatataacatatgtataacaaattggctgaaatatgtatgtgtgtatatatatggtttatatatattacatatatatgtgtatgtatatatgggtttttctccacataaactttttttaatttgtgcaaatatat

SEQ ID NO: 1563467 - DNA, 4001 bp, Homo sapiens
attgacaattctaaattagtcaaactgaattttaaagtccagtgtacttaggtggcatctagctggactggatatgaggccttcaggatggtatgcactgcactcgatcttggccctcctcctcggatgtatctgaggtgctggaagactcatccaactcttcttcatctgggaactcagctccatgatctctccagccgggttgatgagctctctgtaacaggtgacgcacgaagaaccgaagcatgcggttgtcaaacgagtccgtatagttcaagttgtcttcatctcgctcctgcttgttcttcttaatcacatcttttaacccagtaagctcagtggcagttttagctgtgggtgtccagatcctgacatgctgatctaggccactggtcgccaacacaggtaggtaagggtggggttcaagacagtttactatatctcctctgtccccctccatgaactggatgatctgggaggatgatttctcccagaagaagacgtgcccacaatcactaccgctcacgacaaactcactccgggggccatagaaattaacacatttgattgtgtcattatttctgtgccccttatatctcttaacatattgagcaccatcactgagagaggagttgaagaggtaaatatcttcatcattgtagctggccaggagctctgtgccatcgtggctgtacacaacgcaggtgatgtttgttgggaaatcacaataaaccagatgatgaggagtgaatttcttgagtactccattgttttctttcttatcaattctcctctggtcataaatccttacaaactgatcatgtccacccactgcaaattggtaaatattggcaggattcatagagattgtatacagtccgactttcttatcattttctcttgttaccacaacttttgaagctggccggtcttgcctgaggtcaatggtgaacacaacggcatcttcacctgaagtgaggaacttataaggagagtctggctccagagccaactcgtgggcaggtcccctgtgcttggccacacgcttagtattctcgcaatatgatgcattaattagttctgctacccgtacctgtccatcatggccacacatggccagagtggaatcaccacagttaggaaagaacttagcctggatgacattaatatcgtgaccactctcaaagttcagtactggcttctgccgcacccagtcccacactatcacccttaagtcatcaccgctactggccagtcgggtgccacgctggttaaagtgtatggtactgacagaaccggcatggcttccaagaagatactgcaggcggaaacgctgcacaaaggttcttgccccacaggcctcatatacaaagcgggcacttgaacccagctgccgctggcgaagagcagtaaggacttgccagcgagatcggggcagggcagatgtctctgaggaaatccactcctccaacgcctgatcctcgtctaacaaacactgatcatggttggtgccaccgcatcgtggacacatccgaggctgttcttcctcctccccttcctcctccatctcttcttcttcctcctccctttctgtctcctctcccactaacgggtaaccaaataaaccttcacccatgctttcaagttcgacgtcttcacttgaactttctgagtctgtgttttgattttctgtgctggcatcgttcaggaaaccaccatccctggtatcaccaccatctccggtcgatggctctgtggctgccatttcaatgtctgaggaggccgccgtcaccgctgctactccagactgctcctctgggctgctgaacaggctttcagtcactaagtctggtaagccacctgtgctgccctcttggtgggacatctcgaacgatgtttgctgtagctgatctggaactggaaaagccaacccctaaaagctcagggaagagagcacgcctgccccgaggacggacggtcggagaaggcagtaggtaagcagcaaagagacaccaatccgattggctgaagggggcgacaaactaatccaccaatgctgacgtcagtatgggagccagtgaggttcagaagacttcttatctgctcgcctcctctcagtgtcgactgctctaatttttccaggcccagagccacacccccacgggcatcttacactgtgagtagctgtggtttttttcaagatcgaaagttgccacactttggaaaatgcttttatttgaaaggtcacgaagtgaatgcaaagaactctgatagtcttgccaccagacggcaacattttggcatgacagtgaggtctctactataggtgtatcttaagttagacataggctctgagatgaggatgtatctttgattaatttaagaaaatgatctaagggaagacagcggacgccaaggaagagtgaaatctcaggtgaacacccctcagaggatagcttcagcacgatcctcctggggaactctggagagtaagttacgtctgagttatccttacaccaggcaagggagtgaactttcatactcctacactgttcagtccttgattaaaggccaccctgggagggatgagcatatcaactcccagatgtcccagatgctttaaaatctcttcacctgtgggcaaaagctccttcagcagcttgaagactaaagagctgtgcattagtactgatgcttggaagggaaagggaagtagatagtacaaaaagggatttgaaaggatcttgcaggagcatgaacattaacagccacaaggtagctaatacagcgactattagaaagggctttgttactactgtgtatgctgatgaaagtacaacttaaataaaactttaagaagtgtatagaagcctaatttggaaggtgaaactaaaactaaagtcatggtgagcaaatgctattcacttcctatatcttgttaaatgatggttcaaatcccacagtcgccatacccctcttcatgccagttgaatgaataatctggggcacaatggtgaagtgcagagactgacagtcttaaataataagactcgaaagtctaaaagagtccttgacccaaggtctaccgatgaatgatgtgttagcagatgtgaaaacattaatctccttgtgcatcatcagagctcttgggtgaccaggaccaatgttaatgatcagtaacattttgaaaggaatctccttttctgaacagtagaactcaacaggggattaaaaatattcagcaaactatgctgtaaacagatgttctgtcacccaggcttttttttttttttttttgagatggagtttccctcttgttgcccaggctggagtgcagtggcatgatctcggctcactgccacctctgcctcctgggttcaagcgattctcctgcctcagcctcctgagtaactgggactacaggcatgtgccaccacacccagctaattttgtatttttagtagagacagggtttctccatgttggtcaggctggtctcgaactcccaaactcaggtaatgatcacgcccaccttggcctcccaaagtgctgggattacagtgtgagccaccgcgcccggcctgttgttccttttttagagcacatagtagttttagcatggttcttacaggccctaagattttccagatggtaaatgagcattggcttcaagttaaagttactagctatattaacccccatcaagagagccaggctggcctttgaagctgtgaagccaggcattaatttctcatctccagttatggaagtcctgcatggcatctacctccaatagaaggctgtttgttctacagtgaaaatcagttgtttagtgtagccaccttcatcaattagatatgctttgtatgagagaactgaggtgatccaaatattcagtgatcattaagtgggacgatttgtcaagtactactggttcttgtgctatttgacaaatatttctagtttttctcccatcgatgtatatggtaggcctgtacttt

SEQ ID NO: 1563468 - DNA, 4001 bp, Homo sapiens
ggactggatatgaggccttcaggatggcatgcactgcactcggtcttggacctcctcctcagatgtctctgaagtgctggaagactcatccgattcttcatctggaaattcagcttcaccacttctccagtcctggtgacgacctctctgcgtcacgtgacgcaggaggaaccaaagcatgtactggtcaaacaggctgccatggtgcaagctgtcttcatctcgttcccacttgttcttcttaatcaccttctttaacccagtaagctcagtggcagctttagctgtgggtgtccagatcttgacatcatgatctaggccactgcacgccaacacaggtaggtaagggtggggttcaagacagtttattgtaccttctctgctcccctttaggaactggatgatttggcaggatgatttctcccagaagaagatgtgcccgcaatcactaccgctcactacaaactcactcctggggccatagaaattaacacctttgactgtggtattatttctgtgtcccttaaatctcttactgtattgagcaccatcactgtgagaggagttgaagaggtaaatatcgtcatcattgtagctggctagcagctctgtgccatcgtggctgtacacaacgcaggtgatgtttgttgggaaatcacaattaaccagatgatgaggagtgaatttcttgagcacgccattgttttctttcttatcaattttcctctggtcataaatccttacaaactgatcttgtccacccactgcaaattggtaggtattggcgggattcacagtaattgtatacagtcccactttcttatcattttctcttgttaccacaacttttgaagctggccggtcttgtctgaggtcaatggtgaagacaacagcatcttcacctgaagtgaggaacttataaggagagtcaggctccagagccaacttgtgggcaggtcccctgtgctgggccacacacttagtattgttgaaatatgatgcattaattaactctgctacccgtacctgcccatcacgggcacacatggccagagtggaatcaccacagttaggaaggaacttggcctggaagacattatttgtgtgaccactttcaaagttcagtactggcctctgccgcacccagtcccacactatcacctttaggtcatcaccgctactggccagccgggtgccacgctggttaaagtgtacagtattgacacagccgacatggtctgcaagacgatattgcaggcggaaacgctgcacaaaggctcttgccccacaggcctcatatacaaagcggggacgtgaacccagctgccgctggtgaagagcagtaacgacctgccagcgaggtcggggcagggcagatgtctctgaggaaacccactcctccagcgcctgatcctcctctaacgaatactgctcatggttgccgccactgccttgtggacccgcccgaggctgttcttcttcctcctcctcctcctcctcctcctcctcctcctcctcctcctcctcttcctcctcctcccctccctcctcttgtatctcttcgtcttcctcctccctttctgtctcctcctctcccactaaagggtaatggaataaactttcaccactcatgaggaaatgctcaaagtcctccaagctctcaagttcgatgtcttcacttgcgctttcttggtctgagcttcgattttctgtgctggcatcgttggggaatccaccatccctgctatcactgccatctccggtcactgtcacactcagctctgaggtcgctatgtcaatgtctgaggaggcctctgtcgccgccacggctccagactgctcctctgggctgctgaacaggctttcagtccctaagtctggtaagccgtctgtgctgccttcttggtgggacatcttgaacgatgtttgctgtagtagatctggaactgcaaaggccaggcccctaaaagctctgggaagaaagttggcctgcggttaggactgatggtagtgaaggaagtaagcgcgtggcaatcaaacagcaatctgattggctaaaggagactaaataaactattctgccaaggcagttgccagtatgggatcccatgaggttcaaaaagcttcttacctgctcgccgcctcgcagcatccagactgctctagtttttccaggcccagagccccaccccgacaggcatcttacactgtgagtagctgcgggtttttgaagatcgaaacttgctgcaccttggaaaatgttcttattagagaaccatgagcaaaagtgatcctccttaagcaaaatagtttttagaagcctctcagtgttttgcttgaaggtaatgtactctataaaatgaagatgtaggcaagaacagtgaaaagtcagctaagtgtcccatagctagtgactttttgacatacaagaaatatcttaaatcgaacagcttaagggaaaccttgagtgctctaactagtagaatcgatatagggttgccagataaaatacggtatgcatagttaattgcatttcagataaaggatgaatactttttttagtatgagtagatctcaaatgttacattagatatattgccactaaaattttatttattatttatctgaaattcaaatttaacatggtgtcctctatttttatttgttaaatctggcaggctcctttagtgagaagaatttagaccctcagtgtaatgaaggctgaaatcaactgatcaattgaaagtggacactgaaatgagtaattgcttcacctatttgagatagaagtagtacttccttttttcttattccaccagagttcctatatatttatttagagttaattcaatttaagatacttagggaacaccaacacaattttgtgaaaaaaggaaattatgtgatgtcatagaactataaagtcttttacatatcacccagaacatgtccgaggcttctgtggggcctctaaggaacagaaaacagctctacagagacagttaattggcattactgtgttaatttaatagtttctctgaatgaattatctaaggtgatatcagcatattttcaaagggctacagtaaactgctaactaagaaggccagaatgaggaaaacaaagtttccctcagaataattgcaagataaatgcaaaattgattaaaaatagaagtatacagtcttctaaagaaaatggatggttccaaggccaatagtaacagaaagatatgtaaacagtattcatagcaacttgtaaagtctagcgcagcaaactgaaaaccactgaaaagcccatcaagaataacatggataaataatggaataatgtatggaagtgagaatgactagactagaattaaatacatgagcacggatgaatctttaacacaatgatgagtgaaaacacaattaacaaggatagtcaataatttcaattttttgcaagtctatattgttttcatataaaataacatcatttaaaaaggcaaggaagtaattgattcacaactcaggataatgattaaatttcaaaaagagaagaaggttgaaatctgagaaagatgtaacttcaaaaattcttggcaatatttatatcttatcctgagtataggtgtccagttattctttttattatttattgctaggcatatacattttatgtgtatgatatattgcatagtaattctttaaaagaattcatgttcataaacaaggggtcttgctcagccatggaacacaaaaacaggaaacctagagcatcaaaccctaacatacccataaaggaattgtccaggaaaggaagtgtcttagtccatttcgctttgctctaaaggaatagctgaggctgggtaagttaaaaagaaaaatggtttacttggttaaaaggtcagcaggctgtacaagaggcaggcaccaagttctgcttttagtgaggaactcaggaagctttaatcatggcagaaggagaaggggagcgggagtgtcacgtggtaagag

SEQ ID NO: 1563469 - DNA, 4001 bp, Homo sapiens
tttaaaatagggaagcatcctcagtataattgatttgataatatagaatgttaaaaatgtgacccaagatctattttctaaatgaccacaaagaagactctatggctgggtaagttctggtaagaggtaggattttccctattttgaggtgggtacacaggttgttgggatttttggcaatctactcagaaaatttagttgccacacaaaaatctatagaggttataaggggatttaggtatagtgagtcaaatcctattctaataggaatggtctttattaaaataccagacatacctacagctttctttggtatttctcccaatgacctcagccttagggacacaccctaaagtaggctttttagaagcaacagctgagccgcgaccacttacctaaaagaataatcctctgtgaatatgtccaggaaatcctgctcttagggtgcatatttccaatgagttgcaattcacaaataatttctcagcagttcaaagaaaatttgggcataatattttctctgttaacccaaccaaatgtccttcctcgttatacccttaatgatttcatgctctgcctcaatagtgctactcagagttaattatgaacaaaatctagagtaaatgctacaattaagattttcctttttataccctggcagataagcacaatgcatgatcaccaccattcacacttcaacctcagcagagactgaagggtgattgctaatggttctgttgatgtctatagcattagaaatttgagcatcaatcaacccggtgttttgaaaaatacattgcctaattttttttcaaagcaaccgaagaatgtaaccataaccaatgatgccacctcccaccaacggccaccacccactatttaaattaccttcctccagttcatccatgcttccgatcttcctggatccatcaatggtgtaaatgtaacgcactccctgaggcaggttgatgttgtcagacagagatcgcgtcaggtcagccagcaaggcgtcaaagctgcgaaaacggtcagaggacacagcgtacacaatccccttgaagtagcggtccccattgcggtagaaacgtaccttcttggctttcttctcattactcagtgcctgcaaggttctggttcggtagaagctacagtgggcgctgtgagtggggctaggcaacccattcatccgggagcctcgcatgttcctggatgtcttatctctttcgtcaaagtgtccaaaatcaagttccatattttggtggaacctcagagacctgagcgtgggagaaagggatgggggtgaagagaggcaaaaacaaaaagggacaaggagaaggaaaaaagaagggattttaaatattagccagatccagatctgcaatctgctgcttgtgaaaagaactggttgaaaaaagcctgtgacccatctgctgcttgcccctgacctgcaggaatattgatcttaatagagaagaaggaggggctgggcgggggtgctggtggttgtgggggttgggagtaagagatagagagggaggcactcttggcactgttccagacagaggagaaggggagattttgaaatagctgaaaatcctgagacttactgacagtggctcctatcaaattggaacttcgggctaaatacattaaaactggcatctgtttcctcacacatgcccacatgactaacagttgtaaatgaatccatagcctgacaaaattccccttgaagagaacagaaggagctacccaaggttagcatctccagcttaggaagcagtctttgcatttcagtacaatgactatgaagggggagtgttttcattttattccaagccctctttcctactctaatgtgtgcatcccctccccccagaataaactaagattctcctttaaagggacagcctccagggaacagccagtgtctttgtgctattcatcaaaccctttccccaccaagctggtgcagctatccgacattcataagaaataagctggggggaaaaaggattagaaaaataagttatttaacaagttactagctctgtcttcccccggttccatttgttcacaaaatccttttttttcccccccaggtgctccaccccctccccactgatgcagcaacacctcttaatggaataatttaattgttgaaagattcacaaatgactctccgaacagcatacgggacctttagaaggaagcacacctttcattgttctgggtttctaccttaattgaagtgacatttaccctcacagcaggcaattcaccccaaacttgtatattgcccaggtgcattagctgagaaaagatggtcatttgtcaggctttgcttttctcccttctgttgaaccccctcccccaccaagaaccccaaacaatcaaaacatgaaacccaatacaactgaagccacaaatgctagcaaatgtagtgacatcctacgagccaaactattaacatgcatctcacagatggggataaaaggactcacaaagcaagcagggctcagctgctacacactgccacatcaatatatttgcaagggaccaggaggacaggagataagaaagactggtgcctaatgggtctgccaggctcaattccgccttttttccaatgtcaccatgacctatgctgagctcagcattgtctctgtcagacaacctgcagtggtaagagaccccacctcctcaaggcaagcagcaaacatttccccaggcatgccagtaaggctttgctttgctttaggatcagaggtagtattattctaaattaacatcacagtgaaaacaaaggaacatcaaactcacttttccaaaggaaaatcccaggtagaagcttagggaaaaaatcggatagaataaggcaaaaaaggagaagaggagacagagagacagagagagcaggctttgccttgtgcttttcccgtttgacatctgttacattcttcttgaaaatcacttaaaagccccactcaccggttttctgctggttgggtggagatgctgagagaaagaaaaccaatctctctatgcctttgttgtctgagctccaagcaagaaattcctgccagggtggatagatgccttctaggtcctagtgccttgtccagcttctcccatgtaactcaggcttagtgaatccccccaacctcctatgattaattacatgcttttaaaaaaattcacaggctgcattaacagctagaaaggtttcatttataaccaacaggaaattgcggggtagcaaaaagattgcgcagacaaaatcagaatgctctaatgagcaatgtgctagccctttcttttagaaaattggcaatttcacttggccaaaaccttggcctaatctgcctgggggccagactcagacagccaagccaggcttcttagaaattgtagctctcttccttttaccctcttgagagaaaaaaaataaaataaaatctgcagattctttaaggcagtttagctcaagtatccaacaactggttttttgttttttaatgaagtcaacaaagtagactaagaggaagtaggataggaacaaaacaagggaaaataattttagaatattatggaagatagaagtaaaaaggacatcccaaatctatcagcttggtgtaagaatttggttaatgaaaggttaatgtggcatttacctttgagagtttggaagttcaaacccaacccaaagacctttctatgtgaagtaaatctgatggctacaaaataaatattaacagatttctcctcaaactgcttatttgtcactaactgacttctttatataaaatatgttacaaaaaaaactcaaggaagcatccaaattgaactaattagatcaggccgaactataaaacaaaagagaaaggtgagaggttaaatggggtagggggatgctaccatcttcacaattgaagctacatgcatcaatatgtagcagccttgaactatcatggttctatttttgcttggcttccaggaag

SEQ ID NO: 1563470 - DNA, 4001 bp, Homo sapiens
gtaccttcttggctttcttctcattactcagtgcctgcaaggttctggttcggtagaagctacagtgggcgctgtgagtggggctaggcaacccattcatccgggagcctcgcatgttcctggatgtcttatctctttcgtcaaagtgtccaaaatcaagttccatattttggtggaacctcagagacctgagcgtgggagaaagggatgggggtgaagagaggcaaaaacaaaaagggacaaggagaaggaaaaaagaagggattttaaatattagccagatccagatctgcaatctgctgcttgtgaaaagaactggttgaaaaaagcctgtgacccatctgctgcttgcccctgacctgcaggaatattgatcttaatagagaagaaggaggggctgggcgggggtgctggtggttgtgggggttgggagtaagagatagagagggaggcactcttggcactgttccagacagaggagaaggggagattttgaaatagctgaaaatcctgagacttactgacagtggctcctatcaaattggaacttcgggctaaatacattaaaactggcatctgtttcctcacacatgcccacatgactaacagttgtaaatgaatccatagcctgacaaaattccccttgaagagaacagaaggagctacccaaggttagcatctccagcttaggaagcagtctttgcatttcagtacaatgactatgaagggggagtgttttcattttattccaagccctctttcctactctaatgtgtgcatcccctccccccagaataaactaagattctcctttaaagggacagcctccagggaacagccagtgtctttgtgctattcatcaaaccctttccccaccaagctggtgcagctatccgacattcataagaaataagctggggggaaaaaggattagaaaaataagttatttaacaagttactagctctgtcttcccccggttccatttgttcacaaaatccttttttttcccccccaggtgctccaccccctccccactgatgcagcaacacctcttaatggaataatttaattgttgaaagattcacaaatgactctccgaacagcatacgggacctttagaaggaagcacacctttcattgttctgggtttctaccttaattgaagtgacatttaccctcacagcaggcaattcaccccaaacttgtatattgcccaggtgcattagctgagaaaagatggtcatttgtcaggctttgcttttctcccttctgttgaaccccctcccccaccaagaaccccaaacaatcaaaacatgaaacccaatacaactgaagccacaaatgctagcaaatgtagtgacatcctacgagccaaactattaacatgcatctcacagatggggataaaaggactcacaaagcaagcagggctcagctgctacacactgccacatcaatatatttgcaagggaccaggaggacaggagataagaaagactggtgcctaatgggtctgccaggctcaattccgccttttttccaatgtcaccatgacctatgctgagctcagcattgtctctgtcagacaacctgcagtggtaagagaccccacctcctcaaggcaagcagcaaacatttccccaggcatgccagtaaggctttgctttgctttaggatcagaggtagtattattctaaattaacatcacagtgaaaacaaaggaacatcaaactcacttttccaaaggaaaatcccaggtagaagcttagggaaaaaatcggatagaataaggcaaaaaaggagaagaggagacagagagacagagagagcaggctttgccttgtgcttttcccgtttgacatctgttacattcttcttgaaaatcacttaaaagccccactcaccggttttctgctggttgggtggagatgctgagagaaagaaaaccaatctctctatgcctttgttgtctgagctccaagcaagaaattcctgccagggtggatagatgccttctaggtcctagtgccttgtccagcttctcccatgtaactcaggcttagtgaatccccccaacctcctatgattaattacatgcttttaaaaaaattcacaggctgcattaacagctagaaaggtttcatttataaccaacaggaaattgcggggtagcaaaaagattgcgcagacaaaatcagaatgctctaatgagcaatgtgctagccctttcttttagaaaattggcaatttcacttggccaaaaccttggcctaatctgcctgggggccagactcagacagccaagccaggcttcttagaaattgtagctctcttccttttaccctcttgagagaaaaaaaataaaataaaatctgcagattctttaaggcagtttagctcaagtatccaacaactggttttttgttttttaatgaagtcaacaaagtagactaagaggaagtaggataggaacaaaacaagggaaaataattttagaatattatggaagatagaagtaaaaaggacatcccaaatctatcagcttggtgtaagaatttggttaatgaaaggttaatgtggcatttacctttgagagtttggaagttcaaacccaacccaaagacctttctatgtgaagtaaatctgatggctacaaaataaatattaacagatttctcctcaaactgcttatttgtcactaactgacttctttatataaaatatgttacaaaaaaaactcaaggaagcatccaaattgaactaattagatcaggccgaactataaaacaaaagagaaaggtgagaggttaaatggggtagggggatgctaccatcttcacaattgaagctacatgcatcaatatgtagcagccttgaactatcatggttctatttttgcttggcttccaggaagctcagagctaagagcatgctcagtaattattttatatctgattcctagtataattaacccttccttttatatagtgctgttgaacttttatatttaagcattttctctgcatgtgttttattgtaagctgccaccaagtgggataaaatatatgatggtctttcttctgtgaaaggtgttgactcagcaaagcctggaactgtctgttagttgagtggatagcctcaaatgtgcaacctacctagttaagtccccccaacaccttgctgctgatttcttggttactatacaagtacctcaggggaatgcatgtgtctgccctgttttcttccatgtgttgttgccttaccttgtggcaacctcatgaaaaatcaacattattcaggctagaggcaaagaaaaatcaaggaataagggcaggaaaatatggaaattccaacaaagctaatgtcttaaaacttctttcttgcacatcataagcattcagtaaatatgtagcaattaattttgcatcagaactaaaaatcattttatttctggtgaagatacaacaatggatgggataataaaacttaaacacgaaccatttggaatgtatttcagaggaaaattcctcataatataggctttgcaatgctactgtggaagctacaaaatgtttttatgagacagcctaggataaatgactttgtttgctttatatataatagagagcagagggataggcaggatcaatatttccttgtttgagatatgtgggcattaataggtgttccttaaaaacaggaaaaaaaattctgtggtcaaaaatgtctgaaaagtgttgcgctaaacgaagataattttgcttatcataaaacttgtcagggcctttaatataaactataaaatgtgtctcaaaaagaaaacaatttggtatacagggcttccacttatttttaaagctcagaaccttttggtcgccccagaacatggactaatgttctgcagggataaaaaacttttgcaaaaactggactagatcatctccaaagatatttcttctcaaagaactctcagctacttaccaagaccttctttctcact

SEQ ID NO: 1563471 - DNA, 4001 bp, Homo sapiens
cacaatccccttgaagtagcggtccccattgcggtagaaacgtaccttcttggctttcttctcattactcagtgcctgcaaggttctggttcggtagaagctacagtgggcgctgtgagtggggctaggcaacccattcatccgggagcctcgcatgttcctggatgtcttatctctttcgtcaaagtgtccaaaatcaagttccatattttggtggaacctcagagacctgagcgtgggagaaagggatgggggtgaagagaggcaaaaacaaaaagggacaaggagaaggaaaaaagaagggattttaaatattagccagatccagatctgcaatctgctgcttgtgaaaagaactggttgaaaaaagcctgtgacccatctgctgcttgcccctgacctgcaggaatattgatcttaatagagaagaaggaggggctgggcgggggtgctggtggttgtgggggttgggagtaagagatagagagggaggcactcttggcactgttccagacagaggagaaggggagattttgaaatagctgaaaatcctgagacttactgacagtggctcctatcaaattggaacttcgggctaaatacattaaaactggcatctgtttcctcacacatgcccacatgactaacagttgtaaatgaatccatagcctgacaaaattccccttgaagagaacagaaggagctacccaaggttagcatctccagcttaggaagcagtctttgcatttcagtacaatgactatgaagggggagtgttttcattttattccaagccctctttcctactctaatgtgtgcatcccctccccccagaataaactaagattctcctttaaagggacagcctccagggaacagccagtgtctttgtgctattcatcaaaccctttccccaccaagctggtgcagctatccgacattcataagaaataagctggggggaaaaaggattagaaaaataagttatttaacaagttactagctctgtcttcccccggttccatttgttcacaaaatccttttttttcccccccaggtgctccaccccctccccactgatgcagcaacacctcttaatggaataatttaattgttgaaagattcacaaatgactctccgaacagcatacgggacctttagaaggaagcacacctttcattgttctgggtttctaccttaattgaagtgacatttaccctcacagcaggcaattcaccccaaacttgtatattgcccaggtgcattagctgagaaaagatggtcatttgtcaggctttgcttttctcccttctgttgaaccccctcccccaccaagaaccccaaacaatcaaaacatgaaacccaatacaactgaagccacaaatgctagcaaatgtagtgacatcctacgagccaaactattaacatgcatctcacagatggggataaaaggactcacaaagcaagcagggctcagctgctacacactgccacatcaatatatttgcaagggaccaggaggacaggagataagaaagactggtgcctaatgggtctgccaggctcaattccgccttttttccaatgtcaccatgacctatgctgagctcagcattgtctctgtcagacaacctgcagtggtaagagaccccacctcctcaaggcaagcagcaaacatttccccaggcatgccagtaaggctttgctttgctttaggatcagaggtagtattattctaaattaacatcacagtgaaaacaaaggaacatcaaactcacttttccaaaggaaaatcccaggtagaagcttagggaaaaaatcggatagaataaggcaaaaaaggagaagaggagacagagagacagagagagcaggctttgccttgtgcttttcccgtttgacatctgttacattcttcttgaaaatcacttaaaagccccactcaccggttttctgctggttgggtggagatgctgagagaaagaaaaccaatctctctatgcctttgttgtctgagctccaagcaagaaattcctgccagggtggatagatgccttctaggtcctagtgccttgtccagcttctcccatgtaactcaggcttagtgaatccccccaacctcctatgattaattacatgcttttaaaaaaattcacaggctgcattaacagctagaaaggtttcatttataaccaacaggaaattgcggggtagcaaaaagattgcgcagacaaaatcagaatgctctaatgagcaatgtgctagccctttcttttagaaaattggcaatttcacttggccaaaaccttggcctaatctgcctgggggccagactcagacagccaagccaggcttcttagaaattgtagctctcttccttttaccctcttgagagaaaaaaaataaaataaaatctgcagattctttaaggcagtttagctcaagtatccaacaactggttttttgttttttaatgaagtcaacaaagtagactaagaggaagtaggataggaacaaaacaagggaaaataattttagaatattatggaagatagaagtaaaaaggacatcccaaatctatcagcttggtgtaagaatttggttaatgaaaggttaatgtggcatttacctttgagagtttggaagttcaaacccaacccaaagacctttctatgtgaagtaaatctgatggctacaaaataaatattaacagatttctcctcaaactgcttatttgtcactaactgacttctttatataaaatatgttacaaaaaaaactcaaggaagcatccaaattgaactaattagatcaggccgaactataaaacaaaagagaaaggtgagaggttaaatggggtagggggatgctaccatcttcacaattgaagctacatgcatcaatatgtagcagccttgaactatcatggttctatttttgcttggcttccaggaagctcagagctaagagcatgctcagtaattattttatatctgattcctagtataattaacccttccttttatatagtgctgttgaacttttatatttaagcattttctctgcatgtgttttattgtaagctgccaccaagtgggataaaatatatgatggtctttcttctgtgaaaggtgttgactcagcaaagcctggaactgtctgttagttgagtggatagcctcaaatgtgcaacctacctagttaagtccccccaacaccttgctgctgatttcttggttactatacaagtacctcaggggaatgcatgtgtctgccctgttttcttccatgtgttgttgccttaccttgtggcaacctcatgaaaaatcaacattattcaggctagaggcaaagaaaaatcaaggaataagggcaggaaaatatggaaattccaacaaagctaatgtcttaaaacttctttcttgcacatcataagcattcagtaaatatgtagcaattaattttgcatcagaactaaaaatcattttatttctggtgaagatacaacaatggatgggataataaaacttaaacacgaaccatttggaatgtatttcagaggaaaattcctcataatataggctttgcaatgctactgtggaagctacaaaatgtttttatgagacagcctaggataaatgactttgtttgctttatatataatagagagcagagggataggcaggatcaatatttccttgtttgagatatgtgggcattaataggtgttccttaaaaacaggaaaaaaaattctgtggtcaaaaatgtctgaaaagtgttgcgctaaacgaagataattttgcttatcataaaacttgtcagggcctttaatataaactataaaatgtgtctcaaaaagaaaacaatttggtatacagggcttccacttatttttaaagctcagaaccttttggtcgccccagaacatggactaatgttctgcagggataaaaaacttttgcaaaaactggactagatcatctccaaagatatttcttct

SEQ ID NO: 1563472 - DNA, 4001 bp, Homo sapiens
ggatcacaacacatccagactgcgtctccctagcactattacgattattctgaggaaaaaagaaaaagcctaacaaaagacgtcaaggattgtggtagtatttttaaaatttcaatatgcaagcaggactcttatgcaggttgatttaacagtttaaattccattttatctggccactgcaggcaaagcagcagttctttatctcctcaccataggaacataaattaccccacagagaccgtcctccctacttttctcctgtaggtcagaatcaaatcatcgaacttgactattacaaatgctcacatttgagtcctccccttcctttctttcttgtccctggattaattcctacgtggctagcacaaacctaatttatgatgtaaataggtagagcggatccctaaaaagctctgcccctgtgggttcgcacttggcacgtccccctccgtgtcgttgcttcgctggaatttccaatgaaacagtaacagtagctaaggtaactgagagcggggctgaacctggccaattccggagcagaaacgcaaagactttctccgggtctgggggtggggagactggcgtcgcggacagatttccgattgcgcgggggtggtgagaggccaacgagtgcaaaggcggttgtctagtctttgaaggccggcggctggctctgccacgctctcagcaggaaggggaggggaccaggaggaagagggggagaaggaggagatgcagcgaagagcccaaggagggggaggaagaccgggggaggaaggaggggccagaggaggagcccaggctccgggaaagcccgcgcgcccggccggcaggacctcggggcggagtcgcaggctccgtccggccccccgcgcggcgaccctcgcgcggtgcgcctcgaaggggcgggcccgcctcgcagcctccctccgggtttcgggccctccttccccgctcctccctcccctccctcctttccatctcagcagcgccctcagtctccctctcgcaggctcatacaaaagcaaaatgtccgccatgttccgaggcggctgcggttgtcgcgccacgagctcggccctcctgcggtttctccccggggctgctcctccccggtcccctctccccgaccccaggcgcgacagctactccgaagccgccgacggcaccactccgcccgccctctgcgcaccccctcgccgcccgccccgccgggcgacgcaggaccgccttaggcgggggcaggggggtaagcagcccccgccgacttgctcccgcttcccgcctgtccccccacccgtagcccctttaccttgatgcagtacgggggttcgtcgtaggtgaccagcatgtacctgtctccacggctggccgggtcccgggcgcgcagctgcggggcaagggatgacggagggggtcgcgtaggaaaggaggggggagggcgatacaaacgttacagaagcacctcaatccacaccctgaaatccctcgggagctctccccatctctcccctcccctccctttaccttcaagaataactccacagcgcctttggcaatgtccaaataagaggtgcccaggtcagtgcgctggttcatagaggcggacgtgtctatgaggaacagcaggatgggcatcttcccccgcactcctgcctccgctccccactctcccggccctcttgccctcactgccgcgtacggccacctgaaccctcaactctcgcagagccggggagcaaggagcaagaggaagagggggagacgggacgggacgggacggatgggaccgctcctggcctcctctttctgcagccccacctcctctccctccaagggaacttgaaagtgtgagcgtgtgtagccctcggggccctcccccttcctctcttctgctgccaccactactgccgctgccaggactactgcctaagcatccgtccgcgctcactagagcgctcgccccagactgagcgccgtctctgttcactgacaacttctgtctgctcacctaccatcggcaccatgtgaccagaacccatgccattggctgccaattatgtggtatttgcatattcattagatgacaggactaggggagggacttgggcgaaccctgggagttgaagtttgaacccaggcagagggtaaggggaagtgttacggaccctcgctaggattctcctttaaaggacttggaagcagttcgaatgattagttcgggtggtttaaatggatttttctgtctctcttcaaagatggtgattcgaaaagaagagtgaatttgagcaacagttgtacagaagtacagaagcagatgcttggacagtttgcacagaaaattcttcgctaactgcaatcgatcaatcctgccagtggcgaagacgaaaatatttcagaagcagcaaacttctttcctggcaggacgtactcacattcctttagatccctcccccgtcttgatcagtatttgtgagttggttgctggccttgcattccacatatatctacttagaaaggaaactaaagcttaaacacagttacagttacctaaactggccttttgtatgcacaagcttcttcagtttcactaagctctttgaaacattggcctgcctgtgataattccaccactgttccctctgcgcagcctttacacatggaggtttgcaaacctagattgtgattcaactcacatatttatttatttatttatttttataaataaataaagaggatctcgcttgatcgcccaggctggagtgcagtggccccatcatagctgcctgcagcgtccagctcctgggcttaagcgatcctcccatctcagcctctcaagtagctgggaccacaggggcaggctctcaactcacatttattgagtgcctatgaagagccaggcacccacggtagccttgtttaatctttgaattaattatggcagatggcattgtattcaattttcagtagaggaaaatgcagctccctgaggttagggtaacaattacggatactctcaggtctggctctgtgaagagactcagtaagtggccaaccacacttgattgactacttcatatgacacaattttaaaaattggacttgtgtattcctggcaattactattgacaatgtggaatccaggacttcaatgagtttgcagtttcattgaggagagatgatgacatatacatacataatattttatatattttggccaggcgcagtggctcatgcctgtaattccagcactttgggaggccgaggtgggtggatcatttgagggcaggagtttgagaccagcctggccaacatggtgaaacccccgtctctactaaaaatacaaaaattagccgggcatgggagcaggcgcctgtagtcccagctacttgggaggctgaggcaggagaatcacttcaacccaggagacggaggttgcagtgaactgagatcacaccactgcactccagcctgggcaacagaatgagataacatctcaaaaaagtattttatatattttatatacactctctctctctctctctctctctatatatatatgtatgttctgtgtatatgtttcatatattatatatgcacattcaataacattctcagagaaatacgattttaaaagaagtcatatggcagtatatgaatcagggacaaacaaggatgcaagttaaaaagtgctatggaaacaatggtccagtctagaaattcataggatttcacgaacaaggcacaaaaagggaagagagggaatctgggttggaaggaatgatatgaacaaaaactcagccaaagatagtactatgtatggtgcatttcaggccattctggtggaaagtagggaattaatgaagaaataaggatgaaaaagatactagaagcccccatttccattccgatacaaatgtcagtgtagaagggcaatgcctacatgggctagggtacaaaaaatataggactgttgggggcagtgtgttagttttctactg

SEQ ID NO: 1563473 - DNA, 4001 bp, Homo sapiens
taccatgtttataaatcttgtgtttaaagctcagtatgatacggccaaaccgcatgcatcatcaatggagtcactgaaaactggaagcagatgctatacttttaaaaaatgagtgtaagacttcaggcacctaatttccagaatttctatgagcaaaaacaccactgcgctttctcttgctaccatcaatactttaaagcacggtaggaacacaaactttccttttgcacttgttatagcacaattttgctttttaaataaggttcactgttgcctagaatccttaaaaggacactatagctaaatggaaaatggtaaaactgggaatactctgtgctgctggtaggttgttaaagtgtctgttcaattcaacatgtgtcagcaattagaggatttaatataattggttcattaacgggtagaaaatgcttccaaaggaacagatcaattcctaaaaaatattacatatgactacattaaactatgtattcaattaatttgtgccactaaacttcgtctcaggattattccggagtttgtgaaatcaacgctcccctaatcacagtagacagtagtttatttaaaagctccgcataacccacacaagagcttatctgaagcctggtgccactgttgcggtgggatgcagacttcctgccaccaaagtccataaccttctcctctcaaatcacacatctttctctcctctgcccctaaacccttagaagaggggattctggctaagagaaaaaacccgggggcctgggacccattgcaagattctactccacagatagcaacaagtcaacaacaaaactgtttacttcccccctaagccgggtgtttttccaatggcggattcctggatcacagtcactaacacgaagacactaccacaacccgcgatgacccctccaccccagaaaaacaacgcgggactcccggctaacataccacacagggacaatctggggcaagcaaggaggagaaagggcctcgctggctccctaacctccccgccacgtccaacctctatctccagggcccagcgcgcagcggccaattcctgcctcccctccccgcccccacccctcccccactcctccccaatcttctgcgtcacaaaactttccactccggaaacgcagcctccccggctgcggcgcagggcccccggaccctgcggaacctgggctgaagcgaaaaagccagcggaaggaacccgggaaaaaacaagaaacccattccatcctcctttccaggccttcgcccgcccgagacccgccgtctcccggaggtgagccacagcgccgcccagcaccacacaaaagaggccgccgccattaccccgagcgaaggccgccccctcccacattcctgggccgcgttctaccccttgctcgcaggcacgcaaacaccgggtgccgccaggtcctccggacgggaatccaggctgcgccagccgtgaaggccgaagccctccaagccaaaagggcctccagtcgcgtcccgccgcgctgcgcactcccgcaaacccccccaggtcactaatcagtcgggattcgcgcatgcgcgtccccgcgagagcgcgcgcacttcctccccctccgcccgcctgcgcacgcacacacaaaagccgccattgtgctcgtcccggggacaatacagcgggccgagaccgggcccgggcgacagccccaaccaacattcctatccctctatagccccggggcactcacacccgccagcccggggcacccagaaaatgaaaagtaagggtgccggttagcgctgcgccattagccaggttaggtcaggggaggaattcacgcagcagccagcccggtggggttcttgcggctcacctgctggtccagcccgagcgcattttccactgccacatgactcatccctgaagagtaccgagaactcggagtcttccgctgctaagcgagtgtttgttccaccgcgaaggccctctcacgggagaactgcggctctggagcgcaccgcgcggccacggatctaatatacccgctggaaagccggctacgtcagcacgtacaacgtgtgccctccctctcacaccgcaattccctgtcgcggcgacttctgcccggctactgcgcgctccctcaggtctaagctcaagggatttcctacttagtcctgtcgcccctagcagtcctgccttggagcttagggtgcgaaatgctgtcccagttctctcgagctacacttcccgtgctctccgctaaaaccctagtctcagcctcggagttctcgagatctcgcgagaacttgcgtctcccgctttccaccggctaagacgcctgaaaatgttaacctaggcctcttcgcccccctttccaaccttacgcattcgctcccctttccaactctatgcactcagctttcgtttttcgttttttttgtttttgttttttttttcctaacactggccttcactcttcttcctctctcagttcccgggcttggagatgtggtgggatttctccggtctaatctgccctcgctcttccgcgggtagcctccccttagtgggagctaggcagattcccgaaactgagagggcggcaggccacgtgaccgtaggtgtcgcgtgcggtggccattttgtgaagcaggaaacggtggcttgaatatagagtgctccggacgggggaggggaggggaagaggaggagagaacagagggaaggggaggagagggagggaaaagaggggagcggagtaaggggaaaggaggagggaggagggtaggatggtgaccggggcgggagtcggggggaaatggaggggagccggcggcgcgcgcaggtggccggacaccttcctgcgcggttgcctaggcagcgggggcgccgcctagaaacacacaatggcccctcctggccaaccccccgacgtgtgcgcgcgcgcctccgcccccgccccccgcggtgagggaacaatgagacagacacgcgctgatccggaaccgccgctggcgcgccctcccgggaccccggctctccgcaggaatgcgggctacatttgcccctagtttcctcccgcggggcgcccagcggcttagggccggtgaccaccggcgttgcggggaccccgcgggtggcgaacggctcttctagggcccaagggtgtcgggaatgtttgtagccggtgcaacctgggcctgccggaggggctgcagcggggttaccggcctgggctcggggtgactctcaggccgctgcggtggatgaggaacaggaggaaccgggtttctaccgtcggtggaacctcttcctgtggttccctcctaggcaggccaccccaagtcccggcttcggtgccgcaggcccttaaatagaagaaggtgtttactagtggattcccggctttgagccggcgcccgcacatccgtagtttcttatgaccgctttcccctctcttctgaccctcagccctacgaaattaaataaaacgcagtggtttccaccacccccacaaaaggtcttctgctgccagaattcaaatagttcgtgctcatcacataatttactatacacataacttctctcccttctcaatttttaaaatcgagacggaaattcgaacgagatagggagagaatatcacactgtcgggggcaagttgtttaacggctttgggtctcaatttgctcatctataaaaggagtctgctacattccataaccctgtgaaagacccaactccttttcataacgagtattttctaacgccccctttacctatactgaaataacaaaacctaaattgtttatgtaaacctacaaacacaatttcaaaaaacatgatctgtcaacaaacgaaagcaaaatgattataataaaacaatgtattataatatgtaaatgccgccgcacagctacactaactggtgggaagacacttgcccagtagagccacaaatgcaaactggaaaggtgtgttgatttcacaactcaagttccatgag

SEQ ID NO: 1563474 - DNA, 4001 bp, Homo sapiens
gcggattcctggatcacagtcactaacacgaagacactaccacaacccgcgatgacccctccaccccagaaaaacaacgcgggactcccggctaacataccacacagggacaatctggggcaagcaaggaggagaaagggcctcgctggctccctaacctccccgccacgtccaacctctatctccagggcccagcgcgcagcggccaattcctgcctcccctccccgcccccacccctcccccactcctccccaatcttctgcgtcacaaaactttccactccggaaacgcagcctccccggctgcggcgcagggcccccggaccctgcggaacctgggctgaagcgaaaaagccagcggaaggaacccgggaaaaaacaagaaacccattccatcctcctttccaggccttcgcccgcccgagacccgccgtctcccggaggtgagccacagcgccgcccagcaccacacaaaagaggccgccgccattaccccgagcgaaggccgccccctcccacattcctgggccgcgttctaccccttgctcgcaggcacgcaaacaccgggtgccgccaggtcctccggacgggaatccaggctgcgccagccgtgaaggccgaagccctccaagccaaaagggcctccagtcgcgtcccgccgcgctgcgcactcccgcaaacccccccaggtcactaatcagtcgggattcgcgcatgcgcgtccccgcgagagcgcgcgcacttcctccccctccgcccgcctgcgcacgcacacacaaaagccgccattgtgctcgtcccggggacaatacagcgggccgagaccgggcccgggcgacagccccaaccaacattcctatccctctatagccccggggcactcacacccgccagcccggggcacccagaaaatgaaaagtaagggtgccggttagcgctgcgccattagccaggttaggtcaggggaggaattcacgcagcagccagcccggtggggttcttgcggctcacctgctggtccagcccgagcgcattttccactgccacatgactcatccctgaagagtaccgagaactcggagtcttccgctgctaagcgagtgtttgttccaccgcgaaggccctctcacgggagaactgcggctctggagcgcaccgcgcggccacggatctaatatacccgctggaaagccggctacgtcagcacgtacaacgtgtgccctccctctcacaccgcaattccctgtcgcggcgacttctgcccggctactgcgcgctccctcaggtctaagctcaagggatttcctacttagtcctgtcgcccctagcagtcctgccttggagcttagggtgcgaaatgctgtcccagttctctcgagctacacttcccgtgctctccgctaaaaccctagtctcagcctcggagttctcgagatctcgcgagaacttgcgtctcccgctttccaccggctaagacgcctgaaaatgttaacctaggcctcttcgcccccctttccaaccttacgcattcgctcccctttccaactctatgcactcagctttcgtttttcgttttttttgtttttgttttttttttcctaacactggccttcactcttcttcctctctcagttcccgggcttggagatgtggtgggatttctccggtctaatctgccctcgctcttccgcgggtagcctccccttagtgggagctaggcagattcccgaaactgagagggcggcaggccacgtgaccgtaggtgtcgcgtgcggtggccattttgtgaagcaggaaacggtggcttgaatatagagtgctccggacgggggaggggaggggaagaggaggagagaacagagggaaggggaggagagggagggaaaagaggggagcggagtaaggggaaaggaggagggaggagggtaggatggtgaccggggcgggagtcggggggaaatggaggggagccggcggcgcgcgcaggtggccggacaccttcctgcgcggttgcctaggcagcgggggcgccgcctagaaacacacaatggcccctcctggccaaccccccgacgtgtgcgcgcgcgcctccgcccccgccccccgcggtgagggaacaatgagacagacacgcgctgatccggaaccgccgctggcgcgccctcccgggaccccggctctccgcaggaatgcgggctacatttgcccctagtttcctcccgcggggcgcccagcggcttagggccggtgaccaccggcgttgcggggaccccgcgggtggcgaacggctcttctagggcccaagggtgtcgggaatgtttgtagccggtgcaacctgggcctgccggaggggctgcagcggggttaccggcctgggctcggggtgactctcaggccgctgcggtggatgaggaacaggaggaaccgggtttctaccgtcggtggaacctcttcctgtggttccctcctaggcaggccaccccaagtcccggcttcggtgccgcaggcccttaaatagaagaaggtgtttactagtggattcccggctttgagccggcgcccgcacatccgtagtttcttatgaccgctttcccctctcttctgaccctcagccctacgaaattaaataaaacgcagtggtttccaccacccccacaaaaggtcttctgctgccagaattcaaatagttcgtgctcatcacataatttactatacacataacttctctcccttctcaatttttaaaatcgagacggaaattcgaacgagatagggagagaatatcacactgtcgggggcaagttgtttaacggctttgggtctcaatttgctcatctataaaaggagtctgctacattccataaccctgtgaaagacccaactccttttcataacgagtattttctaacgccccctttacctatactgaaataacaaaacctaaattgtttatgtaaacctacaaacacaatttcaaaaaacatgatctgtcaacaaacgaaagcaaaatgattataataaaacaatgtattataatatgtaaatgccgccgcacagctacactaactggtgggaagacacttgcccagtagagccacaaatgcaaactggaaaggtgtgttgatttcacaactcaagttccatgagcagcattgctactaggaacctcattttccaaaatgatgaactattaataatttttaaataaaacagtacaatcttccttcaattgaaacagtacctgcatttgtggaaaattcaggatatatggaaactgggcaaagatactttgtgttcatatgtaaaacagtgttagttctaggcttagatgataatgaactagtttttcaccgacatgtgtccagtgattcaattattcgctctgtgggactgaccagcatcatagaacatcctagcgtgcctggctcctgcccactaaatgccagtagctctcgccagtcattgtgacaaccagaaatacacagatttctacaatgccccttggagagccactaggtttaatgatattagggtcccttcctgccctgagattcgtggattctcatggagttttggtgaaggacctcggttttgtttcagtttcgttttcctatgaaccagggtaaacatgagtcaggttcgaaaactgtgagttccgacagctcttcaaactgcatatagcaacaatgggatgcactgactaccctggttctgggctttgttttacttttgagtagagccgagtacagggtaccgccatgggagtacctaaaagaattgaaatatacagcagttccctattttcaattaacccctgctcataggcatacttggttcaaaccaccagggtattttgttaatcaatacgttataattggaatatccaattggagaggaagcgggaaaacatacaaagctttgtctttaaacacattcactttgaaaaagaatgatgtgcacacttgaggcagctaaataaatgagccaactttcacagcact

SEQ ID NO: 1563475 - DNA, 4001 bp, Homo sapiens
acaacttttcaacttaaaaaataaaactccttgcgtctttgtccaggttttcttgatcgtgtttctctgtgcctcttttgttgatttaacttgtattgctcagccattactacaagatcttccggaacactctgatttgctctgtccagaattttaatcaattcaccggccattttcgaatctctctgagtgatgagggtaactgatgtgccagtctttcctgtccgtccaatgtaccctactctgtgtacatatacgtcaatattccttgggaaatcataattatatacatgtgtgacatcattaagatcaagacctcgggatactatatcagttgtaatcagtatctttatgtttccgcttttaaagtcctctactgctcgctcttgatcactctgttcactgttgccatgtaatgattctgcagatatgccttggatattgaagtcgcttgacaagtcatcagcaatatgtttttggctgacaaacatgatgactttgtcgttgggtgacatgttctctacgaattcttgggtgagagctcgtttttctttttctgtggtaacaattatattttgcttcactgtatttacagccactagattcagattaccaacataaacaatcataggatctttcaaataagaaagtgctagttgacgtacagtatctggccaagttgcacttgtcataacagtctgtcggtctgggcgcacatctaataaaatcttccttatctggggttcaaattccatatccagcattttatctgcctcatctataaccaagtaggttatgcttcttaggttgacagagttattcatttgtaggtcattcagcctcccaggagttgcaataatgatatctacacctttgctaatgtcttctatttgtccatttctgtttctaccaccatatatgcaaatgcttttgagacctttatatgaatactttgaacattcagcttccacgtgaagagccaactctctagtgggtgtaaggactagcatcccaggcccattcctttgctctctagatattggttgagaatcaagatgaataaacccaggcattagataggacaatgttttccctgttccggtttgtgcaactactataagatctattccttgtagaataattggccatgcctgtgactgaattggcgttggctttacaatccctacccttattatgcttttcagaagatcagggtattgctgaaaagcgtctttaaacctgcaagttggttttggaatgagacgcttttcaccacttttcaagtcatcacacgttatgttgaaattttcctttctccagttaatcacctgcatttcagacatgcagcttgttgctttggattctatgtaaaagtttttcttaactggtggtagatctgcccattttctcttttcgcactccacgactgctgccctaatgcgatcccaatttgacaatggctcagcttctccaacaatgtcatttctgcctagatttcttccaataggggtttgggatgcagcattatccacactggattctgagttgtagctttcttgttttctaataagtgtttctatagccgctttggcctttgctttcatttccctattgccaaaaattctgacttttgcttcagattccccgtttatgatctgtattttagtgtttgtcgaatgttgtagatcttttatttttgatccactgtaaccaatgaccacaccaaccatattgttctttattttaaagcagagtggtggttcacgggagcctgctgctctcggtccctgatggccgaaggggccactccagccactgcctctgctgcccctgacatcccagctggccccaaggtctcttggattagcctccgccctcttccactctggggcccagtgggacattgtgggatagtgggagtatcggcaccggcttctcgcctacatacggttggaagttcaggtctgcggcctgtttcccgtcaccttctgcaccaaaagatggcggtggcaattatttccgggtgctagtcacatagctacgcagaagttgccccagaaaccagtgttggcgtcgaattccgggtcgtgtagggggcgaggctttgatggcctgaccaatcacagggcttggactggggtgaggtaagcaggcgtctgtgacgcaaatttaaagaggcactcactctcacgggctgaccctgccagcacttacaggaccctaggagtaactgcctccttaacttctgcgtcccgggtgctcctttcactcttctcgtgatagttctggctcagcttgagagcaaccttgaagcacgccttaaacatacacaccatatacacattgtcctttatataagccagttatttccctaagagaaaaaaataatgcatttaaagtaaaactatttatttatatattcgtgtgttcatttattttggtaaatttcttttggagtgaatacagtactttgtcaggataaattcatcattccctgtcctctagtgtaacttaaattctactaatcagaaatctcttaggtgcacactctaggacagcgttttgccttaattcatcaactaaatgtcaacacttgtttaggcagtttccagatattattacagggatgatggttagaagagaggtaaagcagtgcctaaggtactttaggggctgtttttagtggtttgtcacttttctcagtgcctcttcattttttttccttccctgtggtttgatagcttctgagaccttagcactggaaggttgtgtagaactcatttattaggtacacgtagaagacattctagctgcagtctggacagagggatatccagcttccatttagacactcccagaggcagggagctcacttcatttcaaaaatatccattccattatgaggctgtttaatggttacaaaagttttttgaaccaaaacgtgcggcttcctgtgtccttaagtccttctgagttctgaagttatacagaataggcttgattctcctgtatccttgtgtactaaaggatctgtcaaagttttcttttttttctttttcttttctttctttctttttttttttttttttttttgagatggggtttcactcttgttggccaggctggagtgcaatagcatgatcttggctcgctgcaaccttggcctcccgggttcaagtgattctcctgcctcagcctcccgagtatctgggattacaggtgcctgccaccaagcctggctaattttttgtatttttagtagagacagggtttcaccatgttggccaggctggtctcgaactcctgacctcaggtgatccacccgccttggcctcccaaagtgctgggattacaggtgtgagccaccgcgcccagcctctgtcaaagttttctgtgcatcagggcaacatttccagtttcttcgacgtttcttgctatgacatggtttccaagacacacatcatcctattgcctctcctttggaaatggttcattgaggaccatttacaatgtagcacgcagaactaaaaaacaggaaaagacaagcaaacaatctgcagaaatggcattactcctactattagggcatctttactgagcatgacaattctactaatttgacctaagaactcctgagacacaaagctgctcacagtaacatgacgtgcatttaagttcttgcttcttttacttactcagctgattttttttttaatttgcttacctaaatgaagactatgtatgtatccttttatagtcatcttattaagtttgatcaattgatgtaacctatgaaatataattttaatgattattctgtcatccatcatattagtctctagtttcaagtcttctgccaatttaatgttcatagcatctttgtctctttagtcagtcactgattaaaatttcatcatggtctagtataggacagaagtctgacaccttgggagaaaacttctctgtgtcagtactttttgtaaaagatgctatttgaagaa

SEQ ID NO: 1563476 - DNA, 4001 bp, Homo sapiens
tgacctctttcccctgctctctctgccccatctctgcccactctttctgggacccggatttgacacggttgctgccaccccaatagcaagtctcttaggacattcctgtgctcctcactttcctggctgagggtcagaacttatcaaaggggtctttttgaggaagttaggggaaatgcaaaggaaaacaaaaggaaactatgaaagtctagaaacaactaagtttactaacaaaatgactttcttctctcgatatagctaaagtcaagccatcaatgggcttagcatgttttgattttaataaggcttaataagtctgcattttgagaaggctgtggacccctctggcagtctggtgaagccatggaccctttctctgaataatatgtttaaatgcacaaaataaaatacgcagatttacaaaggaaacccattatattaaaattcagttatcaaaatattacccacaatataatatagtaacatatgtgcttcttgatgtatgcattaaataaccagatctaacagcagtgccaataactactggaattttgaagtagtcgtgaacataaatgaaatttcgagatgcctgcaacaactataatatgaaatgcaaatctctgtgatgtctgttactgacactcacaggtactcctaacacttcgtggtttattgcctacattcatcattgaaggaaatactacatttcagttagaggttagtggaaagaaagaggcagttttattcatcccaattcaaagtaacccccatccaccctgaatttttggtctataggaccctggttgagagcctctgctctaagggtcatatagcctcccatgggttggaaccagctgtctcctacctgtctcatccttcaggatgacattatttctcctcatccagttttcaagcttgcacctgtaattgaccacccccaaatccctggtttctggcagggaaaatcttggagctgtcagcccgtttgccgtttgcactccagcctgggcgacaagagtgaaacttcatctcaacaacaacaaaaaaaagctgcctcagaagagccttgggtgggagaggcccaacattgttgacttctgtgctgtgagtccacagaacaactggctctttctcaaaattctgtctgagatgtcactcaggcagccctcagattttccagaattgtctcaccataaccatagactagaaaatcaccctacacctacctagtaacaccaactctgtaagccaccaccacttctgccctgtccctgaatatgactcttttcagctagttcataggggacagctcctgagaagactggagtgatttttttttttttttcatcttgagacggagtcttgctctgtcacccaggctggagtgcagtggcacgatcttggctcactgcaagctccacctcccgggttcaagtgattctcctgtctcagcctcccaagtagctgggattaccagtgcatgccaccatgcctggctaatttttgtatttttttttttttcagtagagacgagatttcacaatgttggccaggctggtctcaaactcctgacctcaggtgatccacctgcctcggcctcccaaagtgctgggattataggcctgagccaccgtgcctggcctggagtaatctttaaaccagaacagctgcagcctcactcctggcctttgtgccagccagatccttcccagagggtggagatcacccagatgatctctttggaaccctcctcatctggagattggccactcttttggtttgttccccatgtgctctccagcccttggggttcactcacctaaaaatatatagactgggatccattgcaaaacaaagaaggtttggaggccctcctggagattcagtcgggagaagaaagccatggttatggtgctgttctgttgtggcaagaagcctaaccagaaggtcaaaacttcttaagctgagttgattatagatgctttgctataatctcttactgtggagtaagattagctgctggggttttgtcaggcttgaccaaacttttcctccactgccccgccccaacttcctacccacacatcaggttgcagatcaggcaatataattgatctccccagtagtatcctttctccacgtgtgcccaattgtaatgaagcagaaatggccctggggcggctctagctgtgggggaggggcactcttgataaatcagcgcaggaagagagtatcttgggcctcaaataggacctccgaaaagcaccccactacctttccctgcttaagaaaagggacttggcagccacacttgttcctgccctagtggttaccctttgtctcctcttgtcttctgctgagtcacctagcccactggggctgtttttctgcaccggatatctgttaatagactcttcagatccctctttgtgcctctagtcccaagggacctgcctcagtggccagataccttatcatagagcgggagaaacattgcacagaaggaagacctggctcccagtcccagctctgccatgctcttcctgtgacacctttggaaaatgttacatctctctagagctcagtttgagcattcattgctagaatgtaatataggttaggggcatagactttagagccagatagctggggttcacatctcagctctgtcacttacaaggtggtgaacctctatgccccagtttctccatctgtaaaagtgggactataatagtacctacttcttagagtagttctgaggattagataagtgaatgaatataaagtgcttagcacacagcctggcaccgtttcctgtcattactactcactgagttcaagtaacacatattgaacaagtaacatatgtttcaggctgaggcttgcttctgtgtaatagcctttggaaaactgaagactgttcccaggtctcagaccgttttttttctgtttgtttgtttcgtttgtttttttttttccagacagagtctcactgtgtcgcccaggctggagtgcagtggcgtgatctcggatcactgcaacctctgccttctgggttcaagtgattctcctgcctcatcctcctgcgtagctgggactactggcgtgcgccaccacgtccagctagtttttgtatttttagtagtgagagagtttcaccatgttggatatattttttctgtcactatctattgagtgactgctgtttgccaggcactgtgtttaggtgctgaggattcagtagggaagaagacagacatgattcttgccttctttgagtctacagtctagtggaggagacagacattaaaacaaaaaaaaaatcacaaaaatgttaggctgggtgcggtggctcatgcctgtaatcctggcactttgggaggctgaagcgggagggttacttgagcccagaagctccagaccggcctgggtaacataacgagatgccatctctacaaaataagtaaataaataaataataaaataaaattaagataaaatgtctgtacacttgaagttgcaatgtgtcctacaggaaaagcccagtactcccagcagaaggccttgaatatagaaggtagtcaaaaacatctgttaaacataactgaaggggttgctgggaaaatgagatacaaaaatggtatcaagggttctataagtgcaagggggcattggtcccttttccagggagattgttggaactctgtcatctccccacccccactctgctttgggcttcccgcattagactgaccaatgtgactcttcagagctgagcttggggaacttttctggtatgtcagggtgtgctttcactcccccgtgtgcactagatggtcatctgacatgcgacaccttcctcttcctcctctttcttttcttccccttgggctagctggggttctccagctgcttcttggggctgcttgaccacatagaaggtgagatgtatcagagcgtatctgctcagaatttgcacgggaggagggagggaggtaaga

SEQ ID NO: 1563477 - DNA, 4001 bp, Homo sapiens
tcccgcattctacattctataagtgtgcggtccacagcagaagggttcctgagccgtgtccttatggtctgctaggcagcaggatggaccggtattgttcgtgtgttgtgttattcgtttgtgtgtgtgtgtgtgtgtgtgtgaatgcgcgcgcgtgtgtatgtcttcctgcaggggaagctaaattgaggtgtgtgtgtgcattatcctggttttcagttttgtggaacgaagtttagggtaaaggaagagtagggagagtgcagagaaagcaggaaagacaggcatactcccgcttaagagcagacggggtttcagggtccaaggtaaacacgaaaacctttttcctccctactccccttgggcgagtgccagaagattctccactcatcttttcccggctaagtgtaacgatttagaaggcgtcgcggtagactggtagagatgaaggttccccttcacacgttctgcaatcccaactcctattttcgtgtctctaaaccaggactcctgtaccattccaattggccctggtgcgggatgccagttgccccgtttgtgacgctgcgcaacattgtatcactgcgtttgcacctacctgctgggaaatcctgcagacagatggaatggtggcttcgacacacgcatgctctccccctcctcccggagaaccctgcccttcccctgcagtgcgcgtgggcgccgcccatcccctcgtcctcaccaggagtaccagctcgaagcagccggcagaggcgccgggcacctccctggagggccgccagttgcgcccagctgaggcgccccctccccagtggcagggagggggccaagcaggcgaaggctccgcagcttgggcctctgcggcagtgaccgcggctaagaggtgtgtcccaccgcccccactcaatccgtccgctatgtattcggggccagccccaaacacttctccaggtctcttgcgctccccgagggtatcttcctcctctctttcaagatattggcgctcaccgcactgtcgcttctcttcaaggggaaaactgctccgattcccaccccctgctgtcacccccgtttctagccccaaacagcccattctcgattcccacatgttgcttcccgcctcccaaccccttcccattcccccgggttccccatccctgcatctttctcagcatcttggccagccagtgccagacaagcgggatgcaaggggtacccggagtcccgcgggctccatagccatctgacttcgccttgcttcttttccccgcttcagggggtcttttgcttacctttattctggaccacgacattggcgttctgggcgatggcgatggcgatggcgatggcgaggtctttagacctctctctcgagtgtccaccggacattgcaatagacatggtgctggacttggacggaactctggagccgcctcagggcagaactctggggccagctctgtcacaggttctggggtcggctctggggccagctctggggcaacttctggagtcagctctggggccggctctgggaccgactctagggcaggttctggagtcggctctggggcagactctgtggcaggttctggggccggttctggggccggctctgtggcaggttctggggccggctctgtggcaggttctggggccggttctgaggccggctctgtggctggttctggggtcggttctgtgtacagttctgtggctgattctgaggtcgcctctggacagggacctggagcaagctctggacagggctctggtatgggttctggcgaagcctcggagagcagcggcggagccggcggcggagccggtggtggtggcggcggcggccaaggcggcggaggctctggagactcagcgggctgctctccatcctgaggcggggcagtgccctgggctgcggcagctccgcggtccatggccgcacaccgcttcaggtctgggcagcctgagtccctaagcctggaaggctaaagtaccctcgggcgccccgcccactccagtccggcagcccctcgcagggtgccaaactttcccccatcccactccatggctggcttggctctgaggtctaacccgtgggcgctcagcgtctccctatgctggaacacgcccctcagtgtgcgcacacctcttcgtaagcagccacgggtccgatgggcgggaagcagaggggcttgcgaacgcggactgggcagagcgcttgatgacctcctagcgacgcgcgggaggggaggggagagacaaaaaggggagggggagtggagcggcgtggaggttggggggcgggctggagccttgccgtgtttaaccctttagtgacacgaatgaaaaaaaaaagccagaggcgaagttgagggtctttgcaatcccccaaccacttagctgctggtcagaatagcttccatcctgtgtctgctctctcacctcagcagcaggtgagcttagcctcggaccaacctcttgccccccatctccaagcctcgatgggcaagtaatgctttttatctaagccgggaaaagaaattaagcggcatggtgtgtgtgtggtggggggggggggtgcggggggggcgggtgttcagcctcctttggattgaagtacaatttgaccctcttcggttttttgcatttctgagctttgccgttgggtacagagtttgaggtgattcgggaaaggagtgtgatgagggaggctggcgccccggctttccgcagcctgcagcctccccgagagcaagtcgagagtgccccggcagcagctgggcttcgcgctcgggagctgaggctatctgggcgtctgtctggctcgcctatgctataggagcctgccttgtgcttttagctggatttcccagccatcagcaggagtttgtttttccgccccccccaaacttgttaacgcgcgcgcgcgcgcgcgtgtgtgtgtgtgtctgtgtgtgtgtgtgtgtgtgtcttgggctggggaaattcactgcaacacccacacccttttcacctcctgaagcagtctgacattagagatgggagattctcttgggaagagaacgactgatgcctagcgcagcacctttcccaccacatcggaagactttagaagctctttctgttatagtcacgtacacatacacacaaaccatcatcttagtcagacctagactttagacgccaatatattaccaattgtaattaaaatttgagaagactacctgttaagccacagctgggtggggggagcggacgggggagaaatacctgtaaacctgatttgaaatatgacaagtgaatttatctcccatacacataatgctgcagttgtgggtagcagccttctttctgcagccccttctctagccatctactcccagaccatatcccccactattccctcttcttttgccaacggacactgacctagccagaattttctagaatctgcaacatctttctgttgcctatactatgtctcagcaataaataataccataagagcacagtttcacctaaatccctccaaagaccagaatctctggtgaggtctgcatttcccagatcctcgctgcagcctcacagcctaagcccacctttccagagatgtgttaacactgcttggcagctactaagctagtgcagggaccgtccttaaactctggggatgggaagaccaggagaagtgagccctatcaattccctcacgtggcagtcctccttccagtaaattcaccttaggagcccactctcttcaccctccttgggcttgttctcctttcccctatcccacactcaagtagccaagccgcctttaaccctaagagttcaggactgaaatatacaggtgccagatctcattattggatctggtgcattaaagtgccagatctgaccaaccagcaagtccaggactggagatcacttttctggctctcacaccttaatggaatccctgtccttagaaggggcagatatcccacatttaaatt

SEQ ID NO: 1563478 - DNA, 4001 bp, Homo sapiens
aatactgaaggccagtttggcagaaaaagaaaagcttagctcacagaaaactcaaagctctttttctctggctagaggcgggagagagaggctcattttaaaacatccactccaggcacgcttctcaaagggtggcgctgggacccctgggattccttcagtgggtgcagagtggaagtcaaaagtcatttcacaataaggcacccaagcgcttcgcctggctgactcccagtctcccagaggcgtgcagtagtgtcttccagaggcctcctgacatgccatgaaactgtctacagaggcagaaataacagctctcttcttaggctggacatttaagacattcagggcaacgtacacccccacccccaccacactgaccctctgaacgctctgttttggaaaactgttatttttgaaacaaagtatcatttaacctaacatggaattaacattccctttattccagttcacaaataattgtttacaggtttctaggtttaaattgagaatatgggctgggcacagtggcgctctgtctgtaatcccagcagtttgggaggcccagactggaggattgctgcaggccaggggttcaagaccagcctgggcaacatggtgagatgccatctctacaaaaaatttaaaacattagccaggcgtggtggctcacgcctgtaaacccagcactttgggggacccaggtaggaggattgcttcggcccatgagtttcagaccagcctgggcaacgtagcaagaccctattgctacacaaaaaaattaaaacattagacaggtgtggtggctcacacctgtaatcccaacagtttgggaggcaaaggaaggaagatcgcttgagcccaggagttcgagaccagcctgagcaacatagcaagaccccgtctacaaaactttaaaacattagtcggatgcagtagctggtgcctgtaatgccagcactttgggaggctgaggcaggaggactgcttgagcccaggagttcgagagtagcctcggcaacagagcaagacttcatctctacttcctattacaaaaaataataataataataaattctgaacctgcaaatctaggaacagaagttatctgcatacacaaaacacagtggcggtcatcactgatgagttcagacagtgaacgagtcctgcaaagttggagatctgtgactcagagatgtttacaaaggccaaggaaacaaagttgccacttaacgggcctgccctccccaccagacctccgtggctccccagtgcccgagaagccgcctctgggccccctctggagacgtcctccggagaagggcccatcctcacttaccctggggtgggtaggggtcgaggtccctgggacgcccgctcctcccctccggggcctggcgggggcgcgcggtcactggccgaccgcaggcggcaggcagagccgcctgatgtcttgggcgcggggcgtgcgagcccccgggtccccggccatggcccggaggtgtcagggtgcgcgggggggcggctgcacgggggctgcttggttggagcccgacccgggacaggcggggaggccacacgcgcggggagggaagggtcgggccgggtcgggccgggccaggcgcgcagaagagccggcggggacggaaagcgcggggcggggaggtcccagcgcgcacgccgccccccccccacccccggccacacctcgacccccgcccagccccacttccgggagcgccaccgcctcgccaaggtcacgcggagcccccgcgcccccgcccccgagccagcccgcgcccacccgggtccccggagccctgacccctgccccgccccgctgacctggctccaggaagcccccgcggcagcgccgcagcagctgcgccaggatcaccgcggcgcctaccgcgtagacccgcagggccgcccgcgccgcagacaatggcgacatggctgccccggccgcgccgccgccgcttccgcgccgcccgcgggactctgcgcccgcccgcccggacggacggcggaaacgcgcgcgccccggaccgccccctgcccgccccgaaccgccccggcctgcggggaacccccaaccccagaccccgcccgggccctctgggatcccgcaccgcctgcaggactggggaccccgagcggacaaccgaccccagccaggacaccccccccaggaccacagactccagccaggaacccccccctgcaaggaccatagacttcagccaggacccccccccccaggaccacagaccccagccaggacgcccccaggaccactgaccccagtcaggacccccccttcaggaccacagaccccagcagggaccccccacacacacccccagccaggaccacagaccccagccaggaatcccccccaggaccacagaccccagcagggaccctccacacctcctccaggaccacagaccccagcagggacccttccccctcccggcaggactgcagaccccagcagggatccccaccaccacaagaccaacagccccagccaggacgcccccaggactacagaccccagccagcacccaagtcagatccatagactcctcccaagaacaccccccaggaccccagacccctgctgggacccccaagaccacaggcccccccactggggcacgcccagacaccccaccaagaaccccaccaggactacagacctccaccaggactccccagtaccacagatcctcccagggccccccaggaccacagacctccactgggacccccaccaccaggacccctctccaggatcacagacccctactggggcccccttctaggacctccacctccatcacaaccaccccccggaccacaggccccagccagcaccccacaagaccacagacccctgccaggacgccccccaggactacagaccccagctggactgcctctccaagaccccacactccagccaagaccatggaaccccattcaagccccagccaggacccccaccatgggatcacagatcccctacccagaccctgcaggggaccaggaccaccacgggaaccaccctccccatcttagccagaatcatgtaaccccacgcagacctcagcagggaccacaaggacttggaccccatagggaaccccagacaaccacccagagccatgccaggattatggaccaggactcccacagaggactctgaacagctgtaaggaccatggaccccacaccctaattcgtactgacaccacagaacctgccccaagcacggaccccacaccccagttcctgctgacaccacagaacctgccccaagcacggaccccacaccccagttcctactgagaccacagaccccaccccaattcctgccaggccacagacaccacccaccaaacctacccctccacttccctgcccccaacaaccctgcagggatcacagacccccttcccggcccctgcagagaactccagactacttcagggaccacgagccccctccccaccctgatccctactgggacagcagacccctactcagaccttggttgggaaccccagacaaccacagagttacctgggctccctcagggaaccccagaccagcacagaacccccacccagacccttaccagggccaaggctgaaatcccacatggaccccccagcagactcctactggaattcttcatggaaccccccacccagacactcagaccttcaccccaccacaaccctcccagtcccacacctggtcccccaggggaccccagacctggcatccgggactccacacagatcctaacacccgctgtgtttgggagacaggagcctgggagagctggggtgacaccattttaatcatcaactccatcttaaaaaccaggaagacacattccttgccggtcacggcccatggtcataagatgtttacggctgaagaaatgacttaataatgcctccaaggacaaacacagacgacagcggaat

SEQ ID NO: 1563479 - DNA, 4001 bp, Homo sapiens
aaaaaaagaaaattcatgttaatattaacaaactcttggattcaaatcttgttctaccgtatcaagctatgttcaacacggaacagtgaagttagctaggaaccggaacagtgaagttagctaggaactgaaaatgatacgatctcataactatctagttaccttgtcaaagcaagtaaaacataaaagatgaatcaggacaaatggctaaagggaagagaagaatataatcaaggtgttactactaacagagataagtgtttttttttttctcgaaagcatacttcttaaaagtggcagattcttgctagacgtaccaaaccatttgtggaaactatcagttaactttttacttaaatttttaatcactgattaaaccacagttttgtactggatccaaaccaaatggccagatgccataagaaacggctttatttatatgtcaccctctccttgtctattataatcaagttggtagttaaagctgaaatctatacattcaacatgtggcttgtgcttcggatctggactaagaatacagctctaaggagtatctgctgaatttgtacaggaaaaccctttcccctcacaccacccaaattagaaagtttacaaaaagcggaacccttctgatgagctgaggaaactccagtatttcccaatgcaataccaggcctcatcgatttcattcctctgcacattcagtggcaggaaatggactgctaccatcggttcacactatcagcacggtgagatttgcacagtttgtgcctactgcttttgagcgttcttaatcaactaagtggaagtactgtatgactatgcctattacacacactcgacagttggtggtacctcacccagcctcaaactcccacgcgcccccacccttccaaagaaacatttcttgggagagcacatggagagaggcaaggaggaggaaaaaggcacgtaggcgcctcttcctgagatttctggtaaagtagaaagactgggagcataaatagtgttcttcttgatttgcgaagctgtaggtgggctcccaaggacttggaataaaaaggagggaggttcccctgccccggaccctacgcgttaggaggcaaaacagcaactaacaagaagtgggaggagaatggaatcgcgcaaaggtttgcgcccacaagttagacaaacaacagccctacccagtactcggggtgtccccaagttggggctgggcctttctccttcccgcaccgcctcccgggctgacaagagtgagaaaggggttaagtagagaagggggtgctcttccgcccccacgccgtctccgcgcctcggcgtggccactcctttagcggctccccgagttgcacagcgaggtcgcggtcatccttgggagggggccccgggtgcccccgtgttcaatggcaggaggatcccggggctctccctgtccctaaggccggcgggggctgcgggagcactcaccaatttgggtttgtttttcgtttcctcttcattggcggcccggttccccgcgctccgcttgttgctccggcccccaccgggttcctcgctgccgcctcccgctcccgacgccgccgccccgggctgctccatctttctccggccctgtcacctgtgccctgtaaccccacctctcctcaactgagaaagcacctcggggcgctcacactgccccgcgctgactcggcggcacctcttcctgagggagagagtgtctgcccgggaagctgccgatttcaggcccccgggactccaggctcccaggcacccccgacgcaaccacgccgttgccactactcggcgctggggcaagccctgcccctgagcagttgcaattaccacggtcgccgccgccctcagggcggtgtttagggtggagggaaaagtaggtgcctatctctttaagagggcctcaacacacgtgattcttcaaagtgcccgcatcggccgcccgggcgcgcaaagctgcttcctactcccgcagccgagccggccccagctactgagcatgcccggcgcggtgactggagcctaacagagcactttcagctgcggttaggcactgatttcacttcctagtggcccagcgagaacagggagggaactagtcaagagaaaggaagggtagcccattttagagatggggaaactgaggcccgggaagatccgcctgtaagtttcactggcgggtcaacctgagtatcagctttcacttctgtgggccacagcaccttccctccctgaggcctctccgggggtgtggtcctgctacagtctgtggaaagacttgattggcaagggaactggcatcctataggaaaaccaccgggagtgctgattaattgcctcgacagactgtgtgtgggtcagagtggaaagagtgagtgctttctgttgtcgtgattacgttgtgaccgaagaaatacagttgttcctttattcccttgctgcagggttgttgaagcagcaggcgcccaccgcttaatccctaggggattgttaggttctataaccaaaacacttacatacagctagcaattgaattgagtgctattttcaggttcccgaactagtttagagttgttgtggggagtgaataagatcatgtgtgtcaaagctttgttgtaaatgaaaatccctagacaaatgctaggtgtttttgtgcagcagcagggcactgttgggacgatagtcttaagtccttgcgtcatacctagcattttgtcctcaggacaaaatatagtacccacactgtatttcttccatcctctttaaatgatgccctttaaaagtaaaggtacacactgagaacattagacggggtgggtaggatttgaatgaaccaccatcatagaataggagcacatatgctaggaaagctacctataaagtaaatttaaatatgaaatctataaacatgccatacacctattactgaagatatctccagactatgactccttttgaccttctccccttcggcctaaatttaatatgctgaatggaatttgtatctgaacatatttattgagagtgcattaggatgcatttgaccatgctataggtgcaaggagacagctaacttgggcagtagaatgaaaagaacaccagatatctgaaaacagctttaattctagctttgtcattgtcattaactttcttttttttttaattctgagacagagtttccctcttgttgcccaggctggagtgcaaaggtgcaatctcagctcaccgcaatctccacctcccgggttcaagcgattctcctgcctcagcctcccaagtagctgggattacagggacccaccaccacgcccagctaattctgcatttttagtagagatggggtttctccgtgttggtcaggctgctctcaaactcctgagcttaggtgatccgcctgccttggcctcccaaagagctgggattacaggcgtgagccaccgtgcccggctgactttctttttaatcatggaggtgtgacttctctactcctaaggtggcaagctaccaaaggacagcagagaagagggaatacatgctcccaaacagggtgctcaaggagccccatggtaactttgctttgttgaagttcccgttttacttacttaaagtttagtgtatattttgaattcaactcactacatacacacacacacaaacacaatttatataaatgtctcctctcctgaaaaattgagtcaaaatgggtgcttcagaaagacatgacctgtttagccaatgcgtaattcctgtttgtgccataggtgtggtccatagctgagggccctccaagcgcaaacatggttcagtaatctgcccagtagacatttcttcagctccttagagtacactaggtgatacagagtgtcatgagtaagaaggatgaagatgacacagtttccgccttttagaacttcagagcctactgggagagacagaccattaaagaactgcactgcactataacagatatgaacaggaag

SEQ ID NO: 1563480 - DNA, 4001 bp, Homo sapiens
gtgatggtggcccccataagattataacagagctgaaaaattcctatctcctagtgatgtcttgatgatcctgaccctgtgtaggtcaaggctactgtgtgtgctgtgtttgtgtcttagttaacaaaaaaaaattttttaagaaaaaaattaaaaaattttaaaatagaaaacttataaataaggagataagcagagaaaatatttacgtacagctaaataatgtgtttgttttaagctaagtattattacaacagtcgaagtaaaaagtttataaagttacagtaagctaaggttgatttattctgaagaaaaatatatttttataaatttagtgtagcctaggtgtacagattataaagtctccagtagtgtaatgtctgaggccttcacattcagtcaccgactcaaccagggcaacttccagctcagcaagctccattcatggtaagtgccctcctctacgggtgcaccacttataaccttgtgtactatatatatataatatacatacatataatacatacatatataatatacatatatacacacacatatttatatatatatataattttttttttttgagacggtcacactctttccccaggctggagtgcagtggcagaaactcggctcactgcaacctccttctccaggttcaagcaattctcctgcctcagcctcccgagtagctgggattacaggcgtataccaccacgcccacctaaattttttgtatttttagtagagacggggtttcaccatgttggccaggctggtcttgaactcctgaccgcaggtgatccgccagcctgggctgggatcacaggcctgagccaccgcgcccggccctgtgctatatttttactgtcctttttctgcttagacatgtttaagtacacaaactctcgacgctgtgtcccaactgcctacagcattccgcacaataccatgctgtccaggtttgaagcctaggagccatacgctacaccatatacagcctaggtgtgtagtagcctatgccacctaggtttgtgtaagagccctctgatgttcacacaatgatgaaatcgcctaacgacccatttcttagaacgtatatccgtaggtaagcgagaaaacaaggtgtgtaaggccaaatgtatgggtcccatggctgggtaactgactgtaggctactgcacgtgtcggcttcccttccggttcaccacgtggctatggcagagcttaaacatcccacagaagcgctcacgcagggggccggaaagttccataagcgaccactcgactgtccccgcgggcttgtggcctctagaactttcttgcaactcggagctctatccctgctccggggtccctccgctccttttcttctcggcccgtttccactacccttgctcccctagtcgcatggagctgtaacggcggcgtccgggctggcagcagcacagacactgccacgtcccacgccaccgcggggtgggcagcacggcagatgtctttcgacggcgacccggaccccagggaggtgagagggccgagccccatcatgccaagtcaccgcgaggggctcccactctcgcgcccttgccacggagccagggccgagagacaaggccggcttaaggccgggcggtgaagaggccgacacgccggcgggaaccagagggaggcgtgcgcgggccccgataccatccccccacccccgttccccgagtcgcccggagttagcacggcccggaagcctgcagcccttaccttccgcatccgccatgttaccctgcaccgcgtgcgtgccgcccggtccacagccgagggaacgaccgcagactcccgccgccttggtcccgtcaggccgcgctgctaggacccacccacccgcgcactgccctgtgcgtgccttgccgcggggcgggaggaggcggggccatcccgggggcggaatccgaggcgcccgctggtcgtctgcgcaatgcgatttgctggctcggccagtacggagggcgagaccgcgcatgcgcttcgagcctcaagcagcctggttggcccaggctggaagcgcgagtgccgcccgccccgacagcccggagtctgtgggcgtggccccagctgtagttgcttcacctccgggtttagctccgcgcctgcgcctgggctcacggctgaacgctccgtaaacagtacctctttctttgctttctcacaccgaccctttcaggttgctgttggatcagtcctgatgcataagtgaacatgttgaagctcggagaggttgaaaggcctttgctgcttgcagttcccatccagctagagcagatggccaataggagtagtgtgcgtgccacatgttgacttttaaattttccagcagcaacatgaaagaagagtaaaaagaaaaaggtgaaaatgatttataatgaatttttttaacccagcgtatccgaaatattatcatttccacatataggcaaaacacaacagtatgaatggggtattttacattggttttttttttttgtccccgcaaagactttccggtgtgtgcgtttatgctcacagcacacctcaatttgaactctacgaccgggcttcacgccaaacagcagagacaaagcactggcactaaatctcatagaaacaggatgagcctgggtatcatgataggcagcagggctggaagctggaaccaaactgatttctccccagggatctttggtggtgtctaattgatcacagtgtcctgtagtaagccatcatgatctgtataaccccggtaactctaggtctggctaaaggcattctgccttgaatcaccacaatggaaaatcatggtgcctcatctaattcccagatctagtcagtccacaggccagagcccgtgaggtgagcctgtaaaggtgaggccaggcacatgtaacgctacaagtgtgtactttcagcctgcctcctcccttctcgtgggacccgtggccatttaccaggggcttgcactagcccgtgtgaatcactggggaagtagaatgccacttggtccaatggtcagaagtggagtcagcccacgtccctttcactatcagccaccctgtggctctttccccggttcttgaatccatacttgtaataaacacaattggtagctggataaattcccagaggggcttcctgactcaaggactgagggtgataatggaaggaaagaacaaaggaagcctctggcacattatcataattgagtccctgggaactgatttgatcatctcactgtaccccaagacatcatgctgagtggacctgatgcataggaagtggcaaatatttcaccacaaggtgagagagaagccccttgaaaattcagggaggtgatacctcagtgaacttcctgggcatgcagtgggctgaggcatgttgagacggtccctccaaagagaaagacaagttgccttacttggaaccctctgcttgctaaaaaagaagcatgacactcagtgggccattttctggagatggcataccccattaggatgctacacagagccttttccaagctttaataagagactcacagttcagccctctggaatttgaaataaacttaaagctaagacctccacacacaaaaaataataatttgccaggaggaaaagctcctggcttgctgtaattatttactgaaacggaatgactgtgatacatgtggtcttaagacctgacctgcccatgataaactgggtgttgtctgaccaaaccatgagtaccatcaagtacaatgatgcagccactttagaaaatggtctggcaattccttgaaaggttaaacacagagttaccatatgactcaccaattctactcctaggtatagacccaagagaatcgaaaatggatttttagatagatggttgtacacatatgttcatagaagaactgttcacaatagccaaaaggtagaaacaaccaaaatgaacagatgaatagataaacaaaatgtggtctattcata

SEQ ID NO: 1563481 - DNA, 4001 bp, Homo sapiens
cattgtttcagtatgcacaatgaagaattggaccacttgatcctttccagctctcacattcacgtgaagaaaaaaaaattcaagtaatgaacacttacttggccaatcacatgcaaggtctcttgccaaccaacatacatgtatttggattattcattttgtaaatacccaccgtgatgtaatcctctgaagaaccacacttgtttataaattgatcaacatggagtccttatttttaaaaactagcactttaccaaagaaaatttagagcccaacacagaatgcttgacagtccctctggaccagtctccagggatctgttttcaaaaggggaaaaaaaaaaaagcttttgcatgttggggacttgctggatttaccaaaccaaaggaggaagtaagattgattggggtggcagagccttaacaacagtggttcacctaaatcctaagagaagaaaggccttatttggcaagtagtagaaagaactagcataaaacagcacctcaacctacattataaactctcagaaatatgctcagagagcaataaacactgcaggaatccccttaccctggacaacctgcagctttttatgcaagccagttgcattcccctaacaagtcatagaaatatgtagtcactagtatccagcatacccccaccacacacaattcacagtattgtttccatgtgcccaacatcagagagcaaaaccgaaagaaacatcaatttctcctacaacatacacacacaaatacgcaagaaaaaccatttcctttgcagaacctgtgttgtctaagttgtgggcatgaaatgcacaaatattagttgctaataaaaatcagacggttagctctgtactggaaagcgaacagcacacacataaatcataaaaaaacaatatccctaaggtgcgttcctgatcagtaagctgaaaaccaaacaaggagagaaatgactcaaagtgtccatttgcatccctctttctcattacctcagaccaacaagctctctctcctgtgagttacctccctgcacttctgtcctcgatcagaagagcctcgtggaaaaggtcgcaggctctctcttctttcccttcaggatcttgaggcactgaaggagcatggggggaggggaacggaaaggacaaaggtaggcgctttccatccctttcggcttggcgacggggctcccagcctctccccctctcatcgcggaaatagagcacctgccagggagaggtcggtcccttccaccttagtaatcggcccacagggcctaggtgtcccaggagcccaggcgctgcagccctaggggacaaaggggaggaggaggcgaaagaagtcgggaatggtacgaatcccttgcaaacaaaagggagggggcagaataccaagccggtcgcggctgttctcagaggtggacaggttgggtggagaaatgggtgtcgggggaggggaagatttagaaaattcctctagggcaagggattagggagctgcttgggggcgcagcagccagcaggaagggggctgaggcaggacagaggccctggggtgagaagggggcacagctcgctgtgggggagaggtgatggctaagaggtgaaggccagactgggcccagtgtagggtgagggggcgctgagccccgcgcggcgctccgaggggccctgaggagggtctcagaaggagcctgggggcacgcaacgaaggcattcgagggagagggcagaattggggcacgcagtgttggaaaagaggctgagaacagagccgtagagaggttaggggggactgcgagggggcctgacccccgtccgccccacctcacctggcgccgggtcggagtccagatctagtgctgagaaagcgccagctccggccagtccctccgtcccgcgcgggagaccacggacacaaagcggggcgcgcgggaggaggggaggagagaggagggggaaggagggaggaggaggagacgcctgaggcgcgcgatggggggaaggaggggcgcctgccgccctcctcctgggtcagggggcggggcatgcggctggaggccgccctcagccggccaatggccactccactggcccgcaggctagggcgcgccttcccgcggctcacctcggcacctgggcctcggttggccccagccaatcaaacgcctttatttgcatgaccagccccgcccattcgccccagccaaggactgctcactgagaatacaaagaaggccccccggaggggagggagtcgactccagttggcctatcccaagggcatagtatcaccttttcagcgcgtttatgggtctttcacggtcatcttgatgaggggaggggagtgggggtcacagaggtttggcccaagatctcttaagaggtcggatctcttctacctgaggtccttctaaccaagagctgctctcctcttccagggcacacagttcccagtcttctcctgtgggccctccgccccctcccctttttccagtcgccctaatctttggatgctgcttccagtaggctgctgcccactactggccttctcctgcactgcagcccacatcagcaggctctgagcacagccttaattgatgctttcaagccgcccaaaccaacccctacccagcaggaaaaggagagaggaagaggttactgctctaggtagaagggacctggtcaagtggctttgttacctaggatggcaaaaagccaacacataatataagtctaactcccccacatcatctcttcccaccttcccttctcctaccttcaggtctgtactgggccacaatggtgactgactggccggcccgtttcagagcagctgcagcctgctcatgagttgcattcctcagattcactccattcacctgtccaaagagagaagctgtgagccaccccaaaagcaagaaagagggtcctctgcattagcagttaggagagggagatgggtaccccacccctaagcctgtttagatgcctttcccaatattccaaccttgcccctaaaacaaggcctaaaggatacgacatctctagtgtaacaattatcttcataaaggtcaaatgccaatcagggttaagatccaataggcattcatttcctcttcaaagataagtctagtcccggtccctgtcactaaggatgtctataaaaacaagagaagttttctccagtccttagccctcccttcatctcaagaagcattcctcggaggaagtaaggtctctcgctctccattttagactggcacagttcccatcctcccacctctcctttgtctcctcaccgataagatccggtctcccctgcgcagctccccactcaggtcagctgggcctcctgccaggatgaaggagacaaaaatgccttctccatcctctcctcctacgatgttgaagcccaggcctgtggagcctttgtgcaggatgatcttgcgaggctctctggtgggaaaggagtggaggagtcaggactaggtagatatggactgttgtcctttgagggccagcctggaacaaggtccatacttgctgtagggagtaaggacgtggttccctatgtatgataccctgagcctccctttgtctcctgaaacctgcttggctgctgttctgtcaggtgccaagtttcagttcctcttccctcccttcttcccgagggcttgcagtcaacttcccagtggacagtcccctactctctcgggtgaacaaatccctaccctgaactccagagaccaaatctcaggcccactcactggtcctcttccttcccagattctcctatcctaccaacccgtgtgatggaccctggaccacaagaagaggaagcagttaggggcagtggagtcaccctggggttgactgcactcatcatccacaggatgtgcacacttacttcacagacactcttctgcagtctcaaaatctcacccatcaactatgacccctcctacctgctgccccaacaacatatttaatcagcagc

SEQ ID NO: 1563482 - DNA, 4001 bp, Homo sapiens
tactgggccacaatggtgactgactggccggcccgtttcagagcagctgcagcctgctcatgagttgcattcctcagattcactccattcacctgtccaaagagagaagctgtgagccaccccaaaagcaagaaagagggtcctctgcattagcagttaggagagggagatgggtaccccacccctaagcctgtttagatgcctttcccaatattccaaccttgcccctaaaacaaggcctaaaggatacgacatctctagtgtaacaattatcttcataaaggtcaaatgccaatcagggttaagatccaataggcattcatttcctcttcaaagataagtctagtcccggtccctgtcactaaggatgtctataaaaacaagagaagttttctccagtccttagccctcccttcatctcaagaagcattcctcggaggaagtaaggtctctcgctctccattttagactggcacagttcccatcctcccacctctcctttgtctcctcaccgataagatccggtctcccctgcgcagctccccactcaggtcagctgggcctcctgccaggatgaaggagacaaaaatgccttctccatcctctcctcctacgatgttgaagcccaggcctgtggagcctttgtgcaggatgatcttgcgaggctctctggtgggaaaggagtggaggagtcaggactaggtagatatggactgttgtcctttgagggccagcctggaacaaggtccatacttgctgtagggagtaaggacgtggttccctatgtatgataccctgagcctccctttgtctcctgaaacctgcttggctgctgttctgtcaggtgccaagtttcagttcctcttccctcccttcttcccgagggcttgcagtcaacttcccagtggacagtcccctactctctcgggtgaacaaatccctaccctgaactccagagaccaaatctcaggcccactcactggtcctcttccttcccagattctcctatcctaccaacccgtgtgatggaccctggaccacaagaagaggaagcagttaggggcagtggagtcaccctggggttgactgcactcatcatccacaggatgtgcacacttacttcacagacactcttctgcagtctcaaaatctcacccatcaactatgacccctcctacctgctgccccaacaacatatttaatcagcagctaacactatgtagccccagggggttgcagcgcctgggttcttagggggatcccaggtccccaaaaggagtttagaatccaaactgaagagagcagacaagcacatgagaaatgcgaataaaactaaccacatctaaggaagccctctgtaaaaggtcacagtgtcatccgcccaactcccagggcacgttcccggcccaccgccttcacttgttacaagcatctttcctcggaggagcccaaagccccacgcaagactcttcctttcttgctcccagtctcaggggcgagactccctccctgagtcccggatgctcttgctcctagccctccactcctacctggcatcccctccgggccgcagggagcggagcggccaggcccacctctgcgaagccctcctccaggccgaagcggaggcggagcccaagcccatggccaagccggagcccgagaacttgcgggccctctccatagctcctctctctctcccctggctgcctacccttccggctccactgctgcctgcccgccagcctctcgggccccaccctgcaaacctgtcccccggaaccccagccggcccgaccagttccaggccccgcgcagccgctgccgccgccgctgccgccagcggggcggggccgttgccggcgaggccaccgggccggtcagagtcccgccagccccaccggctgaactgctttcttctctaatttgaaatggttgcagcagagcgggctgcaactatctcagggcaggaaactccgctgccctcgcctcctcagccccctaaacgctccaccccatcctttctttatctgcacttttggaccggggccactcactcggcactccccctgatggtagagcttgtccctgcagccacttctgtccctctctaggtccccaaggcctgagagagggcctcggaccccaaagccgggagtgatgagggccttatcctcttctttgccatactacaaggagcctgtggccggccagaaacggattcctcccctccccaatttctgggtagattgaatgggatgttgggggcggggtcttacctggtgaagtcctcctcagccagcatgtgcctgggaataggagagtagcgggtggggggaacctgaggaggagcagggtagctgaccttgctctccacagccccgagataacccaggctggaattatggcttatgtggttgtcagccaaggcagtaaaagctggaatcaagaaagggagagaaaagttcagagactggtccagggaggtaccccaaactcctcaaggactttcccccacaccccacttcagatgcaaaagagaccaagggatgctgattcctcaggccgcacctccccactccatccacccgccacccagggttcctcctccgcagtccctttctaaatccttggctcactcctgtgagtcttagaaagagctgaagtcaaggcagtctacaaagaaaggcatgactagaggtgtgactaataataatccctcacatctctatagcctaatacagttttccaagggttttctcatccatgatctcatttgatccttgcagcagtcctatgaggaaggcagcacatacatcattagctcccttttgccaaagaggaaacaaaaaacaggtgaaagggacttgtctaagggcacccagctctaagggacagagctgggggccaggcacggtggctcaagcctgtaatcccagcactttgggaggccgaggtgggtggatcacgaggtcaggagatcgagaccatccttgccaacatggagaaaccccgtctctactaaaaatacaaaaaattagccaggcatggtggcaggcacctgtaatcccagctactcgggaggctgaggcaggagaattgcttgaacccaggaggtggagttcgcagtgagctgacatcgtgccactgcactccagcctggcgacagagcaagactccgtctcaaacaaacaaacaaaaaaacaaagacagaactgggatctggactcagttctgtgcactatcctctgcggcttctctctctcctctttttaaaattcactctccatagaaattgtcaaaaattgccaatgctgactctatggcaagtcttcacgatggggtactgagcaaagttttcaattagcaataatggcgcctcagataaaccttattggctgctacagtgccaccactgagcaaagctgcttgccctctcttaacaaagggtatgaacttcttcccctccagaaaccaggggacagagctttagaccagggacaggggctgatgagtacgtactgctggcgtagtcagggggagcgtacatgtcgttgaggtggaggctgcctggcttggccaccttcaaatacaccatatcagatgtgttcttcagtgaggccacagcttcctcgtgcctcacatcctgcagattggtgttgttcacctagaagaggagaggcctcaggctgggacttggaagaaggagaggcttctccagggaactcgagggatgccttttcagtgaaattcaacagcatgctaacaaaggcccaagtatagtgctgtgaggagcagaggcaggaggtaggggatagggcaagaccctggccacagaaagaattagggcctttgtatctgggcaaacacaacacagatgataactcttgaaattcccccatgatgcctcatccctgagtgaggtttaggcggagtaaggggtactggagctcctcctccctaccctaccatttgggcatccccatgaagtctgtctcacc

SEQ ID NO: 1563483 - DNA, 4001 bp, Homo sapiens
caccagcttggggaagtcatcacctgccctcgacagcaaagcctcctcttcctctctccccaccctaggagctgcagagccggataaccagacaggccctccgccttgcgtgccagggacctggctctgccagcccagcctccattttgctgcttctcccacagatgctccttccattttctaagctggcagtttaggctgggagtggaagccggagttgtgcccagcacccaggggctcccaagctgtgccaagtcagggctggggggctaagccctctcacatctggaggtacccaagggggacatgccccactggggccagtctctgcaccagggcagctgccccttgccggctccaggcaccatgcctgctctagagcgaggaggcttgcttcagttccttcaaatctccccccgccccccgccaccccaccccggcacacacactacagagctgcttggacaaaagagtccgtccttctcagcagcctctcagccttgcttgggacatgtctctcgcctccttcctctcccctcccttgcctgtcaagcgcctctcaccagagacaacacatacaaacacacactcacacacacacaccaggcacacgcgtgcacactcttgcagccacatgctcacacacatatacatgtagccacacacacaaacacagccatccctgcagcctcctctacagagacctctccacattcagagtgacatctccacacatccatgtgcacattcacacacaaagggactgggacggagagggactcatggcatcaagggatgaagctcagcgagccgggcacatgggctcctccacacggattcacggcagctccattgccttcctccacacaccccaacatacatacacacacatatgtcccccctacgcagagcaccatgccccctcccctcccctccggtggagacacacaccacacacagcccccgcagaacctcccgccccctgccagacacagagacattgccaaacccccacactgagacaaacccaattcccccacacaggaaaatgtgcccctccgccatgcccttaccccctgacacacggctcctcccagtcttctaatggagacccccaaacagacacacacagggaaccacacatttcccaccgcctctctttgcccagctgcaatgctagggctcggggtccacaggcttggagccccagcgacccctactgcatcccaggcctctaggcccccactctccagccctcctgggttgccccaccgctcccccctccgctggtccatacctgctcataccagtcccggttggtacaggtgcactctggccaccagctggggccgctgccgttgagtttgggggtgctcttgcccgggactggcttaggaggcaccggccccacatcccggccggtggggatgagcttggccttggtgcgaggggtgggggtggcccccgcctgcgagggcaaggtctgcgagctgtagcccccataacccgcgctggcgccgttgcccccacctggcccgtaagggtcggggacttgccagtcgccgtagcccggaggctcgaggcgccgcagggcggccaggcgggtcacctcatagcactcagggcacttacagcagtgctggtgcttgtgcatggcactgccccccgcggctcggaccccccagcccacgccggattccacgccgccgccaccgccgccaccaccgccgccgccgccgccgggctccctggcacactcacactgctcggaccaagaaggggggggcacccgtgggggcgcccgggctgagcggggcctggggccgggcgggcgtcccggggcctcggcccccacgctgccccgcacccacggctccccctccagcactggcggctccgtgtcgcccgtcgtggcttctgggccgaggcccagcggcaaagaagaagcgggagctcaagcagagaatgggtgctgtgaggaccgcttctgctctggtccccaggatggatctgagtggagtcaagagcatctctccctggctcccttctcagttgattccagccaatcagcgcgcagaggcaggcagcggcagcggcagcggcggcggcaggaatgctaaacagcggctacttaaaggaacagaggcagcggcgcccccaggctcagccccagctcccccaatctctagggaactgttggctctaagggcgggggcagaggacgtgggccaccagaaagctcaggcacccgatcttgtgcccttatatcgccagttttagcctgtcctctgcccactccaccccaccccacttccaagagggagttgcagggagatgttcaatgggtccccaggcttgctctgagctggggccaccagaagtaaagacgaggtagcaggatggacagaaaggacgttggagcagggtgagggaggtgctttctcttacaggggaccaaagaagaaggcagcatatgaggcccgctgtcctgtcaatgcctcctacacaagactattgttctctcagtctctaggccctgaaattactgtgacctcacacttgaccttctaccatcaccagtaaagaactcaaccctagaacagggattaacagaaagctctaagtccttgtccctggcccacaaacccctatctcctccactccacccctgcatggttatgatgggggaaggaacttcaggatatcaagatgaaagtccaggacaggtgaaaaggtaagaagggatttgaagagagagaaacccttctatgggtctggaatagagcttaggaatacttgtccaaggacatctccttaccctctcctggctcagcttgtcgggggaatggaggaaggatgacatacaagaaagactatcttttttgcagttcttgttttgtttttagctaccaattattgggtctttacaaagtcctaagtgcataacacgcaaacccaaatcctaccaagctgatgctattattatcttcattttaccaatgagaaattgaggctcaaagatgttaacacagctaggtaacacagctggaagtgacagaatcaggatgcaaatcctgattatttgactccagagtccacgctgtgaaccactctagtacgacaggtctattctaagttctcctgcagaatttacatctcagttcaattcagcaaatattcattgagcacctgctctgtgcaagaccttgacctaggtattagggatacagaggttcttttttttttttttttttttttttgagatggattctcattctgtcacccaggctggagtgcagtggcgtgatctcagctcactgcaacctcagcttcccaggttcaaacgattctcctgcctctcagtctccctagtagctaggactacaggctcctgccaccacgcccggctaatttttgtattttcttagtagagatggggtttcatcacgttggccaggctggtctcgaactcccgacgtcaagtgatccacccaccttggcctcccaaagtgctgggattgcaggtgtgatccactgtgcccggccctcagagattcattcttaattcaacaaatatgcgtggaacacttgctgtgtgccagacactgttgtaggatttggggatatagcaggaaacaaaataaaacagaacaaacagaacaaatccctgcccttggggagcttacctcctagtgagaggacacagacaaaaataaacacaataaataagtgaattatgtagtacagtaggtcctcatttaacatcattggtaggtccttggcaactgggactaagtgaaacaacgtataacaaaaccaattttaccacaggctaattaatataaacaagagctaagttcctacagcatatttctggtcacaaaacatcacccagcttccaaataaagacccaaaacacttctgatattgaacattgaaataaatatgagctatgcatacatatagaaagattaatgaaaacaagtaaataattacctaac

SEQ ID NO: 1563484 - DNA, 4001 bp, Homo sapiens
tattcaaccacggtaatgtatgcttcaaggttaaaaagtagtcatccaaatccttgactatttttcaaaacagaagttagcaattattttggagaaatcctagtgtaattagcccaccacttgctaattaatttactgatatttaaatacatgttgtttttaactcaccctttctaagaggaatacgtaattgaaaaccatggactaacattcagaaaaaaagttacataacagccaatagtgttccttaaccagactgactgggatattacaattactacagaaaaggcacagcacatacgagtagcactgtgtacactgaaaggtcatattagatgtacatatatgatagtctattaacttggatgatttagctcctcaggctatggaggagactgggtagagagccgaaagattctgtattacatagacagttaataatcaggcttttcacacttaggaaaatctatttctatattatttaacatctgttttaaacaatcacttgttaaatgtttgaatgttttatttgcttgttaccctagtggtgataaagattatttcaatatgttcagtctgattacagtcactgacagatccccatgacagcatgtgaagataggttatagaaacgatgcatagtttatacaaaaagcataaattgctcccctttctccaaaaactttatttttggagccaaatactgtccatgctcatgctccatttgcttaaaagtacttataattataatccactgattgtaggggaaagaaatattgcaaaacagagaaagggttctaaaaatcgtacgcaggcaagaaagaatgtaagacaaaactcattaaagggcaaaataaataaataaataaataaataaataaataaatgctcacattttcaataatttatcacttctgtcatttttcattaacagccttcaaagccctatctgaaacaagctgatacagagaaattaagagcagtaatcaagcgagaaatcatagaccagctgggtcgacatcaacttggcaaaacgtgaatacagttcaatagctgaaacagatgctagagttgttgaaaaaccctgcaggagatattgatatattttcttcatataatgcagaatgactgaataaatgtcaaaagctagaaattgatgaggagaaatgactgacagccaaactccttataaaatagaaaccaagtataacaattttcaacctatccaaacattctgtacattctcatttctctcactgtctgaatatgccaatacatcaatcagttcttgcaactaaattgcatataactaatctggggtagatttccccgaagatttttttccccctgtcatcatctacctgaagaaacctagactcctgaacaatactttattctaaaatcttctaacactgatttctatcccagaagtgttttcctgaggttggaggcaagcacaccccctccccaaaatctaacgcagcacaaggcaattttaaaatccattctgtaaaagcaacactgtttgcagagtttgaagagctcggcaacaaaccccagctaccaacagctgcttgttcaaacatatgctttgtcatggccagcttctaattgtatttgtaatgatgtaatagctttaataatcctaccttccatgccagctgtttttcctgtcactccatcatgccaataagttggctgctgtaacaaatcaagatagtgcaaaacagcatctttctcctgattctgtcatcttcctgaaagcattctattactgccgactgctgggaaccagaaagtctatttgaattccaacagctcccctttcgcatgattcaagttaggttaggtgggcatgcctaacatgattctttcagtcatttattatgcagctgctacaacgtcggtgtggtaaccactctgactatctgatacgtcagtcgaacaaaacctatacctcggagcaaacacatgagccagagcagcgtttgcatttaacgagcattcttcctgcctaaaaaacagtggatctgcaaatctctttcagtatctactcgctcttctgtacagatgcaaagcctttggattagattattttcctaagtgtaacaatagtagagttcctcgccaaacatcatattattcacactgaaattttggctgatttttacttatcttcacagccttttaagggtaaaaactctcttctgaattgtacttttgcaataagatgttgtgtgctcagctccacatttctgcgttgtaaaatatagcatgcactttctcaaatggaatttgcctcttgtgactctatagcaaattttcaaataagaggatatttcaagaaaatattatttattttgcacactggagatatttaaagtctggcaccctgtatgcttctcccaagggtagactttatacttgatattttgactttagatgagtgatttcttcacaaagtaagaaattagattagctgaatctcttacacaacttctttaacaagtaaataaatgctattcaggaaaatgcattttgtattttaaaaatactaatcgtgaatcagtatttgttaaaagaaactgtaattgttatcaattataccgtataattttctctaaaacttccaagtttgcctgtcttgggggcacttatggtttgaaattataacacaagaaagtttaagtgttttcatgagaaaaattaataaaatcatatgtttcctctcagatttgtattaggtatttagtttgttaggaaagctatcccccctaccacaaaaagtaaacagacagctggtttcatagttacattatgaaactataaggaataactcatttagcatatgtgaaatatgccaatatcgctattctgaaatagtgttttcctaaggggttatggtgtgtgtgtgtgtgtgtgtgtgtgtgtgtgctttgtgtgcaagtactcatacattttagctattctacttccatttgatttttgtataacaaacacaaataatccctatatatcaagatatacacaacaatcagtaacttatagtttattagatataatttataaatgcaagaaataaacctgaaagataagttgagtccatatgaatccaccaagatttctctaaaataatatacatatcattccacacaactctgaaaatactggtatatcaattactgctattttacataaaaagtcttcggtgattagcatatctattttagagattgagaatagcataaatgccatgtgttttttttgttgtattcttggcttctactagcctctccagcttaaactcttgcctctcttcctctttatactttattccagccacaatggacttctattttttcttctaaaatgctggactccttcctgtttcagatattttccgtattctgtttcatctattcataagtctgtcttgaggcttgtgaaaattaattttttgtaaaaatgtatacaagttgtacaacatgtttcaatatacatatagtgaaatgattactacagtaaaagtaattaacatatccatcctcttacatggttaccctttttttgtgtatttggtgataacactcaagattactctcttagtgcatactgtagtgttattaactatagcccctatcctgcacattagatctctagaacttattcatcctgataatgaaaactctgtgtcctttgaccaatatcttcccattctccccctccctctgcccttggtaacaatcaatctaccctctgcttctttatagctgactgttcagattttacatgtaagtgagatcatgcagtattattcttcctatgcctggcttatttcacttagcgtaatgttcttcaggttcacccacattatcacaaatagcaggatttccttcctttgtaggctaaatattatttcattatatttacatatatcacaatttctttattaatttatctgttgatgtacactcaggttgttttcatgccttggctattgt

SEQ ID NO: 1563485 - DNA, 4001 bp, Homo sapiens
tatcaaactacggcaaatttacaaactggattcaaatgtcaaacatccaagtagcagtatgttgtcaaacagcaaaatttaatgtataatatagccctgagtatatctccgttttttcttaccaaactcattgtcatgttgcataggcattacttgatgattttttaaatgcagcgtgaaaaaatcctacagggcatgtcccaaaaagattacctttcttcgcattctaagaattgaaagttatttgaatatctatgacaaagcagagtgtagatttaccttgcttaatttcagcagaattgcatatattctttcaaaattgctctatatacttgtatatgatgttaattatgtagaatatatatatatataaaatcactagtgattttgatggtatttatgttacatatatcaaagaaataaaaacaaaaaataaaaatgtgtgtgtatattgcaaacaacagatatatgccatgcatatatttgtaatgatagtaaatataatagtttttcaatctaaaagtaataatgatgtccaccaaaagaaatttatgaagcaagccaacaatgtaagtaaatattgtattataaagtctggtagcttttaatgtgactcaatacatggacaatgttaacttatttccacaaagttttcccagtggcaaaacttctgcctttttttttagtagttgtggagcattacttatttggagagatttattttttcattcttaattataggcattgccctcatatctattttagaataactacactccacaagtcaaagatgggtggggaagagataaactcccatctcttcgggacacacagtccttatcatatattatttttactgttgtgccacagtccatttttaaatccttcattagtcatcatgactttcttaaaaataaacgaaatagttgtatttctatatgaaagacaaactaaaaaattgaactgaaaagctggctcataatagacatgaaacaacaaggtgactttactactaaatataattaggagttcctcaagtttgtatgtcgtttacccaagaaatcatctgatcatttgatagcatagatcacatcattatttgaaataattatcatgatatgctacagaaaagagcatttgaaatagtaaatgtgagtaagaaacattaaaattaaatctttatcaatacttttcacatccttcaattatccgtcccaactcattttattctttattttatccatgatgtgtcagagaaactttttctaacttttaggcctccatgtagttcctatacagtagttagttcaattgagaatatatgtcaggtcagtaacctttatgtaactgttactaaatacggaagtatcaactaatcaaaataataactcagatatacaaactatctcacagcaatcaaaataaatctgttatagtcaaatgacattctgcatattctattactgcagtggtttgttaatcaagaaatcatgtgtttagttctatcgcaaagaaaaacttttacactccatttctgttgaaaagttttcccaatgaaaaatatatattcctgaataaatacatatatatatgcagtatatataacatttatgcttctttgcaaactactgtgataatttaaaatcaatctacctaattagtgagcttgtcacaaactaaacgttatgccacagtaaaatatatttttagttactttgtacttacaacagtcctctacttcttcccaccaaagcattttgaaaagtgtatatcaaggcagcgataaaaaaaacctggtaaaagttcttcaaactttattgctccagtaggcttaaaaacaatgagaaaccaacaaacttcagcagctttaaaaaaagtaacacttcagtttttcctattcgtttttctccgaaggtaattgcctcccagatctgagtcctgtagggggaaagtgagtgatcccaacactgagtgagtcaacacagtaactgatgccaggattctgtagaggcccccggatatttcaaattccaggacctgcgcacaagcaagtgacccgccttctctctcaagttggtttcccataataggactgtccatggtcactacatataaggttgtgcttccagcatggcaagctctgtgaattcaaacaatgctcaactgtgttctgattaatatccaaaccagaatagcacagtggacatagtacttgcttttaaagccttctaaacacaaaaactattcagtacaaaagcataacaatactttctgtaactttcatgtgaatttattaacagagcagaaaatccggattcaaaattgacttttaaatgccttttttatcctctcaacaacaccaaaaatttcactctaccaaataaaaaggaatgcccagaataatccatgcatttgttatgtatccactgtctaccaaagttattttttccccttgggattcaatcaaaagttatgtattgatgatgccaacagtctgaataagagaagcagcagcagaatgcagcagctgaattctgaaggcagaatgtgtgtgtgtataggtctcatgggacatgttttcctgctaaaataaagaatactcttataatgcaggaaagaaatttttctcaaatcctaaatttcagttgtgaattatgctaaaacttctttactaacaaattattctttcttccatttctctggtgccaattcttaaaacaccatttttttagacattgagttaatgatcatttaatggttctgaatagaggcttgttttctgtattaagtgaatacagttgtattatgtcattcagcatgtaaatcattctttgccaatagaaagcttcttcatcttgttccttattacttttatgcaacaggcgagcccaaaattgatagaaaacattggaaacattttttaaagaaagatattctttttatagttataataatccctactaaaatttttgtttgagtgtttttattgtaccatttgttaaagtgacagactcatttttctatgtcaaacattcaactgcttgcgactgcaatgagtaatagataaaaattaaaaaaatattgagtcagactgtgatgtttaccttaatagttaattgtacattttgtgttttagaatattattgtcataacattgctattttccccagcaaaaggtgtatgagataaaacataaggcctaattttaatttaaaacattcttttccctaggtcacctcctttcctctcagtgtggttgtctaaatatgcatataagcaaaattttcataaaacaacatagaaaaaatgaaaaaattgttttggggctgatttggctctaagtctgcatgttagcatcagtgtccctctatgctgtgaggtacaatattgcccagagtataagtgccctttgtatcttgcactgtgagttttctacaaacataaacccttgtttaggccaaggcgtgaatacaacttgtcggtcccaaaccaacatcaatatcacgtgggaacttctgagaaatgcaagttgacacgagacctcaaaagtcagaaattctggggttgggacacagcactctgtgttttaccggtgattctaatgcatggtcaactttgagaaaccctaaagtgtatgtttctaaaaacaaccgtggttctaaatgtaacaaagatgtgtcctgggtaatgtctaaagcaccaaatcctgatagatctgaatgccctgagatacatttaattgccattcagccttagttgataatcagaatttatttggcacctataatgatttctgcattgtgtggaatgcatatacttcccttaagattttataatccaggtgcaaatatatgcttacaataactggaaaagtgaaaggcacgtaaaataaaatttagaccgaacaaattgaactccagttcagactgtgtcaccacagtactttcttgtgtcccttaatcacttatctttctcctttagtcctcagaataactacatct

SEQ ID NO: 1563486 - DNA, 4001 bp, Homo sapiens
cacttcagaaggactgaatcagaaactctgggggtggcatccagcaagctgtggtttaaccagccctccaggtgaatctgatgcccactcaaggaagagtgagaaccactgttctaatctatcgtcttccaagagtgtgtgggaagatcaaagaaaaatcaggtcatggggctttgcggagaacaatcaaacaaatacataaatcaaggactctataagcataatttaataaatagacggatgattgtttttaacttatttttcaatttcctccttagtttgtacatgcatttagagataatctcagcaatgtcagcgagcttggtggcatagttcaagctgtgaaggttcaataaataggtcggtaaacattgcaaatcaacacagcttttgatgaaatgtcaggcaagacagggcttagctatattcggctcagcttgaactcataaaccatcaactggcctctgtacttccaggacaatctgatgaataaaatacagatataaaattaaaaaatatatttataaagagattagtaaaacagcaatctgtaagtgagaaatgacaaccacttagtccagaccaaatgagagagaagacttgcaaaagggtaacttttcttacaaatcaagttatgggaaaatttgagatccaaatagacttttaactttggattgtctttattcccaacacacgtttttaatttaatgcggtgtactttatcctaactcttttagctcacccccctgaaaaaaaaactagctgtcttcctaaagatagagaaaacttgtccaagtcagaaactctttggaattttaataaaagtaacataatttagaaattaatatacttcaaatatactgacagtatatattggcaacagaatatatgctaatttagaattttaggatattctataattaaaaaaaaacctgataaatcactacaccttttcactttatttagaagctaccatttaataataagtgtttaacctctaaaatcattctgagatatttcagataattaggcagcctggaattactgtttacaattgtcccagtttgcttcctaataagttgtgcttgtctaaacatgtctaaattactattcacaaggatccttgttatttccgtcttctttgattaaaaacttcttaaaaatgtgagtgtatatgtgtatgtatatatatacacatacacatattcatatgtacatatatgcataaataagcccatatatatatgtgaaacacaggtttttctattgttaatataaaaatccctcattagttttctaatgagtttatgaatgtagtctacgtccttagaaatttaatttgaggtaaaaatattatcgtttatagattaaggtctggatatttttttcttttcttcatactagaaataattttagatacctgaagacaaagttcattaaagccacaacccaaaaagtagaatatgggttccttcttatttcagtgatttgcattatcctataggttattggtgtcaaacccctttcttcccttcctcacaacaaaagccccaatttaacttttatagaaaggcatatggaacaggagtcatccaaatatatcccaggggttgcaaattgaccaaaagagtcacctttagggaagcctgcttctgaatgcttgtggaatttatcattcttctgaatggctgttgcatttatctgcagcttttactcaccagatgagacctcagacatttcaaattctgcggaggctggctacacaccttcataggaaagctttttgctgatttccctgttggtacttttctcttacacattctatggggtatggtaaacctggaggtagagtcatagccaagcacagataaagcaggcacagaatctctgaccagcctcacaaaagcagacaaacacacaatctttttgcacctgtttcttccactccggttgccgtgaatagtgaggtgttctcacagattcagcttcacagacagcattttgcaaacactcccctctcacagcaatggtttcttccctcaccggctcaatctacctgattacgttcccttctaatcagtaacctcagttcctctagaaataactgtgtcgtctgctttatataggatttatctgagtctgaagcagaaactggaaagtagacttagaggagctgattattatgaagacacctgtatttttgtctggtattcacgtgaactcgacagtgcactcatttatgcaaactggtgttagtgaaaaagaaaaagaagcagagaaggaagcaaaaagaagagactggacctataaagttgcgcacctgtgtgatgctaggagaagaaaataactctaaaaacgtccagtgctgctgaaaacacatttgaacttcctatgaaaaccaacagtgcttgacatacaaatatcttcctccagacacacctttaaaaatacattttaaaatctgaaacaatcttaaactcaatctaaaccacaatgcagaagttaattcttaaggcaaatggagattaagaacgaaacttcatccacataaaccctgtgttttaaaaaaagaattaaaaggaataatccgtataacttactcaaatttgtatttgaagttaaaccttgaatcctgcttcttgaaaaaacagaattgtgtcaggcttctgtaatgactgtttacccagagcataagattgaagtggattttcagattaaaaataaaactcttaagtatgtcaatccccatctgatcaaagcatataaactaaatttttccaaggacttcattaacaatataaccaagtagagctgcagttcttggttttctttagagtaagttgttaaaatgattgaagttcatgtaaaagaaatccagagttacagttaaggtttgctttttttttttttttttttttttttttttttagtagatccagtgcccggcaaacagtatgtgctcaacatatgtttatttaatgcgaccaaaagcatacaatataaagtgtcattatcattgccactgatatttttaaaaagccatgttctatacttatttcatttttacgtaagccacaattttacaaggtttcaaacaaaaaaaaaaacccacaccttgttttctttaatataaaatatttggcaattataagcatggaccgtgctggcagtaagttaaaatgtgactgattttttttttctccgttccctactctcaattttcagatgcggaaatttcatttggagagaacaggaggtgttggtgggaaaaatctcattaatcgtaccgtattcccttgtctacaaagagtactgcatccaaattacagaagaactaaagaaaccttgtagcatgagtataattagcagtgctactaagtgaatggaaatggaggttgcctaacttaattaactgtaatcattactcattgtcgtactgcttagaaagattagttgagggtatttcttctgtggtattactttaggcgtttctccttccctcttaaatgtgaaacaattacactataaagaaagaattagcatgccctttcaatcagatagaagcttttccgaacaagtaagttccatgtcctagctcgagggcggcaaaacaggaatgatgggaaaatatttagttgggccaaagttagagaaattaagaaaaaagtagttaattgcagaagttactgacttgaggaggaaaaaaggaaccctatatatgagtttctgtaaagaaattagctcttggccagggaagaaataaataacaaattaagatctaaagggaaaaattaaggataacacagtacaaatacgcagtactgtctgatgaagttgttcacaattgcacaacagtgcaagattccacaatgcaccttcaaggacactgtagctaaggattgctttctgatcatttatccttttagcggaagacacttggcatctgggaacatttgttcttttgaataaaaatcacctcatacctaaaaggaacctttata

SEQ ID NO: 1563487 - DNA, 4001 bp, Homo sapiens
ccacttcagaaggactgaatcagaaactctgggggtggcatccagcaagctgtggtttaaccagccctccaggtgaatctgatgcccactcaaggaagagtgagaaccactgttctaatctatcgtcttccaagagtgtgtgggaagatcaaagaaaaatcaggtcatggggctttgcggagaacaatcaaacaaatacataaatcaaggactctataagcataatttaataaatagacggatgattgtttttaacttatttttcaatttcctccttagtttgtacatgcatttagagataatctcagcaatgtcagcgagcttggtggcatagttcaagctgtgaaggttcaataaataggtcggtaaacattgcaaatcaacacagcttttgatgaaatgtcaggcaagacagggcttagctatattcggctcagcttgaactcataaaccatcaactggcctctgtacttccaggacaatctgatgaataaaatacagatataaaattaaaaaatatatttataaagagattagtaaaacagcaatctgtaagtgagaaatgacaaccacttagtccagaccaaatgagagagaagacttgcaaaagggtaacttttcttacaaatcaagttatgggaaaatttgagatccaaatagacttttaactttggattgtctttattcccaacacacgtttttaatttaatgcggtgtactttatcctaactcttttagctcacccccctgaaaaaaaaactagctgtcttcctaaagatagagaaaacttgtccaagtcagaaactctttggaattttaataaaagtaacataatttagaaattaatatacttcaaatatactgacagtatatattggcaacagaatatatgctaatttagaattttaggatattctataattaaaaaaaaacctgataaatcactacaccttttcactttatttagaagctaccatttaataataagtgtttaacctctaaaatcattctgagatatttcagataattaggcagcctggaattactgtttacaattgtcccagtttgcttcctaataagttgtgcttgtctaaacatgtctaaattactattcacaaggatccttgttatttccgtcttctttgattaaaaacttcttaaaaatgtgagtgtatatgtgtatgtatatatatacacatacacatattcatatgtacatatatgcataaataagcccatatatatatgtgaaacacaggtttttctattgttaatataaaaatccctcattagttttctaatgagtttatgaatgtagtctacgtccttagaaatttaatttgaggtaaaaatattatcgtttatagattaaggtctggatatttttttcttttcttcatactagaaataattttagatacctgaagacaaagttcattaaagccacaacccaaaaagtagaatatgggttccttcttatttcagtgatttgcattatcctataggttattggtgtcaaacccctttcttcccttcctcacaacaaaagccccaatttaacttttatagaaaggcatatggaacaggagtcatccaaatatatcccaggggttgcaaattgaccaaaagagtcacctttagggaagcctgcttctgaatgcttgtggaatttatcattcttctgaatggctgttgcatttatctgcagcttttactcaccagatgagacctcagacatttcaaattctgcggaggctggctacacaccttcataggaaagctttttgctgatttccctgttggtacttttctcttacacattctatggggtatggtaaacctggaggtagagtcatagccaagcacagataaagcaggcacagaatctctgaccagcctcacaaaagcagacaaacacacaatctttttgcacctgtttcttccactccggttgccgtgaatagtgaggtgttctcacagattcagcttcacagacagcattttgcaaacactcccctctcacagcaatggtttcttccctcaccggctcaatctacctgattacgttcccttctaatcagtaacctcagttcctctagaaataactgtgtcgtctgctttatataggatttatctgagtctgaagcagaaactggaaagtagacttagaggagctgattattatgaagacacctgtatttttgtctggtattcacgtgaactcgacagtgcactcatttatgcaaactggtgttagtgaaaaagaaaaagaagcagagaaggaagcaaaaagaagagactggacctataaagttgcgcacctgtgtgatgctaggagaagaaaataactctaaaaacgtccagtgctgctgaaaacacatttgaacttcctatgaaaaccaacagtgcttgacatacaaatatcttcctccagacacacctttaaaaatacattttaaaatctgaaacaatcttaaactcaatctaaaccacaatgcagaagttaattcttaaggcaaatggagattaagaacgaaacttcatccacataaaccctgtgttttaaaaaaagaattaaaaggaataatccgtataacttactcaaatttgtatttgaagttaaaccttgaatcctgcttcttgaaaaaacagaattgtgtcaggcttctgtaatgactgtttacccagagcataagattgaagtggattttcagattaaaaataaaactcttaagtatgtcaatccccatctgatcaaagcatataaactaaatttttccaaggacttcattaacaatataaccaagtagagctgcagttcttggttttctttagagtaagttgttaaaatgattgaagttcatgtaaaagaaatccagagttacagttaaggtttgctttttttttttttttttttttttttttttttagtagatccagtgcccggcaaacagtatgtgctcaacatatgtttatttaatgcgaccaaaagcatacaatataaagtgtcattatcattgccactgatatttttaaaaagccatgttctatacttatttcatttttacgtaagccacaattttacaaggtttcaaacaaaaaaaaaaacccacaccttgttttctttaatataaaatatttggcaattataagcatggaccgtgctggcagtaagttaaaatgtgactgattttttttttctccgttccctactctcaattttcagatgcggaaatttcatttggagagaacaggaggtgttggtgggaaaaatctcattaatcgtaccgtattcccttgtctacaaagagtactgcatccaaattacagaagaactaaagaaaccttgtagcatgagtataattagcagtgctactaagtgaatggaaatggaggttgcctaacttaattaactgtaatcattactcattgtcgtactgcttagaaagattagttgagggtatttcttctgtggtattactttaggcgtttctccttccctcttaaatgtgaaacaattacactataaagaaagaattagcatgccctttcaatcagatagaagcttttccgaacaagtaagttccatgtcctagctcgagggcggcaaaacaggaatgatgggaaaatatttagttgggccaaagttagagaaattaagaaaaaagtagttaattgcagaagttactgacttgaggaggaaaaaaggaaccctatatatgagtttctgtaaagaaattagctcttggccagggaagaaataaataacaaattaagatctaaagggaaaaattaaggataacacagtacaaatacgcagtactgtctgatgaagttgttcacaattgcacaacagtgcaagattccacaatgcaccttcaaggacactgtagctaaggattgctttctgatcatttatccttttagcggaagacacttggcatctgggaacatttgttcttttgaataaaaatcacctcatacctaaaaggaacctttat

SEQ ID NO: 1563488 - DNA, 4001 bp, Homo sapiens
gaggattttatcatcaggattctccccaaaattctctttcttcatccactattgcaattgtatgcactccataaggaaataatattccctggactttttaagcctatcaaaactacctatactctgccacatattatcagggacattcttggtcaaagttagacaatatggtaaattaactcatgctattgtgtatactgttgcccagaacacctattaacggtgattcattaactgtaattgcattgtaaccatgatctacaaatctaatatatcacccccaaattcattttaaagtgaaaaacttcagacatcttcaccaactggcagggagaaggctttgagatttgcagctaaccttctagtgctcctctcatcatagcatggacttggtgattgggttcacaacatgtatataagatttgaaaagcagatctagtaattgcgatcacacaaccctaaagacttttgaataaataatacctatgataacttcacatatgtttaaatgttaattaaaaaatgagaacagcattttaaaaatacttcttacagtgaatgtaaatttagttatggcctaaaatttactcatttaaaagtcaactcagatttattttcaacactattttaattctcattctagaaaaacaggtaaacacgttttatattttcgtttgaatgaagcatgggagtgagtgcatgtagctatattgagcatgatcattaataattgaggtgtaaatttatatcgataattttgtgttactcactgcttgtaactaacacatttttataaaacaatatagaccatgtgactaaacgaggagtttataataaaatgtttgagactgctttccaacaatgccatagaaaatattttctttttttctttttataagatagagtctcgctctgttccaggctggagtacagtggtgcaatctcggctcactgcaacctccgcctcccgtgttcaagtgattctcctgcctcagcctcccgagtagctgggattacaggcgcgtgccaacaaacctggctaatttttgtatttttagtagagacagggtttcaccatgttggccaggctggtcttgaactcctgacattgtgattcgtgggcctcagcatcccaaagggctgggattacaggtgtgagccaccacacccggccaaaaaacattttctttaccatttactatcctatggttttactctagcttttagtatagtttgaagtcagaaacaccagaacgtattgctcctgtctttgaaatgtctttatttcaaattcctccattacatccttaaaaaaataaatcttagactaatgatctagacccccttttcttcctacctacctccaaatagtcaaatcagtgaatcaaaacaaccccatggaaaactagttgaataaatttaaagttagaaacactgcaacattttgttgaagtaataaaaacaaaagaatggaagctgattcccagatgtacttgcctgggcttcctgaggcatttgagctgcgtccaccttgtctgcaatataagctgccaactgcttgtcaatgaatgtgagggactcctggattaagtgtaaggatttttcagtctcctgggcagactggatgctctgttcaagcaacttttgcctccttacagcctaaaaagaaggaataagagtgtatcagttaaatgtttactcttgatagcttttctgtaatcctgctgaacaataaatgaagattctagactcttccacaatcacctttttgtaagacagatttcgcagcttcctggcactcattcagctctgttgatagaaaaaaaatgtgaaggagaaaaataaatagcaaacaaaactataggatcagggatctctgcatgaaaatcaatcacaatatcacgtacattaaggaaataggctggaaaaaaaattagcaaaatcatctcagtcattgcaatctgtctttctcaggtcgaatgttcctcctgatctcattatatagttcaagagatttggtttgcttagaatagggtcatcgtcatcacaatccaattcaagacagataatctgcttccaccagtgagatacatgtacaatctgttcagaatcagctccttgtcaaaaacagaattttagataacagtctggttaaagatttattttgaatactatttcaaccagctttgcatgatcttttttctccctactttctttcacaatttggattacagaaattgtttgtacaattgggtttatgttactgctgaagtagaaaaaataataagtaatcctaatatagctgcaattaatcttgattgtaactataagtatgattaggataattcaataatgttcaagtataaataccatgctgcacagattggaaagtctcccttcaaggatctgttcacttttaacagagtagttgtaaaagtaagaaatagggcaggcaacttattgggaattcattatgtgtcatttaaaatacatttccttaatatacaatgtaaaggcatgattatcaggtacaatataactttctttcccacagagcatgactgaggttttaagatgatcttggtttttatattatatatagaatattagatattacataaatactatactttttaagctttaaaaatattagtgatgtcattattcttcagtgaagccagcctataacacagctttgcccaagtaaaactacagttaaaggcatctagactaaggcaaaagaacaggaagtttagtgatgctgcaggaagagggaaggctttcccagtacttctccctgtaccataaattttgactccattaagattttatcctgggctttcctttcttctcattctacccataccttaacttcaattcctcctcacattctgacaactctcaactctacatctctcaagtccagatctccccttgatctccatacttgcatgttatctcaccctattggacatctcctcatgaatattctgcaaccaccaaaagctaacactcccacacatgaactccttgcatatactcttctcacctacttctcaactccccaacttgcttttcctccttctctgtattttttccggtttcagcgaaaaacaaataatgattccctttattagatgtaattctagatatttctacttcctctatcatgtccttcatcatgttgcatctaatcagtcaatcactaattatttattataccttctaaatagttcttgattccaatcttttctctctctctccattgtctttactctagttaaaatcattactatatcttacctcaaatatgctatcagtttcttcactggcattttactctgccacatcccacctgtaaagcagctgcaatgtgttctctcaataacgaattggggcttcctgtctaaaattctctagtgattctttactgtccttcaaataaaagctctattcttttttttttttttttttttttgagatggaggcggagtctctctctgtcacccagactggagtgcagtggcacaatctctgctcactgcaacctctgcctccctggttcaagtgattctcctgcctcagcctctcaagtagctgggattacaggtacctgccaccatgcctggcgaatttttgtatttttagtagagacagggtttcaccaatttgcccaggctggtctcaaactcctgacctaagatgatccacccacctcggcctccctaagtgctgggattataggcgtgagacattgcgcgcagccaaaagctttatccttaatgtggcttaaaagtcccttcataatataagtcctgctggtgtcttttactccctgctctagctatacagaaattttattttttatttcccaacctacactgtggccctcttgattcttggccttaaacatgttgttcccttttactggcataatctcaattctgacttccttttattggctaatttacatttatcttcttaatgtagtggacatctct

SEQ ID NO: 1563489 - DNA, 4001 bp, Homo sapiens
ttgatcatacaaaataaaaagaggagctctaaagaaataaagcaaaaaaaaaaatttataatccacattactgcaatcatctagtttgtgaaagaagagtatgtattttaaattaaatccttaatgatttgatattttgtttttggaacttcacaaccaagactatcctaaggaattcagagctttcctcacaagaccaaagcaacagtgcatgaaattgaactcaaaaagagccaccattctgtgtgacttcttggctgacacaatttagatatttatagctttacgaatgggccactggagaagaacttgaagctttctctagccaggaaggattaatgaacgtgcgcacctggtaattacaccactccatcttcctgaaagccctcacgctgcctccatggcagaaactataatgaaaatgcattgaaaaatatcaatctgcaattctacaattaaatctaaataataaaacttggtatcttttctccccacacattccagatgtgataaaacacagacagcatttaaatttaaaacatagaagctgaatgtcagcctatttttgaacatgcctcatttccaaagtaaacctcacaagagaaaaaagaggttattaaatacagcaaaaaataacaacattcaaatgtgcaacagagaacccataactgttttccctttattaaaacacagcatacaccataagtgatgcatttacttcaaagcagaggcatttcaatgattaaatcacaaccgaagtgtacaaaggtaaaatttagaagtgcaaaggtatctttatcttccaagtccagttacttgttctggctattttttctaaactcttactgaaaggaaaacctcacttaataacttttaaaaatataaataaaaaataaatcattatcttctttacataaccgtatgttaattgcaaaattacttgaactaaagagatatacgatgacatagtatgcaactcaaataacttgttacaaagaaattttcatcctaaaacttgaacaaatcaaactttttgcagtagtatttttctcagataaaacacagtatagaggttcaacctagtgtttcttaatgtgacacaaagcaatttgatattccaaggaaggcagctatgtatatataaactgagaaggctgctttcagaaaacaatcaaggttctctaagcaaagcagggttttatgataaagtttcatggtactcacactgaattttaatgactgctttagtaaagcagaaagagagaaaatttaatgtaagcactgatactaaaagttaattgccgtcttaacacacaggcgccaagattcccctagcaggagtctcttaaaaaacacctttaaacgcagaagagggcacaagctttgaaaaaaaaaaaaaattgcctgttactgttaaactctattgttccctgatggagtatagaagaaagaaatgctccaggagagggaagtggatatgaattgccccctccagaggagccaaacaaattggctgtaggaagacttcaaaagctggacgaacagagaagctcaaagaccttacagatttgggctacttgcccttgctgtgttttttttttttttttaatttcccctagaatgaatatggtttaacttgagagcaaataatggaaggatgcatttttaaatgctttgattcccagctttttattctgcctctaactagctattacaataccacttaatccggacctcagcattccaagtaccaaagcatctcctcccacccactgctcacacgctcctgcatcagaatagaagacttacagaaaagctgccagacccacagaagagcactttcctctcaacagatgtcttccagcttttaggcacacacacactcagacacacttgcctaccttaataaggtgtgcaaaaacctctttcggtccccacggatgcttttagttcagagcagccagcaatgcctccgcacaaagctttgccattgctagtgtgaagagaaagagctgctgggatgctgaatggcacatcagccaactttgtgtgtagcaaaggctctaaagaaatcctgggctgaaactctgctggatcatggattggactcaatttcactccacacacagtctgcattacctgatggagattatttctggaagcacttagggcatgtttgtctacaaaaagatagggcctttttctttccttaacaatttaaaaaatacggtaacaaaccagagacctgatactttaaggaagatcatttattgtgagctccatgagggcctcaatggtctgtttcgaaattgcagccccagcatctagaacacagtcagcacttgataaatatttggctaaatattaaatgctcaattgatatcaggttcaaattagaatttgctaaattatttacacactgtaatgaaagtaaaaaatgcaaggtttgctgaacagctccagagggttaataagagtgtgtgtgtgtatccttttgtcattcaacacacacacacacacacacacacacacacacacacacacacacctgtatagctgatgataaatatacattatatcaatgagttaaaataaagtgtgctattcattcactgagcaatggggctattgcctgggcacggtggctcacgcctgtaaacccagcactttgggaggctgaggcagatggatcacaaggtcaagagatcgagactgtcctggccaacatggtgaaaacccgtctctactaaaaatacaaaaattagatgggcatggtgacgcacacctgtaatctcagctactcgggaggctgaggtaggagaatcttttgaacccgggaggcagtggttgcagtgagccgagattgcaccactgcactccagcctggcgacagagcgagacttcgtctcaaaaaaataaataaatttgtaaaaaaagatttaagcaaacccactgataacaatacttagaaagtttgttgaaaaccgtatgtattatttgcttattgccctgacaatttctaatatcataatagttcattataatagcccattcctcagtgaatgaatagcacacttcatttgaactcattgatacaatgtatatttatcatcagctgtacaggtgtgtgtgtatacgtatacttttgaatgacaaaaggatacacacacacacacacacacacacacacacacacacgcacgcaattattaaccttctggagctgttcaccaagccttgcattaaacctggattgaataaaagactcccattcctcaaggaaattttacttcttctatgaggacttctcagtaaccctaaattcacaggcatattctttacatgttactgtcccaaagcaaaatgcaagctggcatggaaccaagcccagaggttaattcctgaagctagaggaaaaggttccaaagtgccctacatcccaaggtcgcccaacagatccacacctggaagcaatctccgccaagcgcctatttacaggcacaggtgtgtgcctatcgggacagctgaggaacacacctaatttgatagatgacattctgatgtggcaggctttattgtgctgtttatgacaatatctgcagattatgatgtgcttgtttaataaacagcgtaattaagcacacacaaaacaaaacaggaagttaatacctaagtggtgctgacgtgtttatgtaccacaactgactagtgtattctttactgcctattactccacttcttaatatccactgaaggaatcctcagtctgtatacacacatctccaagttatgaacatcaacttcatgcatatcctcagaaagacctacttacacctgcagcctcaccacatatatctacacccttaacaggcattcaataaatacttgtcaaatgatcagataaatgataaatgaaggagaaacataccaatatttatatcttcaagattgctcctatgggcatataattttacaggagttgctacttggattgtctatct

SEQ ID NO: 1563490 - DNA, 4001 bp, Homo sapiens
tttctacctagaggtagtaactactcccgtcatttagtgtatactcccataactattattaagtccatttggtcatcttctacctcccttcattatcactttttctctagacacagaagaaagcacaaaatatttttaataaagagaaatgaattaagaaaggcaactgcttagaaagcaggaagcctggctttcattccccgcccttgctagatcatttaagttacaatgggcgttttacttactatctctatccttttgttcctccacggaactattgcaaaactggtataacaagaacttccctctgccctttttacaaagatgctatgatgcatccattaactaacttctccaaagaaagctggcacatagaagggggcaaaatataaagtatgtgagtatactacaactaaaagcttagtttacagaggatgtgttttaacaaaatctgagaggaagcaaaagacaggaagttgctatagtctctctttaactgtaggagctatctcctctaaactgttaattataatgtgttacaggttttatattatataattgtaatgtgttataaagggttttaaagactgtcctctggtatgcatttagactaatgccaaaaataattccataatacatatccgttaattttttatcactttttgtataaccctgtgatatgccaagagagaaatttatgaaactagaatagctgcactcctcatttaaattcactctgatgtcttaatatgcatgtctcctatgtttataaaacattaccactttaatctaatctgaatcctcaagtatcatctccataccaagcaaataaatgattcatttattcaaaatacagtgaatcattctgaaattggatgatttacgtagacatgtgagataccagttacttgtgctaagacaatgaggaaaatttggccattttaattcatttgtggcctttttgctccacatcttttcctacctaatgttgagagactttttccgaagttcactccacttgaagttcatgttatccaaacgtctttgtaacaggactgcatcatcggaaccttccagggatctcaggattttttggctgttttcatccaggttgtgataaacatctgtgtgagcttcaatttcaccttggaggtcctacaggacagcaggaagaagaatatgtgcagaattaccaaacaaaagaaacaagcgatgaatgtgaatttggagaattgcaaaatataaataattattagttcaaaagacatttcaatcaggctaaactaacaagaagatacatctcaaatcccttttcttggcgtattgccttctcctgttattatgtagatttaaaatgggcatcttattagttgtaatagatttattccttgccattatgagttggaaagtaatgtatttataactttataaagttcacaagttatatcttctagtctatggacaaaatgtattattttatggaagtgataggcaataaaattctatgataaagtgtaccccagtgccaataatttcattactatatggatcaagtcatattttctatttacgtagtaatctgtagagttaactctgaccataaaagcgtggagagactaataaacaagattgcacttggcccacagcaccagcacattcctgggagtctgtcatgggagagaaaatcttcttgacaacacaaattaagttcaccttggtattatagcatcatacatatagtacagcatcatacatttattagttttgatttcccatttaatacacatttttaggcttgacaggtggaaagtacataggaccttggtaagagttatgataagaggttatgcattcaacttcacttgtatacacacagatcaagaaaattattatagtagaagaatctgacctttacatggtatgtcttcctgtgtaacattttcagcttgaaccgggcactacagcactgatcctgttgcatagcaatcctgagaaaacccagaaactgaaagagccctgctttaaaatgccaactttgcttacattctgttgacagaatgaattttggagcacaggcctcaccagtcaataataataaacggccactttgtactccgcactaaacagtagccaggcgtgtggatgtgggaggaacctcaaagagaggaggcctggaatatgcaactgacagtttatattaaacagccaacttttcttatcattctgccattacaagccagagacattataaattcattttatatatgtgtttccttccttgttcccagcagaatagtcaaagccaagggaacattcctcagagagctgccgggtaccagcattcctttctgcctacacaatgaatggaggctttgtatattatctgacttgctcttagagatttgtatgcttctgttcaacaagtttaaaaattcattctgaagctccaaacaattggattgatctgtgtaactagaaaagttttttttttctctctctctctcaaattgaattaaattactctgctaaagtaagggagaaaaagtggcagaaataacatgttagaaattctgaagaactggctcaagttttcagccacagcctcttaagatgcagaattctgaatgttgaacaagtaaggtagacagacaatgaatgtctattgtcactatttttggcagctaaagcatcactgatggactctaaagagagttgtgtcccattctctttgactgggagacaggcaggggaatatggatagaatcacatcagaagttgaaagaagggaaatactgaaagtatttctgagtagtatctctgagtagtacaaaccaggtttgtactggaaggatatagcctgattttgaaagtagtttatatggtagaaggttagtattgggattcttgcagaacgaagtttggtcaaatatatagccattttatgtttttctttcttttttccttttgcctacgtggaataacatgcctgcctaatttgcacttcttcagcaaaagagaaaagtgagttaatttatctaagtacttcaggagaaaaagccaaccagatctaagttccagataattccttcacttgtcttttactttacttcttctgttgtacttgatttgtacagtactttccttttgtgtatgcacttaggggattaaagacaaacttttagttgttcaagtaaaagtattctcactagtagcatcagttttctatgtttactacattaacatacatataaaggatagtacatttgaaatttatatcctacattgatagcagagacccaggctcaatcacgagctccttaaggttatgtataccatgaagtcaccaacactttctttgtcttctcaagcataaataggatgttgattcatgaatttgctacttttcatctttgccatatatattatactgcatataaacatctttgttgtattatcaacaaataaatgaatataaaattgataaacaagcatttattgaggactgatttattgtctagttttagcactttgggaaatgtaagaggagtacaaatgatagttctgtctttaattttcctaaaacctagtgtgcatttttgtttaattcgtttatattaccaactaaatattgacggcaattcctgccaagtcttcatagatactgggataaagactccttcctttagaaatgcagaaatggctaaagttatcttagcattggcaagaagataagtcttctgtcagtactgcttttctaggtcatgatggtgatacagagctgtaaatgacacgtgtacagtaaagggctttacaggttacaaagcacgtacaaatgtaccaccttagttattcctccccctggctctgtgaagtacatcacattttctgttttgcagatgagagcactgagactcggatgtttaactgacttgcctaaaagccatatagctgataagtgttagaactgggaaatggatccaattctcttgattctagaagat

SEQ ID NO: 1563491 - DNA, 4001 bp, Homo sapiens
gaattgcttttttagtttcttaaaaacaaacattaaacacttataaaaagtaacaaatatctactgctgtggctgggaaaatggcagttgcctaattaaaataagatttcttctgccaccattgttatttggtactgaaaatattccaaacagttgcctttttaaaaaactatctgtccactacttcccagggagaaaactaatcgctatgcagcaatataaaaagggagcgttctcttgcgatttgcagaggattagagtttggtttcatatataatctggagcccattgatccacacacacaaatgatttccctttaatctgaggatcagactctttttctagaggaaccttggcatttgcgtgctgaattgttgaacttggcttgcattgctggaatactggcagggtgtggatggtaaaatatattttaaagtttctgctaccgtggggcaggggtttggaggggtgggcatcaatataagcatcagaaatccattctagttccccatttcttgttccctgggatatttaccattttattctgtctggctaaagccagggcaaagatgattgcctcggtggctgttccagctgttagttgtcctccgttttatttgcttttcaaggtttaactcctacccaccctcaactttggtcaaagcaatttcttttcagggtcgtgtccaatcggagatcaaacaatgatgactgaaaccaattccacggtgttcaagggtcagagacctttcatataaccgtgttgcttcatttgctccactcgcttctccaacagcaaatgtatcctccaaagaggggcttgagtaaaaggcaataaaaaagctaggcaaaaaaagaaaggttgattgggggtgtggggggggggggggtgggtgacaaggagagatgacagggataaagcagaagaccaagaagagtttattgcccaaggaaaaatgtagatttcacttaaagacgccacttaaaagttcaccacttaaatcggatggatttttttcatgatgtaaaaacagtttataattaatattatgcctccctcgagcaactaaaccccttcaatttaaagcttcaaacttaacttcaaatttgactaatataagcaaagtgttctgccctttttattgccgtgctgggattgggagtgacaaactttgcttgaagatgagcacagacacctggagaaatgcgagagaacaccctagaaatgactccacacccaatcccgaagggcaaaaaaaaaaaaaaaaaaaaaaaagcccaaacaaacaaaaatccccaccccctgaaatctttgacttctgggctttagttgtttgttctttctttcctgatttctgcaggtcttggggcatggaatgagcacggtagaaaatgcagcgagggaaatgtcagttggaatcctcggaagaaatcaggcagaaagttgaccttttggcacttgcagtgcaatggaaggtagcgccgcgtgcgccccttccttctacgagtaagagcgacgatttaggaacagccagccttgctcacgtccacactggcagcctggaaaggagtgaaaagctcccccggccccaatccccgcgtgaggaacgcgttatcccctctggggacggggagaaatcagctttttctctccgagcccgtcccaaagccgagggaagaggttcccccactagcccggcgcctggggagaaaccccgggggcgcacctgcagccgcgccgcgggaacccgcgggagaggttcctagacgcccagccgcccggcgccccgggtccagccgccgcgcctgtccaagttttgaccgcctcagcttgccccctgctcgcgccacaagtgcacggattgcggccatcagacggggccggggccgcgatccacttaccctttgagctgttccctcatggctgcaagggctccgcggtcgagtgtgggtacgagtggaggagtgagcttcccagagccgccgggctccccgaaagtggagcgccgccgccgccgccgcccaagctcacagctgaaagcactgcggaggagccggcgcgggcgggccggggagggggcgctgcgggcagacggggcggggccgtgtcgggctccgcccccacctagggacctgggaacccggacacccagagactgggcagttggggctttcaaaacggaaaggaaaaagaaaagagaaagaaagaaagaaagaaagaaagaaagaggatggggatttaaggtagacccaggaacctggaagccacacaccgctctgctaacacctccttaaagcctctagcaagactacttgttgtctaaataaatgacccaggtgcaaatgacctcatcccagataattaagagtgtgggcttggagttttctttttaaaaaataaaagaaaaaaattatatacataattctcactctcccttcctcctcagttgaagattaaagtggccggcgataaggacgtgaaattgccgttaggctcatcctgggctaaaagggattgttaaaaagactttggatttggatttgtgacatagcagcggatctcaaaatgtagaccctgggaacagcagttatcagtatcacctgcgaacttcttagaaatgaaaattccctgggcccggcccagacctattgaaccagaaactctgagcatactaatgtttgagaatcactggtatggactctctaaattaagacaataccaccagtgctgttgcacggtttggtcctttagtattcttttaggaagatctagaaggaacttgtttctaatagaatattttattggaaaagttacagggcctgaacagttcaaataattctaattttagagtttgcagtatgatgatagaagttaactacacacaattatttcaagcttggaaatactcaaaagaagaagaaagccttcattagcacaagaattttctgcaaacttcacataacaccttagattagcatccaaagagcatcttacgataaactgttagtgatattttcactgcccttctttgtccatttattttgttggcttgcttttctttttattttctttcaaacatttgctttccactctcctttccgattgattcattccacttcggtctacagtttaaatgtggtcccctttttaaaatttatttcttaagggatgggggtctcactgtgttgcccaggctggtctcccaactcctgggctcaagcaatcctcccacttcagcctccaagtgcctgcgatgacaggtgcatgccaccatatccggcttcttttgaaataatccttttctgctcaacatttttccccctagaatgttttaggtggaagcacacccgttttgctttatctaatgctatagcatggcaaaagaggcaaaaataaagtatctggacaaaagcaaaagggaatgccaggattctttattacctttaacaaaccaaatataaaggtaaatgttatcactaaagatatgtgcatgtaagtatgatcggtattgctatttttaagcaaatatggcacttcttctggcattctggctcatacactgagattacttagtgttgccctttagcaattttaagctagtgagttgtggaggcagctgctattacggtctgaggggggcacactaagatttgctttggctgaagttgtcccttggtctaatagtatattctaggtctgctccgatccttggggaagagggattagtgtcctgtaatgaggaagtagtgccctttgcagtaaatcagagacaccaatctctgtgtcagtgtggcaaatcacttaactactgtttatgtttatttcaacgaaaagacagaagcctcagagcatggacatttgtaaatattacaaatcgataaactaaggatttgtaacacctggatagtaagacatttgtcactctcttcctttcctgttttttgtttgtttgttttacacttttaaattacctgctcaaaattcaggagttctgacacgc

SEQ ID NO: 1563492 - DNA, 4001 bp, Homo sapiens
tcaacctcctcccccacccccaccaaggccttctgctcttcccatccactaaactccgcccctcccagggttctggaccccactactttcccaggacctgtggctgcagtagaagagggtcaagggtggcacagggctggaggatcagagttgagcatctagaaacaaggaaaggagaggccaggggattaaatccgctggcggacacatactaccagtagacagaaagaggggcaggattttgcagtatctggatgtgagaatcccaatgcctgctggaccattagtcattgtggctggggcaagtcccttctcctgcttggccaggtttcttttccatacctctttttcctgacagggacgcttattcctaccagctctttcctcccagggcaatggtgaaaatcatgggaaattacaggtgtccgtgctttaatttgcaaaacacctggagagatgtgattactgtccctcttcagggactggttctcacttccatattgcccagtccccatgggtcttgaagggtctccaggaagctttctctaatggcctctgggctttgccctgggcctctgtggccctcgccagcacggaccccacctttcagcaggaccttctatcccatccacctgtttcatgtggcataacaacccccatttgttgaagccctactatgtggcaggccttgtgcccgttcccttttcaatgctatgggtatagaatattgtcctcagtacatccatagggaaatggaggttcagacacataaagtcacttgtccaaagtctcacaaatagaaaatagcaaagctaggagagccctgtcctcgcccgttagtattagatgctgccttgccctcctccttcttctcctcctcctcctctccctcctcctcctcctcctcctcctgctcctcctccccctccaccacctcctcctcctcctccccctcttcctcctccatctcccacggcatcaaggacaaggttaggcacacaagacacaacctgctccatggtcctcacgctactcacatgctgggcagggcaggggccctgtggggatccccagaaggagaaaccagttgctgctccaaggtcactggagtacagggcagagacaaaggttctggggcctggccaagcagcagagccccttgggagctcccctgcaggggcagagagcacaggttgcagtcaggtaccaggccagccatggagagaggaggtgtggacatgttttaggatgaggataggagcctagaatgtcagagctccgaagaccttgaagaccagccagtcttgcctttcattttgcaactggggaaattgaggcccagggaggagaagtgatatttcccaaggtcacatggtgagctggtgataggattggagatgaaacccatgtccttgggacacggtgaaagatgtctggacagtggctgggtgggagcctgcccgactggtcaccgactctccttacctcctcgggggctgtgaagatgtgggtctcgggctgcagcatgttgttctccttcccagctgtgaaagaccaggaacagctttggtgagtctttcccccaaccccaccccacttcaccccacctccagtcgcaggtctcatctcaccatggagctcttcgattgccctgtcccccagctctctccttcctacaaacacttggtagacaacattggtgacattttgcacctgggcacactaaggtccagggagcaatttgccccaggtcgcactgcaattctgtgacaggactggtgacagaaccactcatgcttcctccacccaaactctggctccctcccttgccagaaacactcactgagggctcctgctctgatggtcaaattcctgacacggatgggagctttgggaggggcagccatactccttattggtccttgagccaggtgtctctttgatcgtgcccgctgctccctcttcaaggcactcacagcaggcaagaccctgaggcgttctctgaagcaaaggatagcagggctaagattagtcccatttagaggaggtctggcccctccgcatctcagacaccatactcatgagaagagggcacaattgtgacactcgcaggcctggaagaggcagaaatgcttgtggcccctgatttgggcagtgatacccaaatggttgtggcagcggtcacagcaacctatagctcttctggggccaagttcagtcccccatggggctccagtctgacgccctgtggtgcattcagagtcagaggggcagcagggtgcagcgggtatttatttgtcctcagtacatccatagggaaatggaggttcagacacacgggatccatgcttctagggtcaggagcggaggtcagaatggccacgtgatcccctacccccaacgtacttcctctgcccttggaaaaccctatctgaggtggctcaatgctccttctccatccttctcaccgctggaatcagattgccttccctccccttcttctcccatggttttcgccaaccttcactgcaacccccttgctgatgttgcctccttcccagaagccccactcacacatagccccctcccaagaaactcttggaatggatcccatacccattcaatgcagtcattattctccttgcttaccgtcacttcaccatagaccccactttcaggcatgcacatgcactcccctgccctcttccaccattactacacgcccttcttgtgtatcatcctgcactctgccaaacccaagtattattcctggcatccacttcaccaattctcttcagaacctcctgcattcattcactccccgcacaggattttgtgccaccagcactcaattccattgtcagtctcttctatgccctatattcaattttcccctcacatttcatgctggttcatgctgatttttttcttgtactccaccttacacttaattattcccttgctccccctttgagctgatttccctcttgtatcccatgaaatcatattgttctcctggatccctggccctctttcagttactaatttcattcatcccttcatgcatcccccccggcctttttttttttttttttttttgagacggagtttcactcgttacccaggctggagggcaatggtgtgatctcggctcactgcaacctctgcctcccgggttcaagtgattctcctgcctcatcctcacgagtagctgggattacaggtgcctgccaccacgcctggctaattttttgtattttttttttttttagacggagtctcgctctgtcgcccaggcgggagtgcagtggcgcaatctcggctcactgcaagctccgcctcccgggttcacgccattctcctgcctcagcctcccgcgtagctgggactacaggcgcccgccatcacgcccggctaatttttttgtacttttagtagagacggggtttcgccgtgttagccaggatggtctcgatctcctgacctcgtgatccgcccgcctcggcctcccaaagtgctgggattacaggcgtgagccaccgcgccccgccattttttgtattttttaatagagacggggtttcacatgttggccaggctgatccacctgcctcggcctcccaaggtgctgggattacaggcgtgagccaccgggcccggccgattcccttgattcttcattcagcaggtacctgttgagcctcctatgaagtgtcaggttctgatctagccagtagggaactcctcagtgcagtagtgtttctcttggactcacacaccttttctgctttcatgaaaacccacacattccctccacagcctccccaaaatcttccataatcctctccacacttcaacaattgtgcttgagcacaccatttccccccacccccaccccaccccacacacgcagtcccaccaccctggagcgcaccacttcctcaggaagcccaatcatccactccctcccggacctccgaatcaaaagcaatcccatgagc

SEQ ID NO: 1563493 - DNA, 4001 bp, Homo sapiens
cctcctcccccacccccaccaaggccttctgctcttcccatccactaaactccgcccctcccagggttctggaccccactactttcccaggacctgtggctgcagtagaagagggtcaagggtggcacagggctggaggatcagagttgagcatctagaaacaaggaaaggagaggccaggggattaaatccgctggcggacacatactaccagtagacagaaagaggggcaggattttgcagtatctggatgtgagaatcccaatgcctgctggaccattagtcattgtggctggggcaagtcccttctcctgcttggccaggtttcttttccatacctctttttcctgacagggacgcttattcctaccagctctttcctcccagggcaatggtgaaaatcatgggaaattacaggtgtccgtgctttaatttgcaaaacacctggagagatgtgattactgtccctcttcagggactggttctcacttccatattgcccagtccccatgggtcttgaagggtctccaggaagctttctctaatggcctctgggctttgccctgggcctctgtggccctcgccagcacggaccccacctttcagcaggaccttctatcccatccacctgtttcatgtggcataacaacccccatttgttgaagccctactatgtggcaggccttgtgcccgttcccttttcaatgctatgggtatagaatattgtcctcagtacatccatagggaaatggaggttcagacacataaagtcacttgtccaaagtctcacaaatagaaaatagcaaagctaggagagccctgtcctcgcccgttagtattagatgctgccttgccctcctccttcttctcctcctcctcctctccctcctcctcctcctcctcctcctcctgctcctcctccccctccaccacctcctcctcctcctccccctcttcctcctccatctcccacggcatcaaggacaaggttaggcacacaagacacaacctgctccatggtcctcacgctactcacatgctgggcagggcaggggccctgtggggatccccagaaggagaaaccagttgctgctccaaggtcactggagtacagggcagagacaaaggttctggggcctggccaagcagcagagccccttgggagctcccctgcaggggcagagagcacaggttgcagtcaggtaccaggccagccatggagagaggaggtgtggacatgttttaggatgaggataggagcctagaatgtcagagctccgaagaccttgaagaccagccagtcttgcctttcattttgcaactggggaaattgaggcccagggaggagaagtgatatttcccaaggtcacatggtgagctggtgataggattggagatgaaacccatgtccttgggacacggtgaaagatgtctggacagtggctgggtgggagcctgcccgactggtcaccgactctccttacctcctcgggggctgtgaagatgtgggtctcgggctgcagcatgttgttctccttcccagctgtgaaagaccaggaacagctttggtgagtctttcccccaaccccaccccacttcaccccacctccagtcgcaggtctcatctcaccatggagctcttcgattgccctgtcccccagctctctccttcctacaaacacttggtagacaacattggtgacattttgcacctgggcacactaaggtccagggagcaatttgccccaggtcgcactgcaattctgtgacaggactggtgacagaaccactcatgcttcctccacccaaactctggctccctcccttgccagaaacactcactgagggctcctgctctgatggtcaaattcctgacacggatgggagctttgggaggggcagccatactccttattggtccttgagccaggtgtctctttgatcgtgcccgctgctccctcttcaaggcactcacagcaggcaagaccctgaggcgttctctgaagcaaaggatagcagggctaagattagtcccatttagaggaggtctggcccctccgcatctcagacaccatactcatgagaagagggcacaattgtgacactcgcaggcctggaagaggcagaaatgcttgtggcccctgatttgggcagtgatacccaaatggttgtggcagcggtcacagcaacctatagctcttctggggccaagttcagtcccccatggggctccagtctgacgccctgtggtgcattcagagtcagaggggcagcagggtgcagcgggtatttatttgtcctcagtacatccatagggaaatggaggttcagacacacgggatccatgcttctagggtcaggagcggaggtcagaatggccacgtgatcccctacccccaacgtacttcctctgcccttggaaaaccctatctgaggtggctcaatgctccttctccatccttctcaccgctggaatcagattgccttccctccccttcttctcccatggttttcgccaaccttcactgcaacccccttgctgatgttgcctccttcccagaagccccactcacacatagccccctcccaagaaactcttggaatggatcccatacccattcaatgcagtcattattctccttgcttaccgtcacttcaccatagaccccactttcaggcatgcacatgcactcccctgccctcttccaccattactacacgcccttcttgtgtatcatcctgcactctgccaaacccaagtattattcctggcatccacttcaccaattctcttcagaacctcctgcattcattcactccccgcacaggattttgtgccaccagcactcaattccattgtcagtctcttctatgccctatattcaattttcccctcacatttcatgctggttcatgctgatttttttcttgtactccaccttacacttaattattcccttgctccccctttgagctgatttccctcttgtatcccatgaaatcatattgttctcctggatccctggccctctttcagttactaatttcattcatcccttcatgcatcccccccggcctttttttttttttttttttttgagacggagtttcactcgttacccaggctggagggcaatggtgtgatctcggctcactgcaacctctgcctcccgggttcaagtgattctcctgcctcatcctcccgagtagctgggattacaggtgcctgccaccacgcctggctaattttttgtattttttttttttttagacggagtctcgctctgtcgcccaggcgggagtgcagtggcgcaatctcggctcactgcaagctccgcctcccgggttcacgccattctcctgcctcagcctcccgcgtagctgggactacaggcgcccgccatcacgcccggctaatttttttgtacttttagtagagacggggtttcgccgtgttagccaggatggtctcgatctcctgacctcgtgatccgcccgcctcggcctcccaaagtgctgggattacaggcgtgagccaccgcgccccgccattttttgtattttttaatagagacggggtttcacatgttggccaggctgatccacctgcctcggcctcccaaggtgctgggattacaggcgtgagccaccgggcccggccgattcccttgattcttcattcagcaggtacctgttgagcctcctatgaagtgtcaggttctgatctagccagtagggaactcctcagtgcagtagtgtttctcttggactcacacaccttttctgctttcatgaaaacccacacattccctccacagcctccccaaaatcttccataatcctctccacacttcaacaattgtgcttgagcacaccatttccccccacccccaccccaccccacacacgcagtcccaccaccctggagcgcaccacttcctcaggaagcccaatcatccactccctcccggacctccgaatcaaaagcaatcccatgagcc

SEQ ID NO: 1563494 - DNA, 4001 bp, Homo sapiens; identical to SEQ ID NO: 1563492

SEQ ID NO: 1563495 - DNA, 4001 bp, Homo sapiens; identical to SEQ ID NO: 1563493

SEQ ID NO: 1563496 - DNA, 4001 bp, Homo sapiens
tagcccggcgtggtggtgggcgcctgtaatcccagctactcaggaggctgaggcaggagaattgcttgagcctggaaggcggagcttgcagtgagccgagatcacaccactgcactcgcactccagcccgggcgacagtgcgagactccatctcaaaaaaaaaaatcaataaattatggtttaaaaataaaaaacaggccaggtaggatgactcacactttgggaggagaggcagacagatcacctgaggccgggagttcgagaccagcttgaccaacatgaagaaacccagcctctactaaaaatacaaaaattagccaggtgtggtggcttgcgcctgtaatcccagctactcaggaggctgagacagaagaatcgcttgaacctgggaggcagaggttgcaatgagctgagatctcgtcactgcactccagcctgggcaacagagcaagactctgtctcaaaaataaaaataaataaaaataaaaataaaaaactgccgggtgcggtggcccatgcctgtaatcctagcactttgggaggctgaggtgggtggactgcctgagctcaggagttcgagaccaacctgggcaacatggtgaaaccccatctctactaaaatacaaaaaaaaaaaaaaattagccgggcgtggcgacctgcgcctgtagtcccagctactcaggaggctgaggcaggagaatagcttgaacccgggaggcggaggttgcagtgagccgagattgtgccactgcactccagtctggcgacagagcgagactcctaaaaaaataataataaataaataaatataaaataaaaataaaaaactggctgcttaatgcatagggggctttctttccgggtcatgaatatgtttcagaactagaggtagtagctgacattgtgactgtatcagatggtataaaatactgtttcttgtattacatatgatacacaatatgtttgtatatattgctgtatatattgtatattttgccatacagtagattatacattgctacatacacatagtatcatgtagtactgtaactatgtcaaattgtatatgtggctgggcggggtggctcacggctgtcatcccaacactttgggaggccgaggcgggtggatcagagtgtgatggcgggcgcctgtggtcccagctactcgggaggctgaggcaggagaatcgcttgagtctgggagatcgaggctgcagtgagccatgatcccatcactgcactccagcctgggtctggctggaccctgtgtcaaacaaaaaacagaaacactagagagacaaaaggcgagcgcaggaggctgccaggaagcgggagccccacggggtgacggccacttcccgccgccccggggctggcctcgctgccgtcaagcggcccgtgcgcgctttgcgacagtcggtcgggctgggcaccggcgcaggttcgctttccggcggttgcaccgggccggggtgccagcgcccgccttcccgtttcctcccgttccgcagcgcgcccacggcctgtgaccccggcgaccgctccccagtgacgagagagcggggccgggcgctgctccggcctgacctgcgaagggacctcggtccagtcccctgttgcgccgcgcccccgtccgtccgtgcgcgggccagtcaggggccagtgtctcgagcggtcgaggtcgcagacctagaggcgccccacaggccggcccggggcgctgggagcgccggccgcgggccgggtggggatgcctctgcacgtgaagtggccgttccccgcggtgccgccgctcacctggaccctggccagcagcgtcgtcatgggcttggtgggcacctacagctgcttctggaccagtgagtgggcccaggccgaggcaggcccgcccgggtacccatgcccggccggaggtgggacttagggtgggggacgccgcggccccgacctagcgggcgagcccggagcgcctgacttctccttccccgccagagtacatgaaccacctgaccgtgcacaacagggaggtgctgtacgagctcatcgagaagcgaggcccggccacgcccctcatcaccgtgtccaatcaccagtcctgcatggacgaccctcatctctggggtacccgggccagtgtgctgggcagggggaggaaaggcgaggattcgggacgggcccagcctcgtcagaacaaaccccttctcgctgccttttcatggagccctggcactccggtttccgggcgttctgccccagggctgagacttggatttgtggctcctgcagcatccctgagggagcatgatttggagagggccttgggcatggagcaggaccaaggaacggccacagggcatatcttacagctcctttaacgtcaggcctccagaaccctctgttctctaaaccatccagggccccacagtcttgggaaaaatttgggggttggacataggatatcctgtgaggaagttctgggccagggactggaagcccagtgtcctggcttcaggtttgcccctggctgggcgtgtaccgttcagccctatttgggagcctggttgccacacctagaggttcctgctctgctgacttcacaggaagttgcttggctctggtaaccagatggccgggtggaggggtgcctggggcttccactcctgaacagagagcttaactgtcctagagttcatggggagccacctagccacactggagcccttcagagctcaccctggctgctgggtggagaaaggcctatagatgtcacaggtggatcctgggaggccaggaaggaggacttggagccatccactagcctagactgggctggttgcagtgacagtacagggagaagtatagaagaatgggcattgtccaagtatgttggggaggtaggcagtccaggtgcagtgattagtaagatgtggagggtgggggagagggaggagccagggagaactgaatgatctggcctaagggtctgaaagatgccactttgggctgtagggaaatggtagtgctgctgtccctcattccctgagatggggtgaaggaagggcactccctggggatatgggaagttggggcatgaagcctttcctgtcctctagggatcctgaaactccgccacatctggaacctgaagttgatgcgttggtgaggaggaatgggcccctcgaagtgggccgggccggccccacctgcctctgcccagatttgccctcctcctgctctgcccaggaggtggcgtccagcagtccaggcagggcatggggtggggccccgcaggccctcccctgtgcctcccttctgcatgctgatgctgggggcagggtggtggagcggggtgcagggggcaggactaattgcatctgtccctgcttaggacccctgcagctgcagacatctgcttcaccaaggagctacactcccacttcttcagcttgggcaagtgtgtgcctgtgtgccgaggtgagctgctcctccagcgagtgcagggaggcacttctggggcaggaaagctggtggccagtgtctctgttttggagggacctatgggggtaggcatcccgggagccaacatgaggcccagctccatcacatgccagcagaggggacagaggctgtgggaggagggatgggtccttggaaagtcctcaactctctgcaactgcccagggatcctgtggacctggagccttggcattagaattcaaggaggcattatccataaccccttctctcagggatgtcactaagagactcattgagaacagtgcgttgtcattggtccatggtggcagtagcatgtacctgcaggccagagggttttgcttctaggagaacaaacaggcttgtggggtgagaaccccaggggataggggccattttgatccctattctccagacagggaggatcacagagattaagctgctggcccaaggtcatggggtaggaggtggcaaagccaggatttgaatccagattgctcctt

SEQ ID NO: 1563497 - DNA, 4001 bp, Homo sapiens
tttttttttttttttttgagacagagtctcactctgtcgcccagactggagagcagtggcgtgatctcggcttactgcaacctcagcctcctgggttcaagcaactccctgcctcagcctcccgagtagctgggattacaggcacccaccaccacgcccagctaatttttatattttttagtagagacagggtttcaccatcttggccaggatggtctcgaactcctgacttcaggtgatcagccggccttggcctcccaaagtgctgggattacaggtgtgagccactgcgcccagccagtgctgggatattataggcctgacccactgcgcctggcctagtctacctttttttttttttttttttttttttttgagatggagtcttgctctgtcaccaggctggagtgcagtggcgtgatcttggctcactgcaacctctgccttccgggttcaagtgattctcctgcctcagcctcctgagtagttggggctacaggcgtgagccaccgcgcccggcccccccccttttttttttttttttttttgatagtctcattctgttgctcaggctggagggcagtaatgtgatctcagctcactgcaacctccaccttccaggctcaagtgatgctctcacctcagccttccgagtagatgggactacaggtgcatgctgccacaccaagctaattttttttttctttttttgagatggagtctcactctgtctcccaggctggagtgcagtggcttgatctcagttcactgcaacctccgtctcccaggctcaagagattatcctgcctcagcctcccaagtagctaggattacaggcacgtgccaccacacccggctaatttttgtacttttagtagagacagggtttcaccatgttggccaggctggtctcaaactcctgacctcaagtaatcctcccacctcagcctcccaaagtgctggaattacaggtgtgagccaccgcgcccggctaccaagctaatttttaaaatttgtttggagagatggggtttcaccatgttgttccaagaccccagtgcttttcgcctccattagcaactacaggaacatcttcgttcatctctgtctccccacttgtgagatgttctctttaagataaactcccggcagtgaagggtgtgtgcattttaaaaggtctcagatatggccaaatcatccccattgcaacctgtgatggggactctttcccatgcccctgccaccactggggagcccttcttgttcatctcaccagctggagcccccctctctcagtttatctttgtctcacactcacctgaccttgcagggctcggctccttgctccacgccctgtccatgtggcttttgcatcctgaggcatgagttcctctgctctgtctgcctgcttttctctatcaacctgtcaccttcccttcgggctcacttcctacctctctgaggctctgtccgtctctgtctcactttccctctcgtctctggtttcccttctctgtctctctgttgcggtgtctctctcctggctgggtttgatgtctgtttctccctgaccacctgctctgtcactcatgctagtttgggttccctaccctggtgcctattctgggatatacatgggtatgtgggcagccctgggctggcacatgcagccttggaggctctggcgtcagggacccccatgagggctaccagtaagaaccagagagagcgacggttcctggcttcagccccaaaccctggctgtcaatatcagccttggtgggagccctaggcttccctctccctctcaaaccctccccaggcagaaggcaacttcctcccttcttccgtctccccagggggctcccatacctgctcagaccagcttgtcaccaagtctgcctcatccttaagtggatcgcgataccccagaagagcagctcctgcctgaatagggctaggaggggaaaaaaaagaggaagaggctgtgttcctgagccacccggccaggaagggcctggctgggccggacgccccacccttgccaacaggcaggcccgccccgtctccgcctcgccgccaacaaggaggaccagcaccaggcctgggaactgctgacctgcccgcccaccttcccacccagaccccgccttcccgggccagcgggacatgacagacctgtgagtcactcaagcctggggcaaggaggggctggtgcctgagtgagaccccgagcttcgctcgccaggcccgtcgctcagctcccggtctgggtccccagtcagcagttgctggggaaggcgcaggagctggaagtcatgcctgatgccacgagaccgggcaccccaagggcgtgagtcttctgtccctgttgttgggttctgagtcccagtgtggctgcacacttctgagttaggggtgtttgatgcaagcgctctggagacccaaagagagggacagtccacacatgatctggccacagtcgtgaagtcaagggaggactgaggatctgccccagagaggaggagacccagggagctggcagtccaacgtcctgggggtcctgcagtaatgctgttgggacaaatgaggtgctcggacagggtctgtgagcaggaggtggggctgaatccactcagcttctcatgggatggctgtagctaatggattcgacgtggtaatagaaggctggacaaattttaaaaaatcaataaattatgggctgggcgtggtggctcatgcctgtaatcccagcactttgggaggctgaggcgggtggatacgaggtcaggcgttcaagaccagcctggccaacataatgaaacccgtttctactaaaaatacaaaaaattagcccggcgtggtggtgggcgcctgtaatcccagctactcaggaggctgaggcaggagaattgcttgagcctggaaggcggagcttgcagtgagccgagatcacaccactgcactcgcactccagcccgggcgacagtgcgagactccatctcaaaaaaaaaaatcaataaattatggtttaaaaataaaaaacaggccaggtaggatgactcacactttgggaggagaggcagacagatcacctgaggccgggagttcgagaccagcttgaccaacatgaagaaacccagcctctactaaaaatacaaaaattagccaggtgtggtggcttgcgcctgtaatcccagctactcaggaggctgagacagaagaatcgcttgaacctgggaggcagaggttgcaatgagctgagatctcgtcactgcactccagcctgggcaacagagcaagactctgtctcaaaaataaaaataaataaaaataaaaataaaaaactgccgggtgcggtggcccatgcctgtaatcctagcactttgggaggctgaggtgggtggactgcctgagctcaggagttcgagaccaacctgggcaacatggtgaaaccccatctctactaaaatacaaaaaaaaaaaaaaattagccgggcgtggcgacctgcgcctgtagtcccagctactcaggaggctgaggcaggagaatagcttgaacccgggaggcggaggttgcagtgagccgagattgtgccactgcactccagtctggcgacagagcgagactcctaaaaaaataataataaataaataaatataaaataaaaataaaaaactggctgcttaatgcatagggggctttctttccgggtcatgaatatgtttcagaactagaggtagtagctgacattgtgactgtatcagatggtataaaatactgtttcttgtattacatatgatacacaatatgtttgtatatattgctgtatatattgtatattttgccatacagtagattatacattgctacatacacatagtatcatgtagtactgtaactatgtcaaattgtatatgtggctgggcggggtggctcacggctgtcatcccaacactttgggaggccgaggcgggtggatcagagtgtgatggcgggc

SEQ ID NO: 1563498 - DNA, 4001 bp, Homo sapiens
aaagaatgctaatgttaactttttgctgctagggtggcaggtcaagtgctgatcaaatcccagtggaagttttcttagtcccatttattctcgagaaatctggccacctacagctttcttcacgtgttgtggtagaaggccagccaaccccgctcaaggaaggttttttgttttctctgaatttaggaaagcgttctctgctaggtagattgaatcacgtgttaacaatcacccaagatgagagccctggtataaatgctctgcacacagcttgccttcctctcttaactggctgtgatgacaggcaaggctccaatctgacctcaacaggtcctcactccaaaatcagactgaaatacacaagccaagtccattaaagtaacattaaaggtctggatttagctccactaaacagcagaattaaactttcaagggtctagccacaataaagagatttctttaaagtcacttaggtttgcacagttgtagctattagggatcagatctttatctcaaaggtacatagtttacctttgatcctcctccagaactcccactaatgtcaactttctccactgttgggatcaagcccctggcctccctttaatgctgggttttattgctgattctacaagatcaacagaaaaattacaaggaaaagctgtgaagttcccttccgatgacaagttgttttaacaaaaagagccctctcttaaacggtgaaatttaaacacagcaaacgactcgctgtaaaatggagctgagggagacaaaaacaaacaaaaacaacaaccaaaaaacaaagtaacaaaacaaacactaattaatcagtccgattgcttattcagggtttgttcgcttgtccaggaaactggcaacgagtgtcttgaaaacaagagaaggggcaagtgcccgttagcaccctttagcctttctccagagtcagacaatctggataaggctgagggtgctctgggagggttcccagggagtcagcgcgctttcgaatccccatcccccagtcctgagctgtggggctctgaccccaggtcctccatccctggactgacacacccagtcttcccccaaatccccacggcaccgtccccttggtccccttgcctctggagcgctcgcgtgtccccgagggacacactctccctgcggtggatgaccctgcgcccactctgtcgcagaaccccgttgtttctaatgcccttcctccgcagcagcaccccttcaacacccatcaccaccctctctccccagttgcaggaggaagtcgctctgcttcctctgttctcaccgccagcccgagcttgggcgcccggggctttctgggtggggttcttttttgtgtacacagtgtgtgtatgtgtgcgcgcgagagtgtgtgtgccaaacgctcatcgcatccttccgcctaggcggcctcaggtgctcgcgggaggggatcaggatctcgtcgtgcccttgtccccggctctttgtgccgagtccagagcagcgcgaggtcagctctttagctcacacccccggccccgaccctgggtgggagcctccgcctccgcctcctccgcagccgtccgagcccggcttttgcccgtctgcttccatcccggcgcacgcctccgccgtgccgggcggccggagagctgtcagccggcgcctgggactcggaccccggccggcggctgccggtgcgaaaacttactggagcggagaaagacagcgcgcggcgcaccaagcggccgcactggcgccgttcctgccccttcccgcgtcgctcccgcctggagcgcgtcccccgggatgccccgtcccccggccactcaccagcaccacggagccccgcacggcctcagacacgctctgccggagctcagccgccgtgccaggcttgctgagccgtttggtgaatttgcgcacttcggccatggcagcggcggcgggcgggtctcggcgggcgggcggacctcggcgggcgggtggactcactgccccggcccgcggcggccgcggccgctgctgctccctctgtttactcgccggccggccggccacatcgcagctcggcggcggcgcggctcacgctgctcctccctcccacctcccacccgctgctcctccctcgttccctccttccctccttttctcgctcgcttcgcccgctcactgtcctgccccacggcgtcggcggcggcagctccctcccctagagggcccgagctccgatcgccaccagccgaagcaggagggtgtgtctgatggggaagggtgtgtagagggggagggagaactggaggtgggggcgagggtcacgagggaagaggggggaagtggctaccgctcgggctccgcccgcagctgatgttgctggtgcagccgcatccgggaggggagatctgggctgcttctttttttccgcttgagtggggagggcggggtggggtgggggaacagagaggggtgatgaaatgtctccaagagtggggcgtgctcctctcccgccctagtgctcctctcccgcctccgagctgcagtgcccgcaggagggctggagaactctcacgtccctccaccccgcaagcccccagggcccaggcggctaggggctggaaaacaacgtggagcagccgccttttgtgtgctccttggggaagggtcgcaccaatgtcgaaggacagagagctgctttccagcgtgagcggctcgactgggtccccctcctcgcccacaccgttttcctactcagttggctcacctaacagggggcaacactggggagagagcatgcttctggaagtgggaacttattgtggcggcacccctcgctccgtcccccacgggggagagctgggtggtggagcctgagcctgtggcaggtgatccctaggtcagcactgactgcaccaggagtggggtgggggtgggcattaggatgagcctgtggcaggtgatccctaggtcagcactgactgcaccaggagtggggtgggggtgggcattaggaaggccatctccctgggtttggtggacttaccaatcttatagtagcttttacaagtgccctgcactcacctctccatttcctattcatctccttactcttttcagcttccaagaaattgtttttccaagaatcaaagaacatctcataacagggtataaaacgaacatgcttaagacagaaatagggacgggaatcttgaagtactagtgaccctgtcagacctcctgaagtgcagagtgaaaggctccactgatggtggcagttttctatctggttatttcatttgttgagagtttgaaaatggccctcagtctgggggaccgagcagcccttctgaaagcagtcctaccaccacccatcgggcactttccccaccctcaaagaccaaacagtcttttaggggactttattatggaaacaagggcatgcgtggtgatggtttctttgaacccagaaaaggccaagtctcttcgcagtaagcctatttcagccatcccatcagtctcaataaagcatatatggaggctcctagagggcctgggacctggaagtcctctaaagacattctgtcacaaatcttagttttgcacagtacgtgtaaaatttgttaattgttgcgtgtaggctgatctccaagaattcataccctctgttccataaatgcctgtgtggctcatgctgttggttaccaccacaatagctataacactttttgcttgcaaagagagcccagatttacttcagatatagggcagagccacagggtttaaggaaggcaggcccaactccaggtgatgaatcatgactgatgaaaaaaccatgataagctccctcttattgactagtgggatggtctagactcccaatcggtttgggccaataagatataagagggaagtgtgagaggagggttcctgggaaagtttttctaccttgatgaaaaaaaaaggagagaggcccaggccccactttcttcctgagagggatg

SEQ ID NO: 1563499 - DNA, 4001 bp, Homo sapiens
gttgctgatgcatgtttagaatccttcataagggaggaatgtcatttcatagtataatttccactgaatgggtttcctctgagtgtgtatccctgagaagtttagaagactatcttcttggccttcattagtgagaccccatcctagctggcatggtggcagatccaacatcagaaacttctgagcatccatagttagaagggctgaatcgcagatgtgctctccgcatctggctcagggcctttgctaaattcattgcttcaagctatgctcccctcctttatggtggacttgaagggtaatctgacctggagcacagagctacttagctgaggctgaatgcctagaagtacaaatctcacaggaagaggagttctttccatgtgccttcatcccccagcaatggtttacagaaagcaagactacaggacagaggcctgccaacccagagacagaggggcttggtcttctttcagaaacaggacacaacactgccacttccaacactgccttttcacggaggtttccttagaaggccctgagattctctgggatcatctccccacgcaaaccttagaaggaaaatcacctgaggcttgtggttcccacaggccttttaaaaggtgatttacctgagggcctttcatctagaaacaaggattctttggaaaagtcaggaattaagatgaactagacatagagcttttttaaggcttttgttcttttgacaatcaaaaagaaaacatttttaaaaagtatgttcttttccagacagcatgcaccatgctttcaacggaagcaggcagcagctgctgctgacgttctcctctaccccactccaccccaccccagcccagccttgccacctgcttagacccaacacctgtgaggcctggctcgacctgcctaccaaaggaaggataaacattaactacccatatagtctcaggcccacttactaggctggggcacttggtccgatgctgggaaaggtggtgagagcagaaggtgatagggtgttggactccaagagaagcaagccctatttgaaaccactccaagctatgctttcaagagtggaaagatgcctcctgattacagggtgtagaaaggaaaccaggggagaagataagggggaaaaatgtcacaggaaaaacaacagagccaggaagtaaatacagagatgagatgagcccttcagctccaggctcttaggtcagagcctggtttacttcagcaaagaactcctgtgtcctgtctgctggccagaatactcatttgttcagggaacctgctccaaggtcccatgtttcctctctcctcccttgttagccaaggctttccacacacctttgcttccctcctgccaagaagtatacccttggacaaaaagcatgctattgagaacctaaaataaataaatgcccctcttttctcaaagaagcaaactgtgtacctccttcttattcatttttagaccttagttgctcaaatcggcttgagtttctattcttgggcatctttttttttttctttatgaatctaaatggtgactactttattgtgggcatttttaaatgcaagttttccactaaaggcacatgcaagcagaccgcaggcaggcacgcgtacacacacacacacacacacacacacacgcacacacacactcattttccctctctccccccacccctcgcccgccacacagtacctctggagcttcccctccctcagtcatttcccctcagccagctgaacaaggccaaggcttggaaataatttttctgtggcctaccttctgattccgtcaggtctgagaagcaggcggcagctgtaagctgggaggccggggctgggctgcctctgtgaatcagcaaagaagtccctgagacagggatgccgacagctgctgtatgcacactctccctctgtctctcccacttccctgtcttccttcttctcctcctcctcccctctcagagctgctctgtgttgctatgcaatcatatcaccaggactaacagcatcattccgacctcaggcaaaaatacccttgactgggcaaacgcaggaagagcaaggacagttttgtaaaactaccagagatgtggcggctcttggagatgtcaattcattagaagcagaggaggaaagcggaagagcctgagaagcagagggggagagaaggagacaaggagagggggaagagggagagagggggagagggggagaggggaagagggggagaggcttccactggggaggaggagacaaaagagccctggagatcaatcaggctgctgagcgagcagcctggaccccaacttacaccgatctagcccacagacaaaaccaactttggagccagcagctggcaggggcccctcggtagccagtccaggattctgcttctgtgttgagggttgaaacactgtggtctggaatcatcactggtactcaaggtacagttttgggctcaggacagtctgccagtcacccctaagtctcatcctcacaccctcttagatctcacgtgtagaaaaagcctcaacaaattggggaaacaaaatggatcttgaataattcaggaaaatacagctcctccatgactcacctcaatgactactaccccaggcaccttcctgcttttgtccataccagcccttactcttttaactgtcacgcttgttaaagagaagagggtatgagctccaaacaccctcagagacctgggagaagccactggcaggatagataagattatatccctttaccaagtgcccagcacacagtaggttacttaataaatatatgttgaatgagtaaattgaatgaataggtggatgaatagcagtcagaaagtccccatcctcaccctcctacacaaacatacaaagatttaaagccccagcagtcccaggccacagcaaaggataaaagcagctttcttctttcctccctccatctctgggaacagggtgtatatggagagagacaaagactggttgggagtgggttgcttaagttcactgatttgcctctaaaaattttataagctctgatggcactggaacttagaaaatacttcctagggtcgggcgtggtggctcacgcctatataatcccacactttgggaggccgaggcaggcggatcacaaggtcaggagttcgagacaagcctgaccaacatggtaaaacccccgtctctaccaaaaaaatacaaaaattagctgggcgtggtggtgtgcgcctgtaatcccatctactcaggaggctgaggcaggagaatcacttgaacctgggaggtggaggttgcagtgagccaagatcgcaccactgcacccaacctgggtaacagagcaagactctgtctcaaaaaaaagaaaaaaagaaagaaagaaagaaagaaaatacttcctaggactagtatttacataggatctaggactagtatttacataggatctaggactagtgtttacaaagtgtctaaaggacccagaattactgttttttttcagttccattttaaaattattatgtgatttttttatgaagtatttttattatttatttttaattgacaaataataattgtatatatttatgggctccagcgtgatgttttgatctatgtatactatgcagaaaaattcagcccagccaattaacatattcatcatcccaccaacttatcattttttttgtagcaagaacattagaaatctattattttagcaattttgatacatataatacatcattaataactgtggtcatcatgatgatcattactattattgaaaaccttcagctagaaaatagtgtgtatatatatcttttcttttgaggtgaaattttaaaaacttaagttgctagcttcagcaaaaggctagaaatatggcctgatctcctcttcaaaataagcgacataggaaccaattgcccctgtcatcaagctttcagagctgtgtaagtagcccttcctatctggtcc

SEQ ID NO: 1563500 - DNA, 4001 bp, Homo sapiens
cttttttgagacggagtctcgctctgtcacccaaggctggagtgcaatggcgtgctcttggctcactgcaacctccaccttccgggttcaagtgcttctcttgcctcagcctcccgagtagctgggactacaggtgccagccaccatgcccgaatctaggcccattctaaggtaaggtccaaaaggaccttaagccatttgtttttagattttttggaagaacattttgtaaataacaaaggactgtgcacagatgggggaaatgccattatgaggatgagtgtgctgacctcaaaccagggtcaaagagtatcattgccttttactccaagcatgaaaccattcatgtgccaggtactatgctaaggaacccagtcctcacaacaactctatgggagacagttgctttgacaggtgaggaaagtgaagctctgagaggaccaaggtcacaatgaaaggagatgttagaggtgacagggctgggtcatggccagcagctccagcctcttaagccaaggctcatgagaggaacccctgaggcctggtgtcaggcctgttctctctcagtatatgccctgggaaaaggactatgtcccttttcacaaaggccggtgggagatcaccaaagacaccttgagaacttgccatcaagtacagcagtcaaaaaaatacaatatttttaaactttatggagtggaatggtcttttaaaaaactagtttttttttttttaactaatgtataaatccgatctagaaaaccagagatgggccactgtgattgaaggtgggcaagggtagcctgagactcctccagagctcctggagcacagcttgaatgaaagccacttatccactaggttggcacttactgggagaagtgcaagggatgccaagatgtctaaggctttgactttgggttggaaagaaccgggtgagattctaggggattcactcctgggttagtcagcctctggcagggctcaggattccaggtctgccacatgtattgggtgctgctggcaggtctatgtgagctgagcattacttgccccaccctggttccagccaggccccaatagcttgacctcacaatataaaaaatattttcactatcttatgtttcatgaatttaattctattaaggtaaggcttactacgttcaaaactccaaccccctcccttttttcttgccctttaacaaggcaccatccggttttctttactaacaaaatgtcagtgttcaagttcagtcttggtgcaagatcgatggcagatgtcaggggctggccgggatggcttacattgatatcatcatacgtaggtccttctcatagatgtcagggatgttacctaccggcgagttgatcatgcgcacggtgttgttattaaacagcttgaattcgtaattgatgagctgttcccaaaagccgttgttgggccggatgatggggcggcgcgacttggtccatgtatgggcgtccagcagcgacatggagtggtatttcatgaggtacgcaaggcacagtgaggcggaacggctcactccagccatgcagtgcagcagcgtacggccctgcctcatatcgatggtgtggataagatcagcaatggggtcaaaaaagtcgtagagacgcgagtcacgagcatcggtaacaggcacctttatgtactgaatgccctcgaagaatacgttgaccacttccaccgaggcattgacaatggcggtgatgcgattgctggacagaaggagtttgtcgttggcggccacaccattgctgagaaacaagcttctggttatttgggagaagctgtagatggagggctgctggacaccctgagatgatgaaaaggaggacgcggatgctgtcatcaaggcggctggtccgaggtctctctacgctggttcgggacacaacacttaccaagctagttcaggatagcagccgcgccgccaagtctcaggctaggtgttggagaaagaggaccagctatcggccaccaccctctttctgtctcctctcaccactcccatctgggcgtcacaatcccggacagatagccctgcggctccggtttccatggcaatggccgcttgccgcaaggaggacagggcctctaagcagggtcttcagagacaccccagtctcttttctttttatctttcttcatagtcatttattttccaaggcctaattcttatctttcttgacttttaaaaatgttctgttacaagatatctattttatgtttcaattattggaccacgttaaacaagatctatgaatacttctatttcatcagtgttgcagaacagggcttacactttccctgcaaaatagcaatatcacattctaagttggggaacagcatttggctcatgtgatatgctaatctctataaaactggagcgagatatgggatttggctgggcttggtggactggcctgatacttctttgttgattgtaaccataaaattattttcctgcttacaaacacatcagggctggttgtaagagagcattgctaactgatatatagccctttatcttgaagttggcctgtggtggacagttgtgactaatttagctgtgtcatagtccatttgtacatacagctcaaatgacttaccgcatgagtctattttattacctgaaacaacagttcaaattattttgtttactttcttcaaaaaaaaatgcctacatgctttgtgaactacaaatcactttgaccactaccgatgctgtcttcccagtaatattaaacattctgaaacaagttaatgctacatggtaattgggccaaaaattgagacagttttgctctgtcacccaggctggagagtcccaggcctctgcttcctgggttcaagtgattcttgtgccttagcctaccgagtagctgggattacaggaacgcaccaccacacctggcgaattcttgtatttttagtagagacaggatttcaccatgttggccaggctggtctcaaactcctgacctcaggtgatccaccggcctcggcctcccaaagtgctgggattacatgcacgagccacagcactcagcccaaaaattaatttctaaaatgtaacctgacatttgcatttccttccagctaagatttttatagaatttggctgaaaattgaaaagaactatagcctaaaactaacaaattgtttcacagagtagccaattgactcacatactttgctctcattccatcatcattttggtatgtgttcaaaggtgtgctgtgattacgaacaaagatgaaatagataccaggctgcttatgatggtcaaggaaatgataacctcaaaacacaacacacgtttcttttctcagttgtcataatcaaattattttgcattacttaaattgtcagtccccacaaagctatctggaagaaaatagaacacgaatactaaataaatatgaaaactgtttgttgggggcagctcagctgggctaacggagaagctttgtaatctatgtagtaatgtggaggccctaaactagtattggagtctacttatttcataagtatacacttcttaaactttaaaactaagtacaattaacaaaataatttcagacactattttcttttcttttttttatttttattttttttgagacggagttttgctcttgttgcccaggctggagtgcagtggcgcgatcttggttcaccacaacctccgcctcccaggttcaagccattctcctgcctcagtctcatgagtagctgggattacaggctcgcgccaccatgcccagctaattttttgtatttttagtagagacgaggtttcaccatgttggccaggctggtctcaaactctcgacctcaggtgacccacccacctcggcctcccaaagtgcagggataacaggcatgagccaccgcgcccggcctcagacactattttcaaagacaagcatgacccgtgttaaatagattcatttatttattcttcatattctgtgac

SEQ ID NO: 1563501 - DNA, 4001 bp, Homo sapiens
ggcagccgctcccgggtgcgctgtgctgggggaggccgcgccgcgcgcccgggcctcgtctggccccctccggcgggctgagccaggccgcgcgctcgctgcccgccgcagggtgggcgctgcgcctgccgcccccgcccccgcccccgcacccgcccccgccgggcgccccgggcctccgccgggccgggccagcgccccctggaggccgcggggacgccgccgcctgcaggcctcgcgcgcgccgcgtgcgccctctggtcccgggagcctcccgagagcggcgccgcgccgccttcccccacgagatgcaccgttcccgccgggccgagtgacaggatttcggctgtcgcggccgggtcacatggccaagagcacaagtcccggcgacagcgtgcctgccaaatccagtgtcttttccaccaaatccactttctgctggggatggctttctgcttttcctggtcggtctcctcgcgggactgggagttcctccaaggcaggaacgggtgtgtgcccggccccaggctggccccagcccccagtgcagggcctggcacgcgcccggcgctcgcggaagaaatgctcgttaacaaagaaggcatgaatgaatgaaaccaattgttgcctgagggagctgctcctgcttttccttctgccgatcacacactcctcccccaccccgacacgcacaagcacacgtgcacacacagccctccccgtaacacacacgcaggcaggcacccagacagcgcgcgcggacgccagcccccatggaacccacctactacgtgcttgccgggcagctggcgcccctttggtcccacctgggccgcctccatttcagcgccgggctctctccgccgcctccccgcccctccccggggccccttgcttccacatctaagtaccctaccttggaccccaaagtgccttctttatttcttagggaagaggccaagctagtcgctggggagtctcaaggtctgtttagggaggcacctggggggcccaaggctgctgagcctctgccgaaggggagccagaggtgcctggcagggatgccaccaaatgctgcagcctctagagcccgcgtgccaggtgttgggggtgagggagggagggactcagagatgtgctggggggtgtcgaaggctatttgtgatgggggcggggcaggatgctggagagcgtgaatccagcaggtgtgcgcgcgtgctggggtggatgagagtgcgcgttggagatgctggaggtgtgtgcctgggacgtggggagcgtcagccactgggatgtgggtttctgacgggacctcgctccaggatgggtggactgcagtgtctctgggctggcaacgtgggtggggtgtctgtaatgggcagatggggagttcgaggtggtgggggcatggtagggggagctatgttggtgcaggtatggcagagacgtgttggaagcgtgcgtgtgcgcctgggtgtgtactggggcgtggcagggtctcggtgggttggcatgagttggggacagtggtgagtggtggggcaggggcagctagtgtgtgcactacaggcacccgggtctgtggtgcgtggtttgtatgcgcgcgagtgtgcagccggtgcaagtggcaggagacacgggaggtgcacgggcggcgtgcgggggtgtgcggagcagcaccgaatgggtgtcgtaggggcgcgtgcgccggcttcgtggggtgtgcgttgtcaggactttgggggtgcagggtggaggagcgcacgtcggggcgggggcagccaggccgggtggggggtgggggtccccggggcgccgcttgctccactcacctccgctctgctcggttctccgcgccggttccctgcgtcgcggccgggaagtttccgaagctcgggcggcgggaagcgccactgctgcagcctaacgccaccggaaccccgggtggcggcctctcctggagccgaggggcagccgccgccgccgctgcggagggaaactccaaatcccgcctccgccgccgctgcctcctccgcctctgccgccgcctcctcccctccagtcgccgtcttctccgccccctgcccaggaggggcactgtagctggcggctcgcggggagggagcggggaggggccgcggcctgcccggcgtctccctccacctcccacgccccccccaccccccgccgccttcctcccacctgcaagcctctgttctctaggccagtcctgcccgacgcgccctgcgctccccggtccccagtggcgccaatgagtgggggctccggcgcttggggcgcgggagtggggttgggggccctgaactaggctgggcctgggctaggtggacggttacgcgcagaatctgcactggcaccccagcgaaggggcccattgaggactgggcgcaacttggtgccccagagccacctcctgctcccacagtgaagagggtataaagtctggctgacagcgctgccaattccatcccccaccccaggtccccctgcagtgtctcctctcattctcatgtgtcagattctggctaatagtaatagcatttgagcctcagtgcctggaaggggtggagccaggacgtttgggtgggggaggggctggaagcgagtagggagcggctgttgtcactaggtcccgttagctttctcctttgtgccaaaggtcacacgcattgccatcaaggacctcattttatccttacagcagttccggaagtctgaggggattgtccccatgctacagccagggaaactgagtccgtggctccctggtggtggcacaatagtgtagtggcagagtaggatgtggcttgggctggctgagttcagaagcctagagcctgagcgagtgtgagtgcggaagattgcgtggggaggggaggcagaggacagcccgtggagatgtgcacctggcctttctggggctcccagaccagcagtgtatgagcccggcctcgtgcctgcagtgggggattgcctgagacccggcaggaggctgtgagcatcaagggccgtcttctccgcccagggagcgcaggataaggtgcggccaggcagggctgggatgccagcagctccgctggccgcttggctgtgtctgccgcagcgctgaattcccctgagtcattacccctggaagaggcgagggcagcagctttgcctctggagcccaggtccctgtcccatctgggtctccatttcctggtatgtacgtttggggagagaggtgggaccatgtgatctccaaggaccctcctagctgtgctgcagtttcaagccatggtgcgtgagctgggagggtcctgctgtcgccagccaggcctgcccaccctgctctgggccccgactgctcctctgcaccttttcagccttggcggcagcacagcccctcctgggagcaggcctctggccctgcaactgtcttcctgctctggacgctgggcctcatgggactgcactggggctctcccctacagccttggggagtcaggctgcccaggacttgagcttgcacctacccaaggctatgccacgcaggcgagcacatgcagctgccactggtgcccgtactgctagacgtgctgaagttacggaacctttcctaagaaatcaatattccatagaagctgtgccctacaaacaggggactgcctttcacactccccctccactgagggcacctcctgtttgggaaggacgtacgacagctgtgcccatggcctgggtgcccagctgacccccggcaaaggcttggtgggtgagctgactcggaggagcttctagcaaggtttgttaacatcctcccctccgccaccatcctgtgctttagtgactcagggctgagaggctggcggagaaacatttggattgaagaatgccaccctcgcccctgcacagctcccactcccagccctcctggtgtctctgctctccaggcaacaagacccatccgttgccggaagaggagcatgcaaaggccaggc

SEQ ID NO: 1563502 - DNA, 4001 bp, Homo sapiens
taaaagttgacgtgtgtacatatatatgcgtacatatactttatagcattaacatttaaaataatgtttgctttctggaataaaagttattttatccaaaagacagggcatcaattttaaaccagttttctagactaagaaaatccttaagcatctctttcagaataagcctcaagatgctgatagcacacaacaaaatatagaaggacccctataaagagttagtggataaatatttaaaatcttgttcttggccgggtgtggtggttcacgcctgcaatcccagcactttgggaggccaaggcgggtggatcaccggaggtcaggaattcgaaaccagcctgaccaataaggtgaaaccccgtctctactaaaaatacaaaaattggatgggtgtggtggcgggcgcctgtagacccagctactcgggaggctgagacaggagaattgcttgaacccaggaggtggaggttgcagtgagctgagatcacaccactgttctccagcatgggtgacagagcgagactccatctcaaaaaacaataaaataaaataaaacaaaacaaaatattcttcttttaacagtaaggtttctaagtttgtgctgaaactcaaaatatagcttttaaaaatctccaccagtgcagcaagcttcaagagaaacaaaatgtatgactcacctctttgacaatattgtgggcttcctcagcattgaagccaacctaaagggaaaacaaaaggtaaagctgctttcaacacaggcttacaagtatgacgctacacagaatatcctaggctggcctagacaggtgttaaagtgttaaagggcatcaggtctacagaaggggccaatcttgcccctaaacacttaaaaatactgaatgctttccctacctacctcccgtgaggtctggggcagagcctgcaagtctacatttttttttaaaaaagtgctttatactggtgattctaatgaacatcctagattaagaatcattgtattgtaaaacgtaggaaataagcaagaggtgactatgaggatgttatgtgtcataagaatatagaaatggtttcagctaagtgagagaatgaagtggtccatatgaagagaatgcttagtagactattttcaattttgtttttaacttatgctaggcaaaaatttctaggcaaaaattcctttcccaaattaaagattatgaaaatacttgataactcaagattaatatcactttagtactataaagtggtctgacaacttagtcttttctttggagtccccatcaataacagggagataacaactgacatcatgggtttctggtgagggttgggaaagcctgagtcagtaagcaagggctcgtaatccataaagcacctccttgcctaatcctggcaagcattaccgggagcgggaatggcagtgccaccaggaccccgagactccgagccatgggggctgcagcacccgcgctgaggaagccaagggacggaggcagcagcgggaagacccgttttcgaggcccgcccggtaggagggcggcgcccgtcaccccatgcccactcctcgcacccaagtcaggcctcgtcctcccaaccctgccccgaccccaccgtctgatccgcgcgctcctggccacccctcccaccccgaatctcaggactttggggtggggagaacgggtcgggcggggcggatcccgggcccaggggagaggacccgggctcggaggacgccgcaccccaactcttgggaccgccctcgctgggagaccacccggcaagagccccgcgcagaggaaggcgggagtggggggcgctcccaggtagccaaggggcggtacctcgtcgcagtggcgatggtactcctccatggtagcgccggctctccctggggcggagcgacacgccggtagagcaccgcggccgcgcactggcctccggggaggccccacccccgtttatggcctagggcctttccctacgcaatccccgcctttgtgtcgcagtggcgtcacctggcagcgctgggcgggcttcgggcaacgccaggcgtcacttcaggccacgcactttttcctcgcttcctctgccctttctggaaacaagggatgaatgtaaagaactgggaatggcgccagtgtggatcagatggggtgacctagtggcagttagtctagactccgcactagtggttgagtgcccactgctgtgattacttgcacgtatttgttcattcaccatcatgtggcacataaatgtagttaatttcgtggtaaaccagccactttgatttgtccacttactagctatgttacttggaaaaattcacctcccacagcttcagttttctcatatggaaacttaccatcatacctatttcactactggttgtaaggatctgatgagaagctgtatacacggctcctaaagtagatgcttctcaacaagagaacaatgactacattttaaaataaatgtagtaattttaaattagtaattttaaaataaatgtagtaattttaaattagtaattttaaaataaattactaatttccagatgatcctagacacttcctcaaaacctcacaataagtcagaggagttagttcttccatcactgcttttatcaagatgaaactgaggtatagagaatttaatttgcccaaggtcatacagccagtagggtgtagaaaagggacttgagctcaagtagtctgatagcagagcccaagctcttaaccactgtattactttcctattgctactgtaacaaattaccgtaaatgtagtgccttaaagaaacacagtcctgttctcttacagttctgttaccagtgtagggtgtccaggttcttggctctttgaacaaagaattggacaaaacgcacaaacaaagcaaggaaagaatgaagcaacaaaagcagagatttattgaaaacgaaagtacactctacagggtgggagcgggcagagaagccgctcaagggccgggatccagaatcttctctggtccaaataccccctagagatttcccattggccacttggtgtgcaccccatgtaaatgaagtagtggcccacaatcagaggctgaagttacaaaggccacactcctatgcaaacgtctgattggttgcaagaaagcaaccatcagaggctaaagtgaagttacaaagttgcacttctattcaaacaaagatttggcccataatcagtttgattggttgcagacagcaaccaatcagaggctgaagtgaagttacaaagttccactcctgtgcaaatgtctgattggttgctttttgctctttggttgcaaaaagcaaccaatcagaggtactttaaatttcccatctgccctgcagaaaaggtggggatttgcaaagggaatagcctctggtccttttgttacttaggcatggaaggtatggaaggttagggttttccttttttttttttttttgagacggagtttcactcttgctgcccaggccggagtgcaatggcgcgatctcggctcacccacggcaacctccgcctctcgggttcaagcgattctcctgcctcagccttctgagtagctgagattacaggcatgcaccaccacgcccagctaattttgtatttttagtagagacggggtttctccatgttggtcaggttggtttcgaactcccgacttcatcgacctcaagtgatctgcctgcctcagcctcccaaagtgctgggattacaggcgtgagccactgtgcctggccagggttttcctttcaatttagttctatgaagtaagcgtgaaacagttttaagttccctgcctcctgaccctattctcctgcctcagttctggaggtcagaagtctaaaatgggcccatagagctgcatgccttctggaggctccaagacagactctgtttctttgccttttccagcttctagagattgcctgcattccttggctcatgaccccttcctccaaattcaaagccagtagtat

SEQ ID NO: 1563503 - DNA, 4001 bp, Homo sapiens
gtcatgtctttgtgggctgatggctgcgtgtgtataggcaggaagttaaaaaaaaaaaaaaaaaaggaacagaaaaacctggacaaatagaaagtacagaatgagataataaaatcaaattcaaatagtttattatcatgagaaatgtaaatggaccgaatttaccagttaacagacaggattgtaacacttctaattacattccgtttttttttttttttttcagacggagtcttgctctgtcacccaggctggagtggagtggtgcgacctcggctcactgcaacctctgccttccgggttcaaacgattctcctgcctcagcctcccgagtagctgggactacaggtgcctgccaccacgcccagctaattttttgtatttttagtagagacggggtttcaccgtgttagccaggatggtcttgatctcctgacctcacgatccgcccgcctcagcctcccaaagtgctgggattacaggcgtgagccactgcgcccggcctacattctgttttaagaccatgactaaaggccaggcaccgtggcaggtaattccagtgctttgggaggctgatgcaggagcagcacctgaggccaggaattcaagtccggcctgggcaacacagcgaaactgtctctaaaaaaataagaaaatcagtcaggtgtggtgacaaaggcctgtagtcccagctagtaggtaggctgaggcaggaggatcgctttgagcccaggacttcaaggctgaagtgagcagtgaccacatcactgccctccagtctgagactctgcctctaaaaaagaaggccgggcgcggtggctcacgcctgtaatcccagcactttgggaggccaagacgagtggaccacttgagctcaggagttcaagaccagcccggccaacatggcaaaaccccgtctctactaaaaatacaaaaattagccaggtgtggtggcgtgcgcctgtagttacagctactcaggaggctgaggcaggagaatcgcttgaacctgggaggcagaggctgcagtgagccggggtcatgccactgcactccagcctgggcaacagagcgagactctgtctcaaaataaaataaaaaagaaaagaaaaagaacatgactgaaacacaaggccacagaaaggctgaaagcttgttccagccctttagaagccatattatgatgtggtagaaacagtcccggtctcagccctcgggggtcaaagtctggtgggaggcacatgggaacaacacctgatcccagccctccctggtcacagtctggcgagggagatacaggaccaggcctggtgtcttccttcaagggtcacaaactgctcacgaccaccaaacccagtcctgtgctccggggtcacggtttggtaagagacacaggaaccaggcgtggtccagttgcacaggtcagcgtcttaaaccgttcaacaaaaagctattccctcccccacgtagtcctgaaaactgcaactgggggacagaggaaagaaaacgaatcagaactacaaccctcggtgccagcgtttggaaagccagagcctccccgcgagagcgtgcaacgccgtcaacctgcagggaagagacggatattgaaaggccggtgtctggcgtgcagcgctagaacggaacacaaagccggtcaatccgaaccagaaccctccagtcccgctgcccaatgagaagacggatcttctgtcctctggacaaccgtgcggtagctgggggtctcgcgcaggcgcaaaagggcggtggggggggcgggtggcaaagggtctcgcgctggcacgccgagggctggccgcgtagccggggagagctgggggagggagcaggggccgggtggagggcactcaccaaggcgcgcgacggcagcggcctcccacgctggctccgggctctctttaggctgggtctcgcgctctgtcacatccctagttcgggctcatcccctagtgggttctcttgccttacggagcgagccaatggtgaagcgaagaaggcggcccgtgccgctcccaaccaatagacactctctttgtacctctagccccgcccccgcgcgtggcgccattttcacctgagttaggtttggggtggagactgggacgcgccaaggttagtgggcgttttggatccgtagccaatctgcatcgagtcctggcttcaatttccccattcccttatcagtcgatcaaaacggggactcattaaggtctgtacccgcttcttccgctggtgaaattagcgttgcgttgcatcctttcacctccgcccttttctaggtagagtaacccttagtataatgcaacgaaactgttacaagcagatcacacgctatacactgcaaccaccccctccccagctcttcagtgctcagaactcctcagtcctaatagcagcggtcattctctcttctcccgacctcaagtcagaagaactagttagaacccaggcctctcagtcctactgaccaattggcatgaagaccctcaatctccatatgccagttctaaaaagccaatcaaacgcctaaccaccagtgggcccccagatggagcaatcaatcagaatccagacccatcccagacctcccatccaattagaacccacaaccctcagtcctaaggataaataggcaccaacccttcatctctcttgctttctctcctctgtgtcccactcagagcaaccaatcagaatggggatccttcagttttccagccaatcaggcctcccccacatccaactatgcaatctgtccctgccctgatcaaaccaagcaggaccaggatcctgccatcttcaggctcatcatctaatcaatcataaactaaccatgaaccaatcacagtctgctctctcttcatggtttccagcttccaaacctttatccatgctgtgctcccttcctcactcattcctattcccctctgagcagtgaagaagaagcctattgaatatttcctacttttatttgacaataacaaattgtatataaaaaggaagaaggaaggcggggaggccctggatctccccttctctgtttccccaagcatccccctctaggccccagcaggcaccacccccttcctgccttgtggtggggtggggattgacaggcatgaaaatggtgtgattttgtgtgtgtgtgtgtgtgtgtgtgttgaggtgttgggggtcaaggatggagggggtcaaggagtagagagagggccttccctcatcccccatcagtggcaccctgagaggggtcttaagagggttatgagggtccacagatgtgcctcagcctatgagacggtagaagatccagcatccaaaagtgacccagtgactggcccagctgagctctgaccacttgtggacagtgtatgccatgccgtagccctgtgggagagaaagaggtgatggtcccacttagcaaggacaaagaagttcttaggaaaacccatcctttgcccaaggacatttctgtgactgctctaggcgaggccccgcagaagggcctaggtacatatgaaaggtgaccagatatagtttttgtcttcttctttaaaaatcattttaaaaacaaagtgatcccattctctgacctgttatctccctaatatataaagagctcctaaaaattaattttttggaaagaaaaattgccagagaaggtgaataggtcattccagtaaaggaaaaacaaatggctcttaaacatatgaaaagatgctcagcctcattaataatcttcctcattttatttattttctttttgagacaggctctcattctgtcacccaggcttgagtgcagtggcacgatctgagctcactgcaacctctacctcccaggttcaagagattctcctgcctcagcctcctgagtagctgggattacagatgctgcaccaccatgcccagctaatttttgtacttttagtagagatggggtttcaccatgttggtcaggctggtctcgaactcctgacctcaagt

SEQ ID NO: 1563504 - DNA, 4001 bp, Homo sapiens
agctacaatgtttaaagtttcaagtatgagaagcatgtctgctgattctcttctttgataagctgttatataaattggagtgtgctagtaagacattttaaggctcagggcaactttacaatgcacatctttttttttttttttaagtatcagtcctaacattacactattatcatgaatatgatgtctctatcaagcgtaccactttagatgggaggtcaaagtggcacaaataatgtttacagagttgtgacaatgactctggatgtggcagtaaatatagaaggcttgggtccctcacctcaaggaacttatttgtacaacttgctctcttccctaagaggtacaattttattattattctttagccacctcgaaaggatccttggatgcttctcctaagtttcacatatggcaaccaagacagtatttacgttaagtgaacgaaatttacttgaataaaaagctagaaagaatagaatagaaaacaaacaccaaagctaatagtttgcttattagggcacaaacaccataaagattgcaaaaacaaacaaaactgctcttgggggacgagtcctgagtaattattccattggcagattcccgttctcaagctaacagtagtaaaagcgcttcccacccacccttcccaccgcacacctaccccgcttaagaatcagaaccggcatgcaaagggtgagttttatttccatagatttttaaaattgctgttcagaagttgtctagcaagacggcatatttctaccagaattcctcaggggcgctgatcctcactagaacgccgaggacaatcagtctcaaattgcaggtaagtgtgaacaagcccacgttctggtcagcgcacaaggacccgcgctgaaaatgcggttaaaagttgtttcaacgggcgggcgtggaacagttattacagctgtttacagctccaactccaaaggggagcctgctggttctggcatcagctctagacacgaaaaaacaagcaccgcgggcagagaacctcatcacgagcagaagggccaagccgttagtcggccggggggcagcgcaggcacctcctcgacgggagcgtcgccaacttttctcgaggcagcccgcagccaggggccgcgggcgcgcgcgagactttccaagtcaaggggtccccagggagtctggattagctgggccagggaccgaagacaacctgccctgggcaacttctcccttgctcgcctggtccctccctggtcctgccctctaaattggctcgaggttgctgagtgctcccaggcccctgtggcggagggccctcgccctacccgcgaggggagggggccgccgccgcccctactaggtgactcacctggtgcccgtcctgggagtcagagtggagtgcggcttctcccggttccaatggctgctgcttaggtgacggctgcccaaggtgactggtgatggggctgtcagggtcgaggccaccgaggctgcttagggtgccagaggtgccaggggtgcccgagccgccaaggcgggactcggctccacgttcccgccgcaactccgagcgcaactctaggtagcagcacaacgtcagcaggtggagggccagcgagaggccaaagaaacccaggaagagcaggcagctgttcccttcgcccgcccgggcaggggccccgccacacccgcagccctggctccctcgctcccgcggcgctgctgcaggcaggagttccctgcgctccacctccgggtagcccatggcctccggagacacccactctcttgaggcccgggagccgctgcgtctgcctcagccgttcacgacctctgacaggcggctactgtcctgccatcggctgggggctgcagggacccgttcctgcgcgacagtggctgggcgggacggagcagggagcagccgcatgtgcagctctactccgaggggtgggaaagggaggaggaggggcgggagagaggggaggctcggcccgccgagggaatgaaggaggaggtcccggccgaccccgccccatccctcaagcggctgccgggacgcccaaccacggggccgccaagccttggcgccccgccccgtgccgttccagccgggcctccagccgcggggcggggcctgggggcgtgagggttcgcctctgcctggccgccccacccagctcttcccgcttgccccgtaccagttggtgactggcgctgtcgttcatccctgggctccgccccagtttaaccctatagcgccagtacggggaggaaaggagggggaggctaagaatttgggaaccttggaaagaaagtagagcaaagaaaaggaggcagaaactagcattaatagaaatgtttgcaattaactgcagttgttaataacatcatccagtacttatctgttgcttccaatcttcaaagcgtttaacagacgttaaactaattaaaacagctctgggtttggaatgaaaccatgcctgctgtgtttgcaattcaatggctcgcccgaagaaaaggagacccaggagcctgggaactatgggaatgggtgggactcaagcagcctcactcctggagtgactctgaaggctcaatctaagtaacagagaagccgccccatgccaagcggaactgaaatgatgttgtcccttgaagggtaaaacagtctcctaggatttcttgatatattaattaattcaacaaatatctatcgatccctgtacaatgcaaaaaatgctgtatgagagcatccacagccagaatagatttcttccactgcagcagttttgattggagaacgtatgtcttcagtgagtagacagggaaaccgagggccagaatgaagtggatttgtacaagtgtggtccacagaatggccagacactactggcatctttatttacaggcaactgttctggcctctccacccctcccatccttctcctggagtactccctgggggaagttcaacaagtcagccaaatgttccagatgtacactgctgcaactgcagcatcttcaacagctgcaccaatcagaaacgggttcagataaaaaaaaaaaagtggcaaaaggcagaacaatagaccctgaaatgaaggatggaaaggattaaatcaagagtcacaattgacaagagttactagtctgagattatagaaagcgaaatgaccatagcaggggaaccatgtatgcttcatagtcactacgcactctcattccgtgttattgagtaatgaataattaacaattttattgacttgcagcaggcatcttgagtgtcatcatggaggctcagcaatgccgggggcacttatgtgtaggcctaagacctaggctggtggaagagaagaaaaacatagatagaaatagaaaagaagacaaaataagagaaataaaacacaaaaccaaaagcatctgctggcaggtcagtccagagagcacagaggtcataagccttaaatatattagccacagacaacttttctctgtacactttgtgaatggtctcagtgcttcaaaaacatctttgtgtcgtctctttaacccctacccatgaaatataaagttcacaaagaatatcatcatcctagagctaaggggaaaaaaggtgtttaacagctgctctcaagtcctgcttgtccagtccaggaattctagatgctaggaaaactgccaggctgatttactttaattatcacagcccgggattattggaaagaatgctagaccaggagtcaggagacttcatcctgccactaggttgctgggtccctctgagcaagtcactgtgctttttcagggccttagtttctccggcagtaaaatgaggagtttgaactttaacagcctttacactgtgttttgtctgtgttgtcactggccatgttgactttcttgcatacacagtttaaacaggctgccctttcttcctctaaaatgaaaaggaaacaaatgacagccatctcctggtggtgatggtgatgctcaggggccacact

SEQ ID NO: 1563505 - DNA, 4001 bp, Homo sapiens
agccacgacctcagttccagggccttgttccctctctgcccctagtttatccccctcttgtgttttcctattccaatccagctgactaaccttttaccagattactcttcctaaagcagaggatctgacgttttttttaagctcaaaaactttcaatggctttccattgtctgctaaatcaaatcaaaactctagcatccactgtcttttgcagtttaccaccaatctgccttggcaagtttaacttccaattttccgctaatcgtactctaaaatccagctcagctggtgttcttttcatatgccctgagcttccctgccttaaagcagttgttcctattttctctgcttaaactgtcttctctatctccacctgttgaaatcttatctgtgtgccacagtctatcttaaataataatagttaatatttattgagtgtttattttgggccagccactgtgctaagtgtgtgcaagtattttatatggattatctcatctaatcctcacaacagccccatgaggtgggtgctattattatccactttagcctgaagttaacagaaactcagaaagggagaagtaattttatttgtccatggtaacacaagttaaatggtgagcatg[450 bp omitted]ctctggcgggtcccttcttgtcccccagttcttgcagcttgctgggtcttggccagtgtttggagtgaggcaggatcaaaataacactgcccggggctcagcttccaggaatgagagatcaagtgaaaccaagctcggcgggtgagggggtggattgaaagcccccaaacagagccagcatgctctttacacaagccctgacttgccctcaagccacgcgggttagcagttctgctttcctcaggatgctccacaagtctgatccactgtccccgccttcactaacacccagcctccttctcttctttatctcccaaccctagatgctcaaggttgttggacacgtccaggcatgttctcagaggcaatgcaggtccagtaagagcctacaggaaatggctcgccaagatcctagagatgtcagcccagatccctgatacctcagaaagcgctctccggacacaaatggatggactgacagccagccacagggcgccttcccaattgttctgattttgcggtaccctagcaggatcatcctgacctgattctgtacttctgcacctagatgccgcaggtcccagccgccttgccacaccagggggtgttcccacactcacccggtaacggacgagtagatggctcttgctcccaaatgggactccggtacaaatccacctcagcgcagagcacacatctcacccagccccctcccgtcaccccccgcccttcaccccgcgcccctcagcccccgcccctcagacccgcccatcagccccgcccctcagcccccgcccctcagcccccagcctgcatacacactcacagtatatgaaattccttgtaatcaaagttccgcttgactcatttcacatccacgtgtagcaacaacagcccaaaccctcctttcacggtaagcttacctcttccgcccccgtgaagttcctagagcagctattggactgtttgagtgcctaggcgtggctacgaaaagaaactgcctttgagaggaacaatgtgaggctgaagaacagtgacccagccactggtatggcaggagctgcaaatctcctgggactgaagcgggggccagagagtagagggccagggagtggggtccagagaaagcatcaagttgtctctttcacagctgaatgcagctcagctcatcaaagtttattcatgacttagcaggcttggagtttgacagggaaaattattgttggaaaagccaaaattttcagacacatggagaagccgctttccagctctgcatctgcctcaaaaaaatactcctccattcagaagggtagataggattgtgacaggaggaagagagcagacatgaagcagggaaaagaccactaaaaataaaggaaaattggattcggcactcagctttgatcatccatcttctctgggcccctgagtgtctgtacaaggagggggttgagctacgtagtctctaagggcacttcaaacaatgacactttgggagtttattaatccatgatctcagaggcagcggtggataaatcccgaaacgttactagtccctgaccttgaagagtttgcagagctgggaagataaagtagaccggacagagacagagaattaagggccaaactatgaggtgcagactggaagggtttgggggccagtaggaagaaggagtaaaaaagagtctgacaaggaaagcaaatgcttttcaatagattaggagcttttaaaagaggtcaaagaggaaatagcctaatgggtagaggaaaagaaaagcttgagccaaggtatgggggagaggaccaagaaatgagccattatcagtctctgagggacccctcctgtactgggcagaggctatatgccagctcagggtggagtctcagtaaagcagctgaaaagcctttggtgggaaagggctgaataggccctaagctgaagtagaaaaagtcctaaatgaacttcatatctgtcccctagctagagttaagaccagaataggctactgtgggctcaggcctagtagaagggaaaactgccagaattggaatcctaggtctgccccttactagctttgtgacctaaggcaagttacttaaccactctgtggctcaggattctcttctgtaaagtggggaaaataacaatcccttactcataggattgttttaggtattatatgagttaatatacaaaatagtgttcatatgcgtaaggagcttagaatgatttctgggacgtagtggtatagaagtgtttattaaatataaataaatacatgaatgcaatttagggacctctgaaatcatctgtgagattcaaatgaaaatagctaccctgggtacctcctaattctgttctgtcctttcctagaaaacaggacctcttctttttctccatcctttcctacccagagaagctgaattacagacagttttgaaactttagtgtaaagaaccctagcttggaatttagatgtcttgacaaaactaagtgtaacatcatgtaaatctcttcctctctcttagttttcctttctgcatctgtatcctgaagagactgttggactggatgaccttgaaacgctagagccgtgcttctctcatattaatgtgcacacaaatcacctaaggatcttgttaaaacacagattctgagttagcagctgtggtgtgggactaagactctgattttctaactgcttccaggtgatattgatggtgctgggccacagaccatagttttagtagcaaaggtttagaaggtggacaagaataacatttactgagcacctataaatcatgcatatgtgtccctttataccttacaaccattctatgaggttgaggttaccatcctcattttgtagatgaagaggctccttgtactctgtgattctgcctggaagtacaggaggaaacttg

SEQ ID NO: 1563506 - DNA, 4001 bp, Homo sapiens
ccagatacttatttcccagtctctattccagctaaagatagctacatcacccagttctggaccataagatataaggaaaaatctgttggacagcttctgggaaaagacttcttccctacaaaaggcaagctattttgaccttgcccctgattcctgactttgactattgtatggagatatgatgctttgagttttgcaatcatgaggccacaatgagaacaaaacagcaagatgtccaatatgaaggatgaaaagaggctgagtccttgataacattgctgatctgcccaacaagcaaaaaggttgcctgtctccagacttcattacataaataaatatacttatggttcatgtcatggttaaattttatgttactttcaacttactacatcctaattgattctgaggtgaaataatttgcccagagcaaagatgggactcatgcccatgtgtatctggctctaaagcttatatgtattacacatatataagctttaatatctattttaatgtccagcatgaccttacctctggcgatctttccttggtactgggatcctttatcaaccatgtgggtaccccactgtgggacataatgccatgtgtaaaaacttagaattagtgcttgtatctcttgatatccctgcgccttattctcttcattttttaaaatacaaaggtaggaataaagtgggctagataattattatgttgttttccagccacagattcctataactttccaacccaaaaccctccaaagagctcctaatgcacttagagaaagatgaaaatttctcatagacctcaagctgctatctggtctggtctatacttctctctctgacctctttgtgtactaccctccctctcattcaccatacacccattgcactaccttcctccttttccttcaaaatgcctagttcattttcaccttgggactctgcactagtatcctctccccagaggctgtctccttagggagacctttccttgtttcataatctgaagtagccacccagtcaccctaatttgattcttctcatatcttcatatccagattcttcatttatctctgtatgtgtctcaattattattttttcactaataatagaaggtaaggtccatgaaggcaaatatttttgtttgttctgccatatccatggtgtctacaaccatgcctgccactctgcaagtgttcaataagcaactgctgaataaacaaaaattgcataaaatagagtgtgaatatgcagaaaccatctgctagctgcttgcttctggcctctgtagccccagctgcagccaaaatttaataccacccccaagttcagggacctacaagggacctgaggaaagaacaattaagcagatccaggcttgaaacaagtaagttacataaagtctctgccttgctggtcattttattctgatccttatctttaattgggattttagaccctccgtggttccctatccctatattctccattgcacagcttcctcagtagcgcagaccctctagaacagaggtcttcttggctcttctctctttctcattcctaagacctgatatctggctcttgaacaccatgtggttgggccttgctttagatgacagattaccctaatgctgaacagtcctcatgggtctctgcattacacatctattcttgaaatactctgttatctcatggaaacttcccttgaccttgatcctgctaggctgacttcatgctggaatcatgactgctattgcatactctgtggatcccaggttttacccgctgaactggatcagtcataagtagggctgactcccctaatcttggcctctttcagttgccgggctggttcctaagatgcaacagaaataagtgtactgaataggataacttaccttggatagctcctgtccaggaccacaccgttggcaggtgacacaccgtccccattggtcccagtactcattttcttggcaatccatggtgggaaggctgtgggtagagaacacaagaactagcaagctagtgggaagggactataagtagtggcttccatgccacttggcttctgggtccccttaatctattctctagatctgagatagtagggacgaggaagccaacacaaaagagttaatgcttatgtagctctgaccatgtgccatgagttcttgtaaatgctttgcatgtagtaactcattccattctcaagacaatcatattaagaattattgttagcaacattttacagatgaagaaactgaggcaaagagaccaagcaatttgctcaaattcacagtcagtggctataccaggagctgaatttgtaaagagagtaataagacaaggagttggcttctgcccagggggtaaagaataatcacaatccctcatgtgtgaacagatcataacaatttagaaagtactttcacatctattattatttgatctacacaacatccatgtgaggtaagcattatagagattgtcatctttattttataactgaaaaagctgaaacattgtttctctttgccaacagtggcctcagtacctctgaggaccaatacctgccatagcttctgtcttaggcagaatgggaggggagaataacccagaatgtagacatattttggtgcacaaaggtgcacagatagggaaacattactcagataatagttcttggaatacagatgcatatagcagtagagctagcattgaagtgggatggctgttcaccaagcctggctcttaccctttcaatctacaatctgggatggatcactttatcttttctggcctcggttacttaatctaagaaaaagggatagaatgttcttcacctattgtatatagctcttgggagggttaaaggagctaaggtccatcaaaccattctaaagagctatacaaaataagacagagttaagtatgcagaaaggttgtcttctacaaagaggaattttaatgaaggggctaaagtaattcataaatggggcttatcctactcaaagagaaaggtagcatgaggttctttacttactcatgacttcatactagggtgaatttcaagtggtttctaaaagtgccaaagtcctaaatgtgtactcttagtcagaagagacgagagtgtacatgtgtaccttgagaggccaccactcctccactcaaagttccccaaaagcgacaggttaagtcattctaaatggcattccataagtgcacctttttttcatcatcaactgggccattctttcccattccttcattcaaaggaaagtgggctacaagatccatgcttgcataagataaacatactgtcttctgtgctgatttgattgctggcccatggtgttggcctcagtaggcatgcttccctccccttgccatgcactcttctccttgagaacagaaaacttcagtattctcatagccttcatgaccaggaagttaagcaccacagtaacagggccaggaaactgctctggacaactttctcatatccctttttgcccacaaaacagaaaaacattggcaggaaccaagaagtagccctctttttgagctaagttcccaacataggcgtttaaaatctccatgacaactgctgctggcatttgagggtctgagacatcctatttcatttggtttctagagctccacccccctaataaacatcatgtgtcctaaaccccaacatgtctctctaaccatggctttgaaacctctgtctaggcaaggcaggcttggtgccaaattgagcagagggactttctctcccctcttttttccctccctccctcccttccttccttccttctttccttccttcctttcctcctttctttctctctctctctccttccttccttccttgatggagttttgctcttgttgcagtgcaatggtacagtcttggctcactgcaacctctgcctcctgggttcaagtgattttcctgcctcagcctcccgagtagctgggattacagga

SEQ ID NO: 1563507 - DNA, 4001 bp, Homo sapiens
cagataaatagcagacccaggacttgaaaatagctgtgtctagctcagaaggtacatactctttctattgcgttatccacagaagtgagatgggaatgcacaaccttgtaaggtctaagccaacccgaaaagattctgattttctcattcttcctttttcaattccatataatgtatcaactacaaagttctgtagattcaacttttgtgatggcttgttaaattcatcacctcctttctattcccacagccacgacctcagttccagggccttgttccctctctgcccctagtttatccccctcttgtgttttcctattccaatccagctgactaaccttttaccagattactcttcctaaagcagaggatctgacgttttttttaagctcaaaaactttcaatggctttccattgtctgctaaatcaaatcaaaactctagcatccactgtcttttgcagtttaccaccaatctgccttggcaagtttaacttccaattttccgctaatcgtactctaaaatccagctcagctggtgttcttttcatatgccctgagcttccctgccttaaagcagttgttcctattttctctgcttaaactgtcttctctatctccacctgttgaaatcttatctgtgtgccacagtctatcttaaataataatagttaatatttattgagtgtttattttgggccagccactgtgctaagtgtgtgcaagtattttatatggattatctcatctaatcctcacaacagccccatgaggtgggtgctattattatccactttagcctgaagttaacagaaactcagaaagggagaagtaattttatttgtccatggtaacacaagttaaatggtgagcatg[450 bp omitted]ctctggcgggtcccttcttgtcccccagttcttgcagcttgctgggtcttggccagtgtttggagtgaggcaggatcaaaataacactgcccggggctcagcttccaggaatgagagatcaagtgaaaccaagctcggcgggtgagggggtggattgaaagcccccaaacagagccagcatgctctttacacaagccctgacttgccctcaagccacgcgggttagcagttctgctttcctcaggatgctccacaagtctgatccactgtccccgccttcactaacacccagcctccttctcttctttatctcccaaccctagatgctcaaggttgttggacacgtccaggcatgttctcagaggcaatgcaggtccagtaagagcctacaggaaatggctcgccaagatcctagagatgtcagcccagatccctgatacctcagaaagcgctctccggacacaaatggatggactgacagccagccacagggcgccttcccaattgttctgattttgcggtaccctagcaggatcatcctgacctgattctgtacttctgcacctagatgccgcaggtcccagccgccttgccacaccagggggtgttcccacactcacccggtaacggacgagtagatggctcttgctcccaaatgggactccggtacaaatccacctcagcgcagagcacacatctcacccagccccctcccgtcaccccccgcccttcaccccgcgcccctcagcccccgcccctcagacccgcccatcagccccgcccctcagcccccgcccctcagcccccagcctgcatacacactcacagtatatgaaattccttgtaatcaaagttccgcttgactcatttcacatccacgtgtagcaacaacagcccaaaccctcctttcacggtaagcttacctcttccgcccccgtgaagttcctagagcagctattggactgtttgagtgcctaggcgtggctacgaaaagaaactgcctttgagaggaacaatgtgaggctgaagaacagtgacccagccactggtatggcaggagctgcaaatctcctgggactgaagcgggggccagagagtagagggccagggagtggggtccagagaaagcatcaagttgtctctttcacagctgaatgcagctcagctcatcaaagtttattcatgacttagcaggcttggagtttgacagggaaaattattgttggaaaagccaaaattttcagacacatggagaagccgctttccagctctgcatctgcctcaaaaaaatactcctccattcagaagggtagataggattgtgacaggaggaagagagcagacatgaagcagggaaaagaccactaaaaataaaggaaaattggattcggcactcagctttgatcatccatcttctctgggcccctgagtgtctgtacaaggagggggttgagctacgtagtctctaagggcacttcaaacaatgacactttgggagtttattaatccatgatctcagaggcagcggtggataaatcccgaaacgttactagtccctgaccttgaagagtttgcagagctgggaagataaagtagaccggacagagacagagaattaagggccaaactatgaggtgcagactggaagggtttgggggccagtaggaagaaggagtaaaaaagagtctgacaaggaaagcaaatgcttttcaatagattaggagcttttaaaagaggtcaaagaggaaatagcctaatgggtagaggaaaagaaaagcttgagccaaggtatgggggagaggaccaagaaatgagccattatcagtctctgagggacccctcctgtactgggcagaggctatatgccagctcagggtggagtctcagtaaagcagctgaaaagcctttggtgggaaagggctgaataggccctaagctgaagtagaaaaagtcctaaatgaacttcatatctgtcccctagctagagttaagaccagaataggctactgtgggctcaggcctagtagaagggaaaactgccagaattggaatcctaggtctgccccttactagctttgtgacctaaggcaagttacttaaccactctgtggctcaggattctcttctgtaaagtggggaaaataacaatcccttactcataggattgttttaggtattatatgagttaatatacaaaatagtgttcatatgcgtaaggagcttagaatgatttctgggacgtagtggtatagaagtgtttattaaatataaataaatacatgaatgcaatttagggacctctgaaatcatctgtgagattcaaatgaaaatagctaccctgggtacctcctaattctgttctgtcctttcctagaaaacaggacctcttctttttctccatcctttcctacccagagaagctgaattacagacagttttgaaactttagtgtaaagaaccctagcttggaatttagatgtcttgacaaaactaagtgtaacatcatgtaaatctcttcctctctcttagttttcctttctgcatctgtatcctgaagagactgttggactggatgaccttgaaacgctagagccgtgcttctctcatattaatgtgcacacaaatcacctaaggatcttgttaaaacacagattctgagttagcagctgtggtgtgg

SEQ ID NO: 1563508 - DNA, 4001 bp, Homo sapiens
gggctcaagggatcctcccatctctgcttcccaaagtgctgggattacaggcgtgagccactgcgcccagcccccatatttaatttcttgatattcattttgtgatcatccattgtgcatctttctgtatatgtgttgtacttcatgatcttaaagttttttaaaaagcaaaaatatacgcagaaccttgcagatttattaatatttcatccatccactgtttttccttcccatccttaatcactgcacgtgagagctatgatacttctgcaggaggcaggcactggtaatcagagtgttgctgggcaaaaagctgtaggctttactttcattttttattaaaattacttttacacagcatgcttctttacttctggaatctgttttcatgtcccgtctctcaggggcctttcttgtttgcgtgactggcttaaacttaccaaagggcaatgctatgctggaaggccagcctctgcccatcaaccaagaaatgcacaaatcagtgttcaaagttggactgaccagacgtgtaggggtcagaattcaatggcgtgaagctacaaagaaaaaacttgtacttcagggccaacaacttagatacagacagtgtttggaaaccataaagccaaatacttcaatctgctgcctgctttctaaagttatcaaaggtttacacaattgccttgagtggctccatctaattccctcccatctaattgggaattagcttctcctgcagacacagatggctgacccaagtgaagggtagtaaccagtataaacaaaagcctgaatcattttcctgctgtcgtttaaatgaggtgctatttattggcaaaagttctttcatgctcagggttttttgtgttgtgttgctttgttctgtacgttcatcttcttttgaaatgaacccctccaggacaggcgcagtggctcagcctgtaatcccagcactttgggagaccgaggcgggcagatcacttgaggtcaggagtccgaggccagcctggccaacatggtgaaaccccatctttactaaaaatacaaaaattagccggtgtggtggcgggcgcctgtaatcccagctactcgggaggctgaggcaggagaatcgcttgaacctgggaggtggaggttgcagtgagccgagatcgggtcactgcactccagcctgggcgacagagcgagactccgtctcaaaaaaaaaaaaagaaatgaacccctcccaattataaatagagaaaaaaaaaatccctccaagtttgggtgcctgtctctataaagtttgggagtaaactttacaggctgatagaactcttatctgccacctacccctcttgataagtgccagatttcttcaatttgataattgaaacggtatcttttttcacacaggatactggggataatgattaggctcctgagctgtggagacaaggttgcttgaaagaaacccagcttcaccactgagactgtgtggttctgtgcctcagtttcctcaatagtaactgggaataaaaactacctaattcaaagggctgttgggacactggatgctgcataaggtgattaaagcacagcgcctggcacacattaaacccccaatggttatcgtcactattatttgttacctttgagggtcctgccacctataaggactctctctatatatttctaaattaggaaaaacattcagatgcagctggagagatgggagaagcagcctataaagtttggtccaagttgccaccaacccagggcagcagcatggggcctccaggagagtctgcggaggtggccacgccacgaccctgcctggaccccagactccagccgggagctgtgacctcggacgcccttcctactcacgttgcggttgaagctgttgcccggcagcagaggcagggccatggcgctcagtgtccgaaaatccagggtcccagaagagagggcccggcaggcagcggcgcctcccggccgtgttgtttggcccccacgttgcctggagacgggaagcggcgtcacggagggaggaggggcggggggttggcgagaaggatcgtggggggcgggggacacctccgcggcgcgtacctcctccccagccccagttcccctccacccgcttcatccccgcacacactcagccaggtcctggtctcctgaggagtcttctctctgcacacgcagtgtgcacacacaaagattgactgttccctgcccccgccgctttctggtttaacccccttatagaactcaaagcctttcttgtactttcttgcttttccaattcttgtcgccaacagttttttgctatgtggttcaaacacacagcaaagtacagaaagtaatatgacgcccgtgtgctcactgagatgttacacaagtcgatattttcctatgttgcatagacatcagcttttattttgtaattaaaacgttcaagatgaatctaaagccacatataccctgacgaaaacgcgttgtaatggtaaccaccgccttcagtttttcttctggatatttttatatttgttgtttgtttgtttgtttgttgttttaagacaaggtctcactatgttgcccaggccgatctcgaactcctgggctcaagcagccctcccgcctctgcctcccaaagtgctgggattacaggtatgagccaccgtgtccggcccatttttgtatttgaactaaacgtttgtaaggcccaatcaggggtggccggggcggagtcaggtgtcacaaatcgcaacccctgtcactccatcgttcaccccaagatagccgggccaggaacctcctctcccgacacctacgtctaatccctccctgaagccctaaaggttggactcgatgctctctctcagtcaccacctcgtctatttcagctgcgatcccattgtttcttgcctggttttcttctttaaaaagaaaaacaaacacacacaaaaaactaactgatcttgcctccagagccgtcgtttttataattcatggtgcagctgttactcttctgcttcaataatctagccttcccgccgccttcagaaggtggtgaaactccttatagcctggtctgaggagcttttgtcagagggcacctaccaatgccctccatccctttctttgccccctcctccatctactccagctctgagaaaccactggcagtttctaaatcaggctctgcggtttctcctcttggggcttttgcaaataacactatcgtctagaaacacccttccttcctatctttcacataagtaaccccttcttgtctttcaggacttgaggccagcgtgggagtggggcatagaaggtattgccatttcttcaatatattctttcaccttcttcctgccgcctccatctgtatttggtgtctattctgatcgtggctttcatcctactacattgtaattacctgtttacttgacatttctttaaatgcccccaaatacctccagggcagggactgtatctccttttttattcatcaacaatatccattattgcttctgtgtttataaattttacactctaaatttctgctacttgctttttttgcctgattctgttattgaggccaggcgcggtggctcatgcctgtaatcccagcactttgggaggccgaggcaggcggatcaagaggtcaggaggtcgagaccagcctggccaacatagtgaaaccccgtttctactaaaaatattagtagaatattaatatgctactgggaggctgaggcaggagaatcgtttgaaccggggaggctgaggttgcagtgagctgagattgctccactgcactccagcctgggcaacagagcaagactctgtcttgaaaataataataataaaattctgttattgagatttctacacattgacacatgtagtgttcattaattttaaacgcattgtatgattataccacaaattgtttaactatctgctctcatctgttgatgacaattagattgtttccaattttccactag

SEQ ID NO: 1563509 - DNA, 4001 bp, Homo sapiens
atgccaaaagagaaggtccagaggtcactacaacagccccagcgacttcccactaaaagcccagaaaccactgagccaccgccctgaaaggtgtgcgtgttgtttggaggggttgtgtgtgtggtggtggtggggtagttgtgcagaggaaggagaagaaagaaaagaaaggatgtcctttatatagctgcccactccccgccccaaccccttggggaaaactaagcacagcttcccaatctgggggacagactcgggggccaaggggacctgcctgggcaggaatcgctccttctccacccacctccctcaacagctcggccgccactctccgccctggcgggcccttgaagctctgttaccggctccattggacccctgacgggcactggttcgaacccccactacccaacgaccactctcccactccgcccctctccacccgctgcctttgtgagcctgggagcagcgcccgcctttctaccgctccggcagggagaaaggaggggcggggggcaaaaagagacagcaaagcaaaaagccagggaggaaaacagggaagaaagagaaatgaaaatgggagaagcccgagtggggatgttggcgctgccacccaccccaagcgccgggtcccgctctgtgttccctccacagctacgcaaacgaggaacccgtgttctggcctcgtccctcgcccgagtcaagctcgctcctggagcggctctcggcgaaaatcaccacgttcccaggggccccggagggagctgcgttctcgcctccactcagttctccggtgcgctctcgggcgcccggactccccagctccgcctgtgcgaccacctcgacttcatccaagacgtgcagaggcagggggtgggaagcccggggggtcacaacccagccaagtgcccctaccccaccccgccgcaccctgctccatccgcccgcccgcaggaaaacactcgaaaaagccggagacaaaatgaggcgccgctcctcctccgaagacctccccacatgcactccggggcgtgcggcctcaccctgaaggagtgcctcccaccccagcgtccagaggagataagttactcacttggggttgagggagctccaggatacgggctccaggttcttggccagcggtgtggcgagccggcacagcgcccacacgaccatcgccacaagccacttgccgagccaacgctgcccaggccgagccatcttcccgggggcagactgcacttcgggatcccttggcgcctcctcaccaaagctcgcctcgccttcctctgccgcgctgcgctcggagccgctcaggcgcccatcctccgcagccgccggccttgaagtgctcccctcccgccggcttcggtgtcgctcttctccgcccggccggccaggaggactcactgggcagccgcccccaacccgggcatgggcttcggcccccgagggctcgttctcctgggctctccgctgccgcacgaggcgcgacgggggctctgcgcccccgggtgatcccgcccgattccgctcgacttcccgagacgcttcggggctgcgcgccctctccccgacggggtcttcccgcagaggtctcggtgaccgccccgacgcctcgaccgtcccgggatcgctgtcccttggaagaagtgggggtttccccacagcacaagctcggtccccgggctcccgactgggccgccctggcacgggctccgttcctccgggccacactgggactccgggctacgcgcccccggacagcttctacttcagcgcgggccctgctcagtgtacttagaagagcggggagatgctgccgagcgagccagtcccattagtttgcgcccccgaagcctcggccgggtagcccggcagcctcgcgtcgccgagtcctggctcccgggcgatcgagcccgagggtctgcggccagtgcgagcctcacaaacctcccactgctgtccagctcgcatagactccctccgctgccgctgtgctgtctactcccttgctcaggcgaacgcaaggccaaccctgctctcttagccaatagcaagctcagtggcggggtccttgccccataccacgcccccagagcaggaagggggcggggtttcagggagctcttaaggacgccgcgcgcccgatggcaccaatctgagtgtgcggctcgtgcggttagggttgggtccctctcagtcctgttcccagagagctcaacccgtgggaagttggcactctcaagagctgccggcctgctctcctctccacgcgtctggtcaacaccccagcccactgaccctgtcccaagtaccccaggaaagtatttccattttctttttacacacaggacccctgaagtcctgctctgtgcccacctccgtgtcaaggacagcctgtctgctcctcgtccagtcccacgtaaggctttagtgggctttcctcctctcgccctcaaaatgcactgtctgcttgcacttggacccggagtcaggaacataaaagtgagaacagtgggagggggaaactggtgagggtccagtacttgattggggttagaggtggggcggggagcagggtggggtgtggtggggagagaaggcgtgttcatcgcccctggggaccaggccttcggaatctcagctttctgggggagccttgtgggacctctggagccaagatttagtcttgtcctgtccgaaggcgcgggcaaggtcccgggataggcaagcggggatgagagggcacgtcgataaagaaagacacctcgagggcaaagaggaaaaagcacagggcatgagacttttgaaaaagcaaaagcgggcatcctggaccggagaagccggactccagcctgtcccggcctcgccatctgggtctttgtctcccagccctggcccattcttcccgccccgccttgcctctttgcttataacttggctcgatcccatagctcagaccttccaggtccgacccactctcgctggtcggaccccagaggacgtacccacgtgctaatgtctccccctgctggacttccatagcactgcgggcgcctgggataaacccggagcttgccatagcacaagacctgggacaggcgtagccttggcaaaaaccgtcaccctgtatggggaggaagggaaagaactagaaggatatctgagtttggggtaggcttagggactgccaagaatacaaggtctccccactttttctttatggagataattagatgagcaacattcccaaagtgctccaccattcacacagtttcatgtccatcatctcgcttaataggtgactgagctactgcgtttctcagtggatcctctgatgatctttgtggctgtagaggtgggaatagcccagattttgtctttttattttctcccaaatagaggagaaaatagggaaaatctgggcccttcccacttccaggggcagcccttgagggtgaagtggctctgggtaggtagggaaagaaggagctgtttggggtctctgagctctcagctggaccctgcattggggtgtaaggaaggagagatgagatgaatagggtgtagggacacaccagtagtctagctgggagactgggatccctggagtgcatgctaggacatcaaaacctgaatacagaaagcagcctgctgcttactgagtgcctactattgtcaagaaccaagttagatgcttttcctttcataaccttttgaaatgagtttcagtatccccattttacctacaggggaaagtaaggctcagagagaagtgactcatctgagatcaccaagctgatcagtggtgaaagcaggatttgactcctgggacatctgtctccaaagcctgtggccattcccctgtaccatactggctcaaattcccagccaatccttgcttctttgcttctttggttcattcctggttaaggctgggtcgtgcatggacagcagcagcctggggctggccaggactcttccctcactgtccttca

SEQ ID NO: 1563510 - DNA, 4001 bp, Homo sapiens
tcagtttgctggccgctaaagaactattaatctcatctccaaacagcatttggtcttttttaagtgggctttctagcaacgcaagaacctctagcattcaaggaaaatgtgattatgagcaaattgcatctgcttacatttttatcatgaaaaggaaattgaaacttgcgatcatacattctaagaacctggtttgaggtttgttctgttttaacttcgaaatcctttaataccatggctaactctgatgaaatattttttcctgtaagtcaaacaaagataggcaaaccttcgagaagcctgtaccaaaccaaagctcttatcctactctcctcaggaatcatcactgaaaaatttctatagttcagcagtctccgctaggagcaattgtgccctccagggaccttgggcaatatcccaaaccttttttttgttgccacaacttggtggtggtggtggtggtggggggtggggtggggtcaaggttgctactagtatctagtgagtagaggccacaggtgctgctaaacatcctacaatgcacagggcagcccatcaccccaacaaataattatccagcccagcccgaaaggtcaataatgctgcggtggaaaaaccatattctagtggacacctaagtagaaagcaagacatcacagttagagaaccagaaaacctcttccgttgccggaaggctgccctagtgccctggtgaagaacagactttgggccagaatacctaggtttgcaccctggctccatctcttactggctatgcttcctcaggcaaattactttacctctctgtgcctcgtttttctcttctacaacacggagatgatgataatagtaccttacacacagagccattatggctttgggtaggttaatagtcctgaagtgcttagaacagtgccaggtcgacagtcaccatgtaagcgtgcatttactaagcgtctttgccgatctctggaaaaaatatttcaggtctcagctaagcttaagggcagtagggaacggcttcagagtctgcattgccatagcaagaatgagaatggttgtcatctgacaaccgtgtcctttctttccagttcatcaaccctaatcagagagcagtgaggagagcagcccggctggctcagctcaagaacagtaaatgctttatcgtcctcggtttctttccctccttccccagcaaaactagcgactgacaagcacttggtgtcctgtgaatagagtggaaaacacaaaaccgcacagacacagaacccacccaccgacacgcataccaaccctcacacacctgcccctacagcaggtctgcagaccatcaagcccgcacgcacccacgggtctgcgtgcagagcctccctcctcctgcaaccctccggacgcagccaggtggggcacagctgatgcaaaaggagctaactaggtgcaaagccccgccacaggagagcagggaggaaagcccgtgggcgctcccggcctggtatccaggttaaatcccgtcgcagcgcgcacaggcacacgtgcacactcacacccatacacgcgggggtgcctgcaaagacatggggccccaaagcgggacctcaggccgggggtggggggaagccaatcgccagtcagacactcacctggccgcgttcccgaaaccacctgccacccaggagagcagcagcgggagcgcaaggctccagggcagaggcattctcgcacgggtcctccttcctcctcctgagcccccctcgggagggcgccggccggaccccgtagcagctaagccgccgcctcctctctcctcagccgctcgggtcctccgctccactcgcagttaccgggtgctgtccctgcagtctgggaggggaggccaggcaccgcggcaggggcgctcgcggcctggggaggggctgggggcgccctggcaagcctggccgaggctcctctgcggatgaagctggacggggtgagcgagggagggcggggcgggctgtgcacatctggctgggacccgcctccagcatgacccgcgcatcctccgcgctctctgttcacccagaaacttcccccagattcaggtcacttcacgcttgtcagagtcaccatctactaccatgtatttcaggcatggggcaaatttcggtgatacctgcactccaggacttaagaatttagttgagaagtcgaagcaggatggaaggatgcaggttcctaagacatgatccctcacttctctttgggttttcacgttctcccggttttcttctacaaactgcaaataatgggatgctagagctggaaggtcactaagtcctgggcaaccctgtcatttggcaagtaatctctcaggcccatttgcaacagcttacttacatgggaccccagatgacatcccaatatagtaaccagtgcagaaattcatggcagaaacatgaatgctatatgaattcagatccatttgggtactgacacattctttgttctgacaacgtgttacattagaatgaatgactgatccctttctgtccttcctacgtccacaccctttggcttcatggtaggcagacactatgaccccacaccttggctttggacttggccgtgtgacttgtttgatcaatggtttaagggcagaaaagttgcagtgttccagttccaagcctaggtcttaacacacctgaccctctatcatggacatgagaagaccttgcaccacctagcctggtggtccaaggcgaatgagaaacaggtgaaaaagctacctcgtcaacctgcagatctatagcttgaagcagagctactcggtggagcctcatgtatattacccaatccacacgtatatgaatgagctcagctaaggttgcccggcaccagccaatctactgaggcttattgtgatagtcctctgacacacagtggcccagtgtgagaaatgaaatgaaaaaggatacagagaaagaggaggtttatcttgattggaagcttgattcatggttttataggcatatgccttaattctggccaatgaaatgtgagaagtagggaggggggagattcttgctgcagaatcttgctttacattgtaatagatgttcttattggtgcaagccatgtttagttgggacttctattttacagttgaaggtatccccatggattcagtattcttgggtaactagttagaccattgagctgctcgtaattaatagtgtcagaccttgtcctaaacacatatgttatctgattgaacatccacaagcctgtggatggagaccattagttcccccatgtttgaagtgtcaagaaactgagtcggagaggttaagcagcttgcccgaccaaggtcatacagctaacaagtatagaaccagaactggaaaccagggcttttccccattgggctctgctgctgttatatcaatctcttttctcatcttctcacgtattggcagattcacatgtcagatgagtatcatgaataaggtaataagatgagctcttcaaggttgtcatcaaaacactttgaactcttcataccataacttattttatttactgaaatattaaaactaaaagaaaataatataagttatgaactctatacctgtgaggatcttaaagaaaatggaatataaaatttgtcttgttgtgggtttccccacaagcaggccctgaggcaaggattcaagtaaaagtagtttattctggaggtacagagaacatgggtaggtgagtgaggaaatgagttgggaaagaagacaatatcaggcatatattaagttatcattgtgagcaactggaggttcatgctgctggggatctcccagagccagcatagaacaagcatctccaaatgattttacctaaaaggcaagggaactgggtatttatacaccacttccattcactcattacctgaaagcttcaactgtggtactgatcctagaactcagtcttctgtgctgaagacagagtggggcttacagccaaagaaagcc

SEQ ID NO: 1563511 - DNA, 4001 bp, Homo sapiens
ctgtaattcttaaattcagagtaatgggttcccaggtatatcatgttagctgtattttttgtatgcctcaaatgttatttaagaaaagactaattacttgtcaatttaccagaattaaccatacccggatcactcccctttgtattttattgccatgtaatgggatgttctttaaattctctgttgaatgaatgagactaggtctgagtgtacaacaattaaagtgacatcaacattctttaaaccagagttgttttggagaaattcccagagaggctctttcttaagacatgaggctagggaactagatgtgatttagtgtagaagtcctatccccttggaaccaaagcagaacctattattcactaagggtggagtcgacaggaggtaggtgacttaaaccaacaaatatttattaagcatctactaattgtcaagtgctggcaatccaatgagattaagacagatactattcctgccttgtagagcttacagcctggtggaagaattggaaatcttattactagaaataaaggtgagaataagatggaagtgatccccttaccacctcagagagaataaaggattatacagaagaaaactgtaagactttaaaattttttgtttataactccatcttttccaaaataatgagcagtgactgcaccaacttgtgcacagaacacctcgaccaagtaccctaagggataaagtaataagtgacagctacaaagaggaaatgtggtagaatccctggagccagctgtcaagtagaaaagagagcagaagtaggcctgtgtcaggggagggtttcctctagaatgaataatcaaaggagactacttacggactatgaagtatgctcctctcctgtaggaaaatacagtattttccctatatttacttgcacaattttcttcaagttatacggctattaaaaatgacaggaacactgtaaatctataaaagtaatttctttaggagtgttctgttttttgtttttgtttttttttttttaagattaggccttccgttttggaaatcccaaataaagttatcctcaagtctgatcatttgtgaacgcttagcctcagaatggaggacacttaaattaggtctttattctcacaacatatgcatcatctgaagcaaaagtagaaaacttggctcaatatggaataagtcttcagcaaacaaacataagctatatcctgtaaagggatggagagagtaaatctctagaggtgagccttagaaatgtatcaaggtttcacccactgttcacaagggacagcgagtagcctcaacaatactgaactgtccataaagaaacccatgcaggagtacctggtgctcacgaatgcagacagcactctgaaagttcagaacggcttccagggattataacccctcatgcccgggaaggccaaaggggcctatctactaaacctaggccgccccggggaaggttcccgccaccgtccccaccgagcagcggtcagtctggcgcgaatcaggagcaaaagcccacattctcccgcaggaggccctacaaaaatggcgccggctccaccccaatgtgaccaaactgggcaacaggagttaacttcccagctcctctcccgagctcagagtcgcgtgtggggcgcccagccgcgggcaggcagggcgggaaggaaaaagggtcactgcggcctgggtgacctgcaatctacgggcaggacctgggagacccggccgagcagagccgtggtccgggggtccgggcggcattacctttattcttgggcatggcggtggcggcgacctcgcggcgtctctgacttctttccgggtagcggcgaccgcggcggctgctgctccgaggggcgacacgagggagcgcgcgggaccaagtaggtgctggaggccaggcaacgtgcgcgggagaggctggcgacccagctcttcagagatccgcctgcgtccacgctcggcggcagcaaatggcgccgcgactctttgcgtcgcttttccccgcctcccgtcgccggctgggcccgcccccaggctttatgacgcaggcgtggccgactgactcctattgttagagccgagggagacgcgttgtgggagggtgcgcagcaagccagagaggacgcgaggggcagggcctcaagcagggaaaaggcggagtcagggagggagggggagagactctgcgtcatagaaaagggcgggttgaggtggcgcttgctgctggttaagaccagacctctgctgctttgtagcaaacgcgcgtctcccggtttcacaagtggctgactcgttaacctcgtggttagctcagtttttaaaaaatatgtatatttttatttttattttattttttgagacggagtcttgctctagagtcgcccaggctggagtgcagtggcgcgatctcggctcactgcaacctctgccgcccgggttcaagcgattctcctgcctcggcctccggagtagccgggattacaggcacgtgccgccacgcccgtctaatttttgtgtttttagtagagacggggtttcagcatcttggctaggctggtcttgaactcctgaccacgtgatccatccgtctcggcctcccaaagtgctgggattacaggcgtgagccaccgcgcccggccaatattttaatttttttattaagatggagtcttgctctatcgcccaggctggagtgcagtggcgcgatcacggctcactacaacctccgcctcccgggctcaagcgattctcctgcctcagcctcccgagtagctgggattacaggcatgtgccaccatgcccaggtaattttagtacttttagttgagacggggtttcaccatgttggccaggctggtctcgaactcgtgacctcaactcgcgcccacctcggcctcccaaagtgctgggattacaggcgtcagccaccgtgcccagccggttagctcataacgcagtcctttcactcgcccagccgggttgggagcctgatgggaagggcaaggctttcctggcatccattaccaaagcataatatttgcatggcacttgttattactctttaagtctgtctgtcctacctcactgtaaaccttaccgggcagagaccatgtttgttgcttaccattacccccacttagctgaatgtctggcacataataggtgttcaatacacacagaaaggaagggagggaggggagaaaagacttaagctcaatgttaatgggctgaattgtgtcccccccaaaattcgtatgttcacgttctaatccccagtaactcaatgtgactgtatttggacataagttcttcaaagacgtgattaaattgaaatgaggtcattagtgtggacccttatctgactggtgtccttacaagaagatattattaggccacaggcatagagggagaacaccacgtgaacaagaaggtagccatctataagcccaggagagaggccaaccctgttgacgcttgattttagactttcagtctccagaacaatgagaaaataaatttctgttgtttaagccactcagtacgtggtactttgttatgacagtcctagcaaactaatacagctggctaatgctgggctgtactctacaagatttatttctaagtaaacttattttgactaaaccaagtaaacttattttaaataaatcacctttccacaaacaccagggtttgcacatacttagaagacagaaataaagtatcatcatctaatatagtggttcttttctgtgaacatttggcagcgtcaaccagaaatgtttctggttgtcataacttgaggaggggggcagtgatgctggcatctagtgggcagaggccagggatgcggctaaacatcctacagtgcacagtacaatctcccctcccccatacaagcaaacaattatccagcccaaaacatcagcagagctgatattgagaaacccaatgacagatgcacttcttagagtgaaattgaaagataa

SEQ ID NO: 1563512 - DNA, 4001 bp, Homo sapiens
accccttcctactagaaacgtgttctcatataggacttaagagaaacttccatgtaactaacagctttacttaaaaaatatactctgggacagacagggtctcctgctgctgcccaggctggaatgcaatgccctgatcacagctcactgcaacctcaaccacctgggcttgagcaatcctccgacctcggcctccttagtagctgggactgcaggcatgcaccaccacgcacagctaattttttgtattttttgtagagatggggtttggccacgttgcccaggtggtctccaactcctgggctcaagcaatccacctgccttggcctcccaaagggctgggattacaagcataagccactgcacccggccagaactttatatattaaggaaccttccagcatttccagattaaacaggtatgatgggccctgacacaacaaaaagggatctgtgaacaaacaaggaaacaacctaagtttaattgcaacttgttccgttgatcaaattattgggtcaatatatgcacagtaatttgctttaactggtatagtcttagcataggttgttcggaggttaggttatgctccaaggtcacctcaaccaaaatttttaatgcaggggcagtagttcaaggcctgtaggcttatttgggctttgtttgcattaataaattaaagctccagactgtaatactgtaactttaatagcctcatggtggagtcttactttttaactaggttaaaaactagtcttactttttaacttacttctgtactttttaacttactttcgtacaaactgtgctgtttgtacaaactcaaaatgtccaaaatttacactcagtcaacgtaacttctcctctaaagttctaggtgccaattaagaaaaaaaaccttctatttaatcacagcttgtacatcaaataaaactttcataaattctgcccttgaaataatcctgtgtgtcaagtacagccacatttttcacctcttccttaaacttctgctacatatgactacatactgccttatgctattaaacttttcttatgtctccattttttcttcttaccgagtctgtaagctacatgtgggcagcattctttgtgctccccctgcaccgcaaatgtagcagatgctttattcacaaggactcagtatctatttcttgaatatctgaatcctcatactattcaagtaatcacacaaaaagtgaggttaaaattaattgttggagaccaaggttaggtctcttaagttactcttacctatgttaattgtggcttgtctgctgataacttcgtgtgaaagtggcgtcaacttggtaacatcctgcaatgaaatatattttaaaacactgcacgtaaaacaaatgagaacttttcctttgactttacgtttgctatctacatcttgccaccatctgcacagctttccactacttctaaagctccttttccctatcagtaactttgtactcctatggctgggaagctgttaagagcccttcatcattacacaacagactacacctccactcaactattaggggatatctggaagtcagagatccccccaatcttgggaacattagcactaaaagtaatgcagacaggacacccccttcccagacgttcagaggctgaaaccatgacaatcaacatcaagactttccagccgaaccctccagaagctagaagtcccacgaccgtacacgcctgcgcccagatcgtggactggcctgggtacaggcggcgcgagcatggcttagggcgcccagttccaggtctccctcctgacccaggctcctgacccatgctcccgacactgactagtcccaataccaccgggaggctcggtcacctccactcctgagctcactctgcatcctccccaagcaaaacctcaccaaggtggtgagatcctgacgcgaaagatgcggctgccctagagtcactccagcttctccgcccgccatgttgccaaaagaggaaggaaatcaccccggctgccgcctgatcatctgcaggggtcctagtgcggggcggggaagcggagacgggaaggccgagtaggggctcaggatggccggtgcagcagcggcctcactgcttggacatctctccgcttgaatctgcacagtgcctgtcggtaggctgagtggaaaacacggtgcgaagttgctggagctattcgtcgcagacctggtagatatttgtgcaggcaatactgagggcagccaccaaacccccgccccgccggcccgtgcgaggcgggtgatgcaacccggcgcgcgcgctggcctgggagagaccatttccgtttcctgtggagtttcccgaaacctgggaatcagctagggtgtgggaacagagaagagggagtgtcctccccgcccttttttttttttttttttgaataccgatttctgtaatttaataaagcgagatcggctcggggtcggcgcccacctatgacggggctcttggctgggagaaggccgcgtgctgagccccggcgggaggtggggcgggcgcccccgcgcggaagtttggtgaagggctcagaggggcagggctagcaaaatcaaagtccccagcttgttcccagagagcgatttctagggcccgggaggtgggccttggtgacgttagattgcgttcccagtgaatatagctaggtgtcgtaagagcgtctgaagttcgctggtttgtgtgtgtgtgttttgtttttttttttcttaaagaagcagatccaaaaaaacctcgattaccgataaatcggtattttaaaatttaaagaattttgagaccttaacccacttttcgtcgtgttgaaaagcagttgagtgatttgtttttctccttgcatttctatacaaattttatcataaacagctatttccttttttgtttgcaataaatttatttccataaaaacttgttagacagctattatgcaaaagtatagtaaagagaagtgaaaagataatatgaaagccacaatgacgaatactgagaagccaagctcactttagaatacttgtaagtagtcatcaagttagcttatttaggaaataaatattatgaggccgggcgcggtggctcacgcctgtaatcccagcactttgggaggctgaggcgggtggatcacgaggtcaggaattcgagaccagcctggccaatatggtgaaactccgtctctactaaaaatacaaaaaaaaaaaaaaattagccgcccgtggtggcgggcgcctgtagtcccagctactccggaggctgaggcaggagaatggcgtgaacccggaaggcggagcttgccgtgagctgagatcgcgccaaccgcactccagcctgggtgacagagcgagactccgtctcaaaatatatatatattataaatgaaaaaaatgagggaaattagggaaaatgaggggcaatatgagaagtgaagaaaggaattcattaaggtgataattgctacctctcttttttttccccccgacttttaagttcaggggtgcatgcgcaggatatgcaggtttgttacataggtaaactgtgtgccatggtggtttgctgcgcagatcatcccatcacctaggtattaagcccagcatccattagctgttcttcctgatgctctctctcctcccacccccagccgtcagacagcccccagtgtgtgttgttcccccgcatgtgtccatgtgttctcaccactcagctcccacttataagtggtaacatgcggtatttggttttctgctcctgcgttactttgctgagaataatggctttcggctccatccatgtccctgcaaaggatatgatgttgttcctttttatggctgcatggtattccatggtgtgtatgtaccacattttgtttatccagtctatcattgatgagcatttgggttgattccacgtctttgctattgtgaatagtgctgcagtgagcatatgtgtgcatgtatctttataacagaatggttta

SEQ ID NO: 1563513 - DNA, 4001 bp, Homo sapiens
acagggaggaatgccagacatagttgcaaacaagccactccttcggctcacagcaagaggctgggtgagggtggtagcatggagcctgcttcatggtcccccccacccctgcccccaacaagagatcccaggctctgaatccagccccaaaaacaaccagatgcaaggtagcctcttcctcacaccagctggctgggataggaagtcctccctgataatcttcactgaactccagagagctccccctacgctgctcctgtactggatgcactgaatctgaattaatggttgagaaagcactttataaccaggaaaacccagtgtaactaactgcaaggaaggactggcattcttgctgggcatatgtgttccccgggcattttcagtgccaaagtctccccaaagggaagagctagaactgttcccttcacccacctccaacctggcactcgggccaggggtcagctggcagggggtgagtccccaatgggcgtgcccaccagctgttggggctgagcagtggtggttcaggccctggggtggtgacctcacttccgctcctacctccccacctccccagcactcctcccatttgaggccccaccaggccaaaatcgagaagtccaaggttaactgttctttcccactttaagagctaattaaaataattagccacaatgaactgtcaaacattaaccagaagaggctgcaggaccagacaggcctctatcacaggccgagggatgaggggcaggaatcaaatggccatcaaatccctcagctggggtatggtgcggggcgggggcggcccaggaggacctcgctgagccgaggtgccaaggggtcaggaggtgactctggtcaggaaggtgatgtgcaggcatacggtggtgagaaaagggagtcagggttagggtgcggtggaggagccaggaattcataaagcggtcaccgcctcagcagtccctcaagcctccaaagcaaggcgctggcgtgaggggaccccgcacggtgcggctgctgaatcccctaggcggcggcccaggagggaacccggaggcgggagagtcggggagagcgggaacgcgggagcgggaaggctggcggctggctcacacggaaactccggcccctgccaagaggtctctattttggcgatccagttctccacatcataggtctgcgtgcgcgtgtgtgcgtgtgaccctaaagccctggccccagaagccccgggggcagtcggatccatctagcagctccgccgcggtccgccccacctcctctgccctcgggcgcccagcttctgggggcccgctgtcatgatcggccccgtcacggaacccaggctgccgggggcgagggaaaacaggggcccctaccccgactccccgactcggggaatccattccacttccatcccgggatcgggagcccgggttctccatcacacgcgcggcggggcgactccagggcggctcgcgacactccgcgactctcccgcccttccctgggcccccagccccacgccggggccccggcgctctcgattccgccctcaagcaaacttttccacgtcccccaaggctcgaagaaccggcgccatcgacgtacctgaggccgagtggctcacgggcccagctcggtcgccgggccggggtctgtctccgtggtccccgctccgggggccgagacgcgggtccccagccccgccagcccgtcctctcccctcggaagccgggccgggcgagcggcgccaggaactcggcgccggcgaaaggagaagtggaagttgagcgcggcgcccggtcggtccccgcggccgccggggccgccgtcccccgccctcctccccgcccgcccttcttccccgcccgcctgcccccgccaccccgcgcccgtgactcacctcggcgccggggcaggctggtccgggcgggcgaggcgcagggctctcccacacttcgcgccgccaatggcaagttggagggagagatgcaaataccaggtgagacggcggcgcccctgataaaacggggcggggggcggggtggagcgcgcggggagcggggcggacgccggggagggccgggccaagacacggggcggcaggggcgcccggggagggggcgcgaaccggcgcagacatgcaccgaaacgagcgagcgaaaggggaaatgcagtagagacacacacgtccccgcaggcggcggatggggcgggcgcgaaggaggcagggcgggagggagggaagagccggagggagggaccgacgggagggactgcgggcgggcggggtgggggagggaacgagggagggacgaggcatctcggtggaaacagcgcccgtccgccccggcccgcccgccgcggtcgccagcacggcatggggagccgtgccaggggcccgcgcggcctctcattcccctcgcggctcgctcgcgcccgggggaccacgaggcagggcgcccgcagagcccgcgtcgtgcgccgcggcccgggcgggcgctccccactctgcttctagccagcgagactccgagctctctgctcgttccgcgcccttcccggtgcgaagcccccatacaacgccccgcagagaaatcccttccccgcggactcgggaaggtttcgtccagccccctcggcccgtgcaagtggagacttgcttgacgcctttgggccaagccctgcgctccacattattgagctcctggggtgtgcaggccccagcgggagggcgggccgtgcggcgggtgaggccgcgagatgcccagaggatacaattttggaaccatatgcccgactccgcagaatcctgggcgtaacacctggggtgactggagagtttcggcgacttcttagggaagtcgagtctaggactcctgcgggaagttggggtgggggacgctggcaagatatgagtcaggggaagggctagggggagaggggctggcccagcaagtgcaaagagagccagagttcgggtgctggaagaaagcccatgcctacctttcttcccctgtccaaagccaggctgctctgctccacgcgcccacttgaaagccactcaggcacgctccccttctatctcccctttgccctctctgacctgcctcaacatcaataccgccgcctacgtgggtctgctgataggaggctctggagagagtgcgctgggaattgttactctgtatagttccacgtggcctttttgggggtgggggcagcaaggcctaagccttggcagaaagcatcaagactgaaggagccccaggggatggggccttctaaagggcttgaggttgaaggacctactcagcctccagcatcggcctgcttctcctgccttgggaaaggatcatctcaggcgcaggactgggggacaggagtggtggtggatgatggccacaaaggcagctgcagattacaagttcccaaggaaagatcctgtggctggactggggcgccggcccctgagacctcctggatactcagaatcaagtccccaaaacaagcactttgtcttttccaagcgggcatgcttttcccaggggattccagatcctggagacacacagttctctgctggcctctcatccacgaggtcccctctcaaatttggggtaggttccggatgtccctaagccctctttaccttgactttgaaattcacgaatggacagacacgtctgcacacgcgtgcacacacacacactttcccattttgctaagagctcagtggtctgtaacctcagacagacctgggttcctattccagctcactatttaccagctgtgtgacttcaggcaagtcacttaaactctctgagcctcacttttcttctttaaaacagaacaaaaacaaaaactaggctgggtgtggtgactcatgcctgtaatcccagcactttgggatgccgagcggggtggatcacttgaggtcaggagttcaagaccagcctggccaacatggtgaaaccccatctctactaaaaatacaa

SEQ ID NO: 1563514 - DNA, 4001 bp, Homo sapiens
tttgcaagatgaggggcattttggacatgctatcactcaggcccctagagacagaccacagcaccctctattttagatcccaatatatgccagagaagacagaagccactgtgtcaccacttagcactaggtgagggagagtgaattttgggcccctaggttgtccaggggtgggcgccagttcctgagcaaccaccgagcaaacagtgcagcacagggaggaatgccagacatagttgcaaacaagccactccttcggctcacagcaagaggctgggtgagggtggtagcatggagcctgcttcatggtcccccccacccctgcccccaacaagagatcccaggctctgaatccagccccaaaaacaaccagatgcaaggtagcctcttcctcacaccagctggctgggataggaagtcctccctgataatcttcactgaactccagagagctccccctacgctgctcctgtactggatgcactgaatctgaattaatggttgagaaagcactttataaccaggaaaacccagtgtaactaactgcaaggaaggactggcattcttgctgggcatatgtgttccccgggcattttcagtgccaaagtctccccaaagggaagagctagaactgttcccttcacccacctccaacctggcactcgggccaggggtcagctggcagggggtgagtccccaatgggcgtgcccaccagctgttggggctgagcagtggtggttcaggccctggggtggtgacctcacttccgctcctacctccccacctccccagcactcctcccatttgaggccccaccaggccaaaatcgagaagtccaaggttaactgttctttcccactttaagagctaattaaaataattagccacaatgaactgtcaaacattaaccagaagaggctgcaggaccagacaggcctctatcacaggccgagggatgaggggcaggaatcaaatggccatcaaatccctcagctggggtatggtgcggggcgggggcggcccaggaggacctcgctgagccgaggtgccaaggggtcaggaggtgactctggtcaggaaggtgatgtgcaggcatacggtggtgagaaaagggagtcagggttagggtgcggtggaggagccaggaattcataaagcggtcaccgcctcagcagtccctcaagcctccaaagcaaggcgctggcgtgaggggaccccgcacggtgcggctgctgaatcccctaggcggcggcccaggagggaacccggaggcgggagagtcggggagagcgggaacgcgggagcgggaaggctggcggctggctcacacggaaactccggcccctgccaagaggtctctattttggcgatccagttctccacatcataggtctgcgtgcgcgtgtgtgcgtgtgaccctaaagccctggccccagaagccccgggggcagtcggatccatctagcagctccgccgcggtccgccccacctcctctgccctcgggcgcccagcttctgggggcccgctgtcatgatcggccccgtcacggaacccaggctgccgggggcgagggaaaacaggggcccctaccccgactccccgactcggggaatccattccacttccatcccgggatcgggagcccgggttctccatcacacgcgcggcggggcgactccagggcggctcgcgacactccgcgactctcccgcccttccctgggcccccagccccacgccggggccccggcgctctcgattccgccctcaagcaaacttttccacgtcccccaaggctcgaagaaccggcgccatcgacgtacctgaggccgagtggctcacgggcccagctcggtcgccgggccggggtctgtctccgtggtccccgctccgggggccgagacgcgggtccccagccccgccagcccgtcctctcccctcggaagccgggccgggcgagcggcgccaggaactcggcgccggcgaaaggagaagtggaagttgagcgcggcgcccggtcggtccccgcggccgccggggccgccgtcccccgccctcctccccgcccgcccttcttccccgcccgcctgcccccgccaccccgcgcccgtgactcacctcggcgccggggcaggctggtccgggcgggcgaggcgcagggctctcccacacttcgcgccgccaatggcaagttggagggagagatgcaaataccaggtgagacggcggcgcccctgataaaacggggcggggggcggggtggagcgcgcggggagcggggcggacgccggggagggccgggccaagacacggggcggcaggggcgcccggggagggggcgcgaaccggcgcagacatgcaccgaaacgagcgagcgaaaggggaaatgcagtagagacacacacgtccccgcaggcggcggatggggcgggcgcgaaggaggcagggcgggagggagggaagagccggagggagggaccgacgggagggactgcgggcgggcggggtgggggagggaacgagggagggacgaggcatctcggtggaaacagcgcccgtccgccccggcccgcccgccgcggtcgccagcacggcatggggagccgtgccaggggcccgcgcggcctctcattcccctcgcggctcgctcgcgcccgggggaccacgaggcagggcgcccgcagagcccgcgtcgtgcgccgcggcccgggcgggcgctccccactctgcttctagccagcgagactccgagctctctgctcgttccgcgcccttcccggtgcgaagcccccatacaacgccccgcagagaaatcccttccccgcggactcgggaaggtttcgtccagccccctcggcccgtgcaagtggagacttgcttgacgcctttgggccaagccctgcgctccacattattgagctcctggggtgtgcaggccccagcgggagggcgggccgtgcggcgggtgaggccgcgagatgcccagaggatacaattttggaaccatatgcccgactccgcagaatcctgggcgtaacacctggggtgactggagagtttcggcgacttcttagggaagtcgagtctaggactcctgcgggaagttggggtgggggacgctggcaagatatgagtcaggggaagggctagggggagaggggctggcccagcaagtgcaaagagagccagagttcgggtgctggaagaaagcccatgcctacctttcttcccctgtccaaagccaggctgctctgctccacgcgcccacttgaaagccactcaggcacgctccccttctatctcccctttgccctctctgacctgcctcaacatcaataccgccgcctacgtgggtctgctgataggaggctctggagagagtgcgctgggaattgttactctgtatagttccacgtggcctttttgggggtgggggcagcaaggcctaagccttggcagaaagcatcaagactgaaggagccccaggggatggggccttctaaagggcttgaggttgaaggacctactcagcctccagcatcggcctgcttctcctgccttgggaaaggatcatctcaggcgcaggactgggggacaggagtggtggtggatgatggccacaaaggcagctgcagattacaagttcccaaggaaagatcctgtggctggactggggcgccggcccctgagacctcctggatactcagaatcaagtccccaaaacaagcactttgtcttttccaagcgggcatgcttttcccaggggattccagatcctggagacacacagttctctgctggcctctcatccacgaggtcccctctcaaatttggggtaggttccggatgtccctaagccctctttaccttgactttgaaattcacgaatggacagacacgtctgcacacgcgtgcacacacacacactttcccattttgctaagagctcagtggtctgtaacctcagacagacctgggttcctattccagctcactattt

SEQ ID NO: 1563515 - DNA, 4001 bp, Homo sapiens
aatgcaaaggccctgaggctggcccatgcctgctatgtttgaggagctgtgtggtggaaccagtgtggttggagcacagtaagggggtgggaaggtataggcggtaatgctagaaaggttacttgttttaccattaattcacagttaatatttatttacactggaagggattctagttctgatcccccatttcacaaatgaagaaaaaggcacagagaggaagtggttaaatcactcatctaaggtcacacagctgctgggattggggggtgggtgggtgctgagagaaggtgaggaatgaagactgctctgcaggcagagggaacagcaagaacaaaagcttggaggtgagaactaatttggtttttaaggactgaggcctcacgtggggtgggatgagatctaagaggggagcctcaaaaattatcctgtgtcctgagtacttcctgggccacctttgagtaaggaatttaacctccctatggcccaattccctcactacctatctcatggggttgtggtgaggattaaaggaactcattcatatgaaacactctgcctgatatacggcaggtgctcaataaacgctagctcctattggcattactatcatcactggcgctaatgtattcacttattgtagtgaggcagaacgtctttgtggttacgagtgtgaccaggctgacccactattaagaggtggaggacagggaaggccgtacagtgctccatcacaaggaaaagaggatcagcacgttctcttctgggaagggaaaaaaaaagagaaggaaattgaaagtacacggccgatcttcccccaattacaaagcactggactcacgggagggtatgcgggggactgtgcaagcatacaggggtgtgggggaggaaggccaatgaacagatccactgcaaagggaggggtgatgaggctcatcgtctgaggggaaggggagcagaaaaccttacagactcctgcaccacagtgagaggagagaaaagccatcacacagactgattcaaagcagagagggaaaaggctatggactgagctactgaaaatagggagatgtaaagcactaaactaacccactattaaaaaggagagaaccccaagcgctagagcgacagtctacgaaaaagaggagacagggcaatggactgatagctaaagggacgtgaatccaaacatgaagactgatccactataaaatggtggtggtggtggtggggggggggggtggttttgaaaaaagccatggactgatgcattgggggactggaggaggcaggaatacaaactcaggtagactcactgttaaagagggatgcggaggagtgcggcgccacggattgattcgctacgatgtacaggaagggtggaataaataaggccacggacgggtctcctgaaagttgaggctaggagaaatccaaacactcagatacacctactattaagggggctgaacactgtcacaggctagctccctataagtgggggtgggtggggggcgggtgggggtaggggtagggggaaagcctatggacgagtccaccctaagttggcgtggggaaaaacataagcacgcagaccgatccattatacaacgggagggggaggttaggccacggtcagatccactataagggacgaagggcttgagcaatgccacacgcaggtccaccagccgtggtggtggcggcggggagtcgaacaccagcaggccaccggccaagccacatcctctgcgcgggggcgggaaggatacgtggggtcacggactgggccctccaccctccaggcccagagctcacctgtgtgtagcgtggcggtggcgttggcaatgttggcagctccggggggcgggggctccatacgcggccccaccgccccccaggcctgggttccgaggcggcggtggaggtggtggtggcggtggcggcggcagcacctagaagccgcccctgcgtttccctacagctcacgtgggcccgaggaggaggagcccaatgtcccgccgctcgctgattggccaaagcgctattaatcggccgcaaggcctcgaggggttgggggacgggcccttccctacagagctgtgccgtgattggcgtaaggggaaatgatggaacgctcacggcccctggagtcccgaggaggcgcgttcggccttcacggtgctccacgccgattggctcaaggactgacggactgtgagcaactgaaaaggctcggggcctgtgtcgggggggcgggggtctgcctcacactgattggcttacatgggattgatggaagacagcccccaaggacgggggtgggtggccctgtttttctctgattggcggacgagggacttctagacccctgccaaaacaccaagggggcggtgtcgcacgccatgctgctcagcggaagcagggcttgtatagaaatgggcgtagcagccggcgggagtgggtcggactgggctccgcgtaggcgggcagggcagctctacggttagacaagaccatagagctgggtaaagacgaatttagaacacagcggaggtaggagggcaggatggctgtcaggcacacgaaagagcattgagtggcagaaacgaaatgctttcagagggcagggttgaactgcggccagagttaaaaaggggaggaacctggctctgcattgattggcggtggctggactcaacctagaataggggcccgactagggagagcgggatccaggtctgtgcccattggaagctggaacacttacaagcaggggctaagacaaggtagggctgagttagggtttgggtgtaatttggggtacctggggaatgattgggtgtgtgaaagcgtaaaccttagggccctttgattgttgtgggaatgaacaaacctccaccatgaattggcccattctctatggcaattcaaagggtggcgtctaggaaaaggaatggaagaaagggtgaggtggggggcccaggttgccaagatgacagaagagagggcagtgcataaggtcaactggcaaatactgccaggcaacaggctggaggcaggactgctggggcattttggaggttccacagagagactggatctctgggtctctcagtaactttgtgccctaggaacaggcccccgtggcaactagcagggtttatggggaaaaagaagggccatgtgactcaaaggcattcaggctctttaatgtctgaggatggggggaagaagtcaatggtgaggcttctctgggaaattctgcaggccttgtagttctctaagcccctgaaaaagaggacagaagagattgaacaaagactgggtctgggttacgcccccaggcttgctctgacctccctcccttgactccagtttagagggaaagatggtccttcccttctttcgctctcttccttcttcaggtcaccaccctaaacacagagtctggtagtggggtgagctgctctcacctctagcaacatgtggatatgggctttgatattcatggagtccttggtgaggctgttgctgagcctagagaaaagaaacaagaaagggcaaaatgggccccacatgattatgatgacccttccttatcacttcaagatctacttatatcctggatgatttccacctggctcattcctatgtggaaatgccaagccaccatctggttttcactgattcaaagattattaaatgcctactgtatgccaggcaattttaggcactgggagatagcagcaaacacaacaaacaaaactcccggcctgatggacttcaaattcttgtaaagaaagacataacaaaaaaccaatggaataaaagctatgtgtcagatggttctaactacaataacaaaaattaaaaatgagagacaataaggagtacaggagtggggggctgcaattttaaagagggctcagggatggcttcacggagaagcatttgagtaaagacttaaagacagtgaattttgagtagtgtggctatat

SEQ ID NO: 1563516 - DNA, 4001 bp, Homo sapiens
caaagacctagctctgaagcccagaccctcatggctccctctagaaggggttgccttcttcagcctgcatgaagtggtaaatgaagaagaggacgatcacaaagaccaggaaaagcagcagctggccccagagcgggacctggcgatcctggcccagcccagccccaggagcacggttttcaggccggatggcacggcgggtgagccatgaagaggaagatgatgaggaggacataaaagaggtggaggaggaagtaggataataggacaggtccagggagctcctggaggctgaaacagggcggtagtgcgtgatgctctggtaggcactgtcccggccgtacatggggcgttccctgaggcaaaagaggggagcaagtgggccaggagcctggacccagaaccagcccgtccctgggctcccccactacgcacctatccttgcactcctcttcagaagaagacaaaagatcgtcatcatgcacctgcagaagagagtcagggcgaggggactggctggcagggccaccatggccctgtcatgtccctcagtccaaacttccccagccagtcccctctgacctttggttagaggccaggaacccacaccctcctgaatggctctgggtgttcagccctttatccatggggccttgccacttgtgctcatgccccagcatccccttttgcccccaggactctcaggaagagtctgagcctagatcccagaccagggtgctctagtcacacagagtctccccggaggcccaagagccaccatttgtacccagtgcccccctggatttatccaaacacagccgcgatcccctaggttgtacccaagtacaggacgcctgccagccagctcacctggtgatggaaagcgtcagcatctgggaatgaagtcactgactggcggacagccctggacgggccggcagactcgggctccccataagtcctggtggtgaagtagctctcttcatagtagtcgtcattgtagccttgggaaggggggcagcggtagcagagggggcatcggtgtgccccgcctggcctgatggccctaatctgaatcccatttcgggacctgtaacagtttctccctcctaaggctgctggagtggttgggactgaggtctcaggtcctccctgtgagcggggtccctgacgaagtcgggtgaaggtgccagcgtgcccacccaacccctgccttacccttgctctggtagagtaaagcgtcctctttcttgggaagatcatacatatctgcatcccctctagtcgaattcaagtctggattgaaaggaggagacagaactgtttgcccccccagacttccctcccctttctccagtgccgctctcgaccggcccccctgccacaccctcgcgaccccatcctccccgcgtcccaggctgtccccacaggcgaggctctcaccagagaagctataagaggaggcggcggacgagctggggggcgagagccgccgcctctgggtctcgtactcgaagatcttcttctcgtaaagcctacgagttgatcctggccggacacggggcggtcagggccgcgggccggggaaggcgcgcggggagggcagcggggaggtcgcgaggcggagcacgaggagggggcccggaaggggtcccgcccgccgccgcgtacctactacaggcccgtgcgggatgttgtaccggcgcagcaaggtggtcagctcggtatccgaaagatctgcgtagttgtccatggcgggtgcgggctcaggcggaggcctggcggcggcccgggcctaccaaaaccggccgagcaacggctgccgaggagcacggcgggggcggcacgagcgcatcgggagcggccgcgctcgcgtcacagccgaatcgttgtcgcgtcacagccgaatcgttgtcgcgtcacggccgctggctccgcaggctgcgcgcgctgcgcggggcgggacctaaccgcgggagcagccggcacagaccggccgtgccctgagagctgggaggctggggccgcgagcccaaacgtcatcaacgcgaggattggctagcggcggagagggcggggcccgcccgggagtcagggcggtgggaaccggtctcgcgatgggagcgggcggggccgcaagcccatatgtcacaagcacggggattggctagtgatggagggggcggggcccgcgcgggcgcggagcaaaaggtctcgcggtgggagcgagcggggccgcgagcccatacgtcacaaaacggggattggctagcgatggagggggaggggcccgcgcgggcgcggagcagaaggtctcgcggtgggagcgagcggtactgcgagcccggacgccactaatgcatggattggctagcggcgtagggggcggggcccgcgcgggagtcagggcaatgcaaaccggtatcgctgtgggagcaggcggggctgcgggcccaaaagtcacaaacgcacagattggctagcggcagggggcggggcccgcgcgggagtcagggcgatgcggctgggagcccagacgtcaccctgtggcgtgcggcggggtgagaggggcggggcctgcgcgcgagggacccgggacgtgcgagcgggcgaagtcggcgcttggggtggctctggtccctaagtcgcttgggcttcgcccgatccctgcacatccctactccccgccgtcgtcccccttcccagggccccagagcctagggttccccggccgcatcccggtcggccgccccagcagcggcgggaagggcccggaccctaagagagcgcgggccccgggccaggcgctgccgagggcgctttgtgtgcgcatcgcccgggaagcggctgcagggcaaggcccgcgcctacgcgatccccgcagaccccctgccatgggcccgccttcccagtctgcggggctctcgcccgcgcacatgtgcctgctgcttaccaccgcctacccctctgcttcccttcctcctccctcgctccacccgggaggaaatggggcactgggccaggaggccgctggcactccagaagcaagcagtcttcgaaggggcccgggcatgccgacgggcacgccagtgggcgcgggcagagggcgccgtgcgatgcgtgcagagacgacgtgtgcccgcctaacccttcatgccgttcattcacccggggcactggggggagctgaagtggggcgtcctctcctgtcggaatggtccctgagcgcagcgtggctaggcagggggcagacgtgggtggcgagctatggattcccattcccagggccttgatcagatattggctgtctcatggagaagagaaaggaggtgacattcatcattcatattcttttttttttttttttttttttgagacagtctcgctctgtcacccaggctggagtgcagtggtgcaatcttggctctctgtagcctccacctcccgggttcaagtgattctcctgtctcagcctcccgagtagctgggagtacagtcacatgccaccatgcctggctttgtatttttagtatttagtatttgtatttttagtagaaacaggatttcaccatgttggccaggctggtctcgaactcctgacctcaagtgatcagtccggctcggcctcccaaagtgctgggattacaggcataagccaccgcgcctggctgtgacattcacattctaaacaaagccagctgagggtgtatggaatcaactagtgtgcccctcactgggtaggccccaaactgggagcatgaagaggtgacatgccatctgtagtttcacagttgagggctggtgacaagggaagaagaggggagggctctggtcatgtccagaatggctggcctggctggtgagggtcacagaccagtcatccatggaggtttgcccatggggtgggaagaggtagacacctgggggagtaatgaggagatggggccctgttttgactacacgcaaagatcctaacaaagaggaatcactgttggcaaggc

SEQ ID NO: 1563517 - DNA, 4001 bp, Homo sapiens
cttataatctatgtgactttaagtagattgtttaacttctgtgcattttagtgttttcttctagaaaaagaaacaggaataatagtacctacttcataacactcaagataatgcaacaaagtatttatgatgatgactaggacattatgtgggttcaataaatagcagtcattattgtcacccaatgagatgactacagttcagataatgtgatgcacggggacagcaaatgcatttcttaagaaaatatatcgatgtctctaggctttaaagttgacagctatagactgtagctaagaatagctacaaacaaaacatctgcaagacaagcttcttcttggatttaaactcacacctggaacataccatcacacttctttgtgttctccaagaattgatctcaaatcaggttccctaggatgaaaagaaaaatcatccaatcttaatttttgccttcaattttatttgatacagaataatatccaaactatgtgtatgtttcaaagtatcatgttattatgaccccaagcttctccaccctatttatttcccagtatatttgtgctgatatcttttattccaatcaggcaagcccacctgtctcacagtgctccctcttctgtttacccttctcaaagtccaatctcagtagcaggaagcattttctccctcctctttgacaacttcaaatcccctgtactctgctggagcccagattaaaattcacctccttcacaaagcctgaaagccggatgagggcttcagcacttcccgggttaggcttgaacttccatagatgaactcaccacccccatcagtatgctcttccactgacccctcttagcgttttttgcacacgtttgtaataatacaatgattaatatggtctgtttcacacggtctactttattctgtagaataaaggtgtgccccctaaatgtttgtcaacattagtgctatcagtctttgctggaaacccctaaagcgctggatttttataaccagtctaacttgccttttactctcaccagaaccctgcactgaaccttaaacacacatttctcaaaagcaagattccttccctcttttgcttcccatcccttctagaaattgaggggaaactctccccacttcaaagacctggtgggggaagtggcaggtggctgaggggccagtaaagagatggcgatcaattaaggaggcaaaaagagaaagtttgaaaaaaaaaagtcacgccctgagcgtggcaaggaattcccatgccccaaagaaaatggggagtgtagcgcagggagggttatgtgcccaaacctgaaatacaaattgagggaaaagaggaaagagatcacccaattcctgcggtaagaattagagtccagtcaccgcctaggcaaaaccctggacgcaaaccccaacttcggacctctgaggaggcacagagccagggggaggggggcggcgtcgtgggaaaaaaaaaaaggggcgggcgagttggaccaaaaaaaaaaaaaaaaaagagcaaagacagcgcgctcccgggctcaagagaactggcgcctagagctcaaaagcccacccccgactcccagtcccgataccccctcccctgcagaggtggagctgggtggagttaggcgctgaggaccgcggccccggaagcaccctcctccctaggccccctcagtcccacagtccccagccacggccaccggggctttctgcctctctgacctccagctccccggctaccgaagcgctagtccttatacagccgcggaaaatcgggccggcgcggcagttcctgggctcgtagtgccctcgcggcgccccacgccgcgccactctcttccgaaatgcccgcctcgcgcttccaggcctagacccggcactctggcccaaggctggactctcacacacagggtgcccactgcggcgtctcctattggctactggtcaccggggaagccggaggcccgagcccatggcttcatgggaaatgtagtttgaggtcgctggaggctgttcttcctgggggtaactcgtgttgacattggcagacagacacaagtgaggaccgagaattatgggagatggagttgcgggacacttatttctctatacgcacaattcttcccctccccttccgattgtccccagcgttcagacggggaagggtattctgggtattgtagtttgggtgcactgtctagagaatctctcttggggttatgggtttgtgcttgtggggacagacgaaggctctagatttattttcatgtcggttaagctcttagcattttgcgggaagcactttctatcgtgatttgaaattgttattgagttttaagtgtttttcaaaagatgatgtttattctttggtaagcttagaattttaattgagagttatagtcctttaaaattgttaaagtgtgttccttgtgaaccacctgcattaaaatcacttgaaaggtatggaagaatgtatatatttttttctaattggaaattatagttccccctggaaacagtgtcataaataggcatagaaatgtgatctacaccagcccagaagaagcctatttaatccataatgaagctatgttgttgccatgaaaaacagtggccacataaactgctataaataacaatttagaacagatagacaatacaacttaagtacaaacgagtaactatatgtgtctttaagaaacttaaccttttgagtaaaaatatgttacaagagctggataaagacataggtggggaatgccaagcacttccaagtgacttaaaggttgaggaaaatggttgtttattagggctaatttcactcccaacttttgacctttttttttctctgttagagatgaatccttgtagccttgttacagttgaattactacaacttcttgatgaggacaacttttcgactcacgagtaaaatgaagggaaagacaggggaattgcattttgctgaggtaattgcccaatattttaaaaagataagtgaaggaggaagacgatttaataaattcaaccatttattcagcatagtgctttgtgcaaagctctgggctaggcactgttgccacagaattggaaaaatagtccctaccctcaagtagctcaaaatccaggtgaggggagttgtagtagaggagaatctggggggaggaatagatgagtatacaatgtgcaaaatgctgtaaagaagtctacatagggttctataggaacatagaggaggaagaacttgttctacttctggagaactggttgaagaaccagtaaaatatttgtcagatttggggcagggaggtcaaccatattctatacaaagcatatgcaaaggcataaaggcatgaaagagtgcagagaacaatagcaaaagttccatattgcagagactagatcaggcagcaacaaggggtcatatcaattagttcataatttaacttgaaagtgggagagaaccatcagaggaatttttgtgcttatatagtgtttattttttaaagcatatacacatagaacatactgggaacacatagctagggtattatggggaatcattctggagggtggtaattgaattgctatattatgttttaatactttttatacttttaaattcctccaggaaaataatttgcttttttaaaaaaagaaaaatcggctgggtgccggggctcatgcctgtaaccctagcactttgggacaccaagttgggaggattgcttgagcccaggagttcgagaccagcttgggcaacataatgagaccttgtctctacaaaaaatcaagaaaattagccaggcatagtggcgcatgcctgtagtcccagctactcaggaagctgaagcaggaggatcccttgagcttggaaagttagggctgcagtcagccgatattgtaccactacactcgagtgtagtgggtgatagagcaagactctgtctcaaaaaaaattaaaaaattaaaaaaagaaagaaaaaagagaa

SEQ ID NO: 1563518 - DNA, 4001 bp, Homo sapiens
aaatcacgtggtctgttagccattatcattagaatgtagtctttattaattattcaacatacatttattgggaacctactgtgtggcaaggacatggagttgggcaataaatagacaacaaactgtagccctcatgaaggttatattctggtcggggtgagagacaacaaactaggttaaaaagggggcggggcacaatggctcacgcctgtaatcccagcactttggaggccgagtcgggtggatcacctgaggtcaggagttcgagaccagcctgcccaacattgcgaaaccctgtctctaataaaaacacaaaaaaattagccaggagtggtggtggacgcctgtaatcccagctactcgggaggctgaggcagaagaatcgcttgaacccgggaggcggaggttgcagtgagctgagatcacaccacttgcactccagcctgggagataagagcaaaactccgtctcaaaaaaaaaaaaaaaaaaaaagtgaactatatgtcagtagcgggtgataagcatgcagaaggtgctcagttcatgccaggcttttaaattataatttaatctccattcattaattcaagaatcttccttcgtgccaggcattgtgatatggcagttaacaaaacagaccccagtccctgcccttgtgaggattggattctggcagagagaaagagacagtaacaagataaggaacaaggaagttgcatgttcgaagaggatgggcacacggcaggtggtcaattagtgttagttattagcagcacatccccattcactcagtgaatgcccctcggtgtccttgggctcaggaagtgccctgcttagtgcatcctaatggctgttgccacgactcccctccgaaagcctggcgcagcggcagtttgggggcggatggtggcttcgaggtttggtggagctggagatccggaggtcggagtcggggcaaggtcccaaatggggatgcggccgcggcgtcctcagctctgagggatccctgggaatagtcactggcggcgttggcccagaaggagcgggggcgggataaagagagcaggaagcggaggacggagcttgggggtccccgacggttggggacaggaagaagacctggaggactgcggggaggggcgaggcggcggcgcacgtggagggagaggtcggcttctgggggtcctgtaggggtgcccggccatctttagggatgggtcagaaggcagaggcggggtcgaggctgcctcttaagtcggggtctgagcggctggagtctgggggcgccgacggtgaggaaggaaaagcccggggcctggccgagtggcggagcgcagcttccaccccaggtgcctggcgggacggggccacactcgcccagtccccgcgacgcgcagggaggccgcggccctggtccccaaggctccgctcccgggaggagcccgaggcgcagaggcacgtgccgagggcactggcccggggcctcagcccgcgggaggcgccggagattgggggctcggtcctctcaagtggcgcggagcccccggcgggtccccgtggccgcgcgctcagagccgctgggaccaggttggggggcttcgcccagctcaccaaggctggcgcgctaaggggccgggacctggggttagggcggcctcgccaggtcgtgctttcccggacgaggccgggtgaggtgcaaagctcggagtgcggaagggtccccgaaaccaggactccacttcgggctcggtgtgagcagcgtcgcccgggcatcctgtcaagacccatcccgactccgggtgaggcggccccgcttccagccaagcgccgacacccctcccggccggccgagtgaggggccgctcgcccgggagaaggcttggcgcttgggggacgatcccccaaagccggcgcggggatacccccaggcctggcagggccaggggcaccggcgcctcgctcacctgtgtccgtggggaggcgggcgcgctgggacgctctgacaggcctggcggggggcgacgctgctccccggggcaccccggcggcggttgggggagtggacatgcgcagccgccctccctcggctcctcaggccgcccacccccctgcgccgcgcccctgcccctgccactgccccgcccctgcccgtgccattgccccgggggagcaaggggtcgtgcccccccaggcggcttgcgcacaggcacgtgggtgccacagcggcctctaggggtgcacggacggcggccaaacctccccgtgtgtcccctgtggcgcctctcccttgctttcctgttggtggtgtgtgtgtgtgggagagttgggtgttagattttgaccaggatggcctgactttgggaacggttttgtgggaagctctttcaggccacagagcctgtgctgcctcaactcggttttttggtagctctggagaaaagacagtgacagaggaggggtcattctgtcagggaagaaagaccctgattggaggcggctgcctgtcaaactacacatttcccaggctcccttgcagctatggcaaccacatgcacagtcctgatcaatgagagggcagcagaggtggggcatccagagggctcttaaaacagggcagcccctggcccgggagtggtggctcacacccataatcccagcactttgggagaccaaggccagcggatcaccaggtcaggagtttgagaccagcctgcccaatatggcaaaaccccgtctctactaaaaatacaaaaattagccaggtgtggtggtaggcacctgtaatcccagctactcaggaggttgaggaaggagaatcacttgaacctgggaggcagaggctgcaatgagccgagatcgtgccactgcactccagcctgggtgacaagagcaagactccatctcaaaaaacaaaacaaaacaagaacggggcagccccggcccttccccatccctcctcttcttgactcagtaaggctgtggtggtcagcttgggatcataaggtggccatgaagaaaagtcctggaaacctcagatccaactcccttgagctgccaaagcaattctcaccacgtgggagaaattcagctctcagactgtcctccaatttcccacctgtggtcaatggcaggcaccccttctgccaagaagctaccatgaccaccacattcaagttaaacctggacctcccaccatccccagtcaggccaatgagacagtggggaaacaggcctggtaaggatacttcctgctagttttcttgccttctcagcctagggtgtgggtgtggctgggactggctgtgaggctcctatttataaggcaagcacccattttctcatggattctaccattttatatcccgtggagccagtcaagatggctgctctattttcagttagttttttgggggcaatggatgggcaggggattgacctgacagagacccactccctcattccttcattactcatcggctctgctggccagggatgtggggttctccacctgctcaaagtcaaaaagctttctccaggttttttaacagcttgtactttattacatatgcaaccttgccatgcctgccagttaactcccctcccgccaatgttatcctcatgatatcagctccctcttggggccactgagctgcccccctttccttctgggctggagtagtggtgcccctcaagcaggcaatgggcagggggagatccacaattaatcgtcgcagttctcttaaaagtattaacacttaaataagcactcttggggagttgcaaaggatattcaggatgggatgcagtgggaggctacccctcatccaaggtacaggctggaatgagctacagctggtctatcgtgggcctcagaaggtgaagagggaccgtattctggggcttagtgtgggtggggcatatcctccccaaacttgttctggtgggcgatgttcttcacatctaggagagcctgaggaggaggcaagaatagggcaggtgag

SEQ ID NO: 1563519 - DNA, 4001 bp, Homo sapiens
tataaataaatgcttactcacactattgactttattaaaatctggcatggttttcttgaatggcaattttaaatacacattccctaagacccagcaatcggaattccaaagtgtacactcagttacgaagtgcacaaaaattcacacaaaggctgcctattacaacaaaagtataatggcaaacaattggaaaaatctaaatgaaaggcctggcatggtggcccacgtctgtaatctcaacactttgggaggccgaggcaggaggattgcttgaactcaggagtttgagaccagcctgggcaacatggcgagaccctgtctctactaaaaacacaaaaaaaatactttgggaggccgaggcgggcggatcacgaggtcaggagattgagaccatcccggctaacacggtgaaaccccgtctctaccaaaaatacaaaaaattagccgggtgtgttagcgggcgcctgtagtcccagctactcgggaggctgaggcaggagaatggcgtgaacccggaaggcggagcttgctgtgagcccagaccgcgccactgcactccagcctgggtgacagagcgagactgtatcaaaaaaagaaaaaaaaaaaatagctgggtgtggtggtgtgcgcctgtggtcccagctactccggaaacaggtgggaggatcgcatgagccccgggggatggaagttgcagtgagctgagttagagatcgcgccactgcactccagcctgggtgacagagccagaccctgtctctaaaaatatatataaaacaacaatagtaaaataataaattggctggacatggtggcacccaccttaagtcccagctactagggaggctggggcaggaggactgcttgagcccaggagttcgaggctgcagtgaactatgatcaggccactgaattccagtctgggcgacacagcaagaccctgtctcaaaaaaaattaaagcagtaaaattcacagagacagaataatggttgctaggggctgaagggagggggaaatggggagtttgtttaatgggagtagtttcagttttgccacatgagaaaagttctggagatgacggacggctgcacaacaatatgaatgtagtcaacactactgaactgtacatttaaaaatggttaggatgataaactttatttttcataaaacccagtttctgcacaaaaagataaaatttatgttatgtgtactttaccacaatttaagaaaaaatttaaattctcatcccaacattaccacgccccccacccttagccaactggtgaatgtttactcatttttcaacgcctagctcaaatgtctcctcttgccacgccatcccttagctgaccacccttgtagttggccattccctcttttatgccaacactgtgccctgcacgtacattatacctcttacagcacttatcaaacctagtaattattgctttacagatccgtttccactactagattacaaacaatttgggggcggggaccttgttttactcatctctgtatcccctagacttagggcttgataagctgaaaagaatcaagaagggcttgattaattaaggctcctctggcttttaaggagaccatactggagggtcatttgcccaaaagaagaggcatcggggtctcctcaggttttagaaatctggtcaaacatccagagctgactcccacaccctactgcgagaagagcgcgagcgcgcgtctcaaaaggctccgcctcaacagttcgggtccccaggaggatccgggggccaccccacctccaccctgggccaggtcggttagctagacccgcccagcggtccagacataccttaggtaatgagcagcctgctctgggctcaaggcctcggcttccggaaaccttcgggatgcctccatgaccctcggattgggttccagttaccccggcgggagtttggagcttggagcttggagcttggagcttggagcttagagtttggagcttgaatttcgctcactcccgccccgcgcatgctctgtgcgccgtggagagggacacagccaaccgacggcctcgcggccggccaatccgcgaccacgcgctgcgacgcctccgcctgagccccgcccatgacggtgggcgcctgcgcctacgcgcgccgggaagcagaaggtgatctctgccttcgagacacggagtgtgctgcctcagtctgtgatccctcgcgtttcaatccaattcaaaccatgctgcagccaattcgttcgcgcgtgcgtgtgccatcattgtgagtggaggagactgcccgatatgatcccagtcattgcggcgacccctggagatctccaacgcctgcgtcccccaaccataccctgccccgcatccacagatatcttcccttccttgatcgccagtacctggcactgaccgtgctttgaattcaaacaccctgggaggcatagtccctgtgatttaaactaacattgaagaagcgaccagacgcggtggttcacgcctgtaatcccagcactttgggagaccggggcgggcggatcacgtgaggtcaggagttcgagaccaacctggctaaaatggtgacaccccgtctctactaaaaatacaaaaaattagccgggcgtggtggcgggcgcccgcagtcccagctactcgggtggctgaggcacgagaatcgcttggacccaggaggtggaggttgcagtgagccgggattgcaccactgcactccagcctgggtggcaaagcgagactccatctcaaaaaaaaaaaaaaaaaaaaaaaaggctgggtgcagtgcctcacgcctgttatcctagccttttgggaggctaaggtgggaggatcacttgcacttaggagttcgagaccagcctgggcaacatggtgagactcccgtctctttaaaaaaaatttttttcttctccacagggcgttatgctgtatttattttcttaaaaagagagagagaaagagagaagggtcttcaagaatctcaaaccctggaggtggaggctgcagtgagccaagatcatgccactgcactccagcctgggtgacagagaaagactccatctcaaaaaaaaaaaaaaaattaaagttcttatttaagaaataagtaactaggttcacatacttggtataataaaaggaagacaaaaataatttaaaaaaaaagaagtagtgctgtggtcatcatttcttcagaagcaccaactaagatacagtcattttcaaatgcagagcctaaaaagaaggcagagcctagagcttaaggaaatgtgattgagtttaagtggcttgcttgggtgacactaaataggaggttgtgggccaacaaaaattgtccttgttcatatactgttaagaacacagacatgactcctcaagacactaatttagcattcagtattggaaaactcacctattggcccagtcatacatcatatgtccagagaattttaagcttttcataaaatttatagaccgttatgagttaaaaggaatgttggaggccgggttcagtggctcactgaacctgtaatcccagcactttgggaggccgaggcgggcggatcacctgaggtcaggagttcaagaccagcctggccaaatggtgaaacccccgtctctacaaaaattagctgggcatggtggcgggtgcctgtaatcccagcttctcgggaggctggggtggaagaatcgcttgaacccaggaggcagacgttgcagtgagctgagatcgtgccattgcactccagcctgggcgacagagcaagactccatctcaaaaaaaagaaaagggttggggggaggtgggggatcttggagaacatgggctattttcctggtttgtatgactttaaggcctttattaagaggccttttagtatactattatccacatttttcagatgtggaaacaggctcagagagataaattgacttcatctaagcttcctgagctaggaagcagcagagccagaattcaatactagg

SEQ ID NO: 1563520 - DNA, 4001 bp, Homo sapiens
ccgaagaggttgctgaggtcaggagttggagacaagcctggccagcatggtgaaaccctgtctctactaaaaatacaaaaattagccgggcatggtggcacatgcctgtaatcccagctactcgggaggctgaggcaggaaaatcgtttgaacccgggaggtggaggctgcagcgagaagagatcgcgccaccgctctccagcctgggcgacagagtgagtctcaaaaaaaaaacatatatatatatatatatgaatgtacattatttctctcccccacctcccagtgcagttttctgtaatacggttgggactcgctttagggaggtttttcccattaacaacttcgctgttaaataagatagaaaaaggaaacatatgtaaaagcgcccgatggtttgttagctgaatatgactcaattcttctgtttgtgaaacagcagagaacaaccctggaaatctttccttgggaagtccgtccgtgaaaaaaaaaacaaaaaaaaattaaatgccaaaacacctttaaagcgctgtattgaaccacagtatttctgtttatcgtaaaaaggagaggtgaactctcagggagggaactccaaaccacatcggccaagcgcgccctagggaaattcttttttgctctttgccgggcgaaggctaagtacaacgaagccagaaaggtccccttaaccctactctgacctgtccaggtgccccccgccccccattccagcctggccagaaaaggcctgccccttcgtacactacgggtcggtatgaggagggctccgatgaggctagcgaaggaaaggggtcgctggctaccgaaagctcaaaagtccgccccctggttgtaaaagtgcgctccacgtggcagggcggttactagggcgaaaagagtgaggcgctcgccacgcgcgcacaatgtaaatggcgctaaaaaactcgataatcaagacaaataatattttaatgcaatattaaaacgtatcaaaattaatgcaaaaacaacccatggtgagcaaattgccaaaattttaaataaaggcgggatcccaccctgcctcactcgctttaccctagtcccgccccagtcttttacatcctccgcgccccgcccaccacgtcccccaaaaaccaagggcggaggcagcgcccgtgagccccctacgtggcttttagctccggtgaaagggtcccgggatgaactgggcgcctccggggcaagccacttaccgcgccacaacgtcgggatattgagattcatcgaaaaagttctctagctcctgcagctgaaactgcgtgaacgcggtgcggcggcggcgtttcctctctgggggctgtggtccctcagcggtttgtggcccctccgccggctgtggcccctccacggtcgtctggggcggctcctcctgctcttgcttcagctcgagcaggggcggctcctcctgctgttgctccggcttggtcaggggcggctcctcctgctgttgctccggctcgtggccgccgccaccctcacggtcttggtcgtccgaggggacggacccttccgtgccaacgttgttttccgcttctgttccgtactcaggtttggaccgtgtattctcctcgtcctctcctccccttgccatcagcgaggtcacggtaagtttctcatctgggaagggaggaaagcaaaagagacaccagggcgttggagcccacggcgcgtgggctggaggaggcaggggacccgctatggaagagcaactgcgacagccgcgcagcgtctcctccgcttgcctctcccagggaaaaattcctcttttggagttcgcgaaagctcccgtccctgtccaagcactaaccattcacttcctcgatgtcctcgccgactgccaggctgcggtagccaatatcactgtgggtgtacccgcgaagagactccatgcttcaagcgctgtcgataaagctgtgcacttctgcagactctgtgcgtggttccgcggcgatcccggggttggaactggctctgggaccaatggctcgggcgagcgcttttctggcgccgggacctctttctggcgccgtctggcacttgcgcgccctatatagcggtacggtgccttccgcaggttcaaagcgtatgcacacgcgtcggttaaacgccccctattagcattcacagtacatctagttgtgagtgcgacccccgggggacgcattcgtgtccagggcgtacgaaaaatagggcgagcgtgcgcaagcatggtgcaggtagtgaacatgctttgcggggaacagtggccccaaattgctgcttaactaactactcccaacttgagcagagacccagattggaaaaagcggctgggttgtgaaagccgatttgggggcgaggagacgagggggcgagggggcgagggggcgagggggcggggtgagacctcgcaccagcccgtggagaggtattttggcagtgttcctccgcccaaccgtctttaccccgcagcacttgggtggagcgatgccctttgcttcccccacggaaaagaccgagagatggcgttgaggaaagcgcggaaagttcagcagcccaaacatgcgaaagtgaacttgttagtctaccatgcaattgggttctgagcacgactctcccctgctagaaattagtgacaaatggataggactatctagttctgtacagttcgcgccaaagtcaggatagtgataaggtgcaatgattggctagaaggctgcttgctctggatttttgaattcagaacccaccgtgcattccgggagcgggaatttggggctgaatttgaagagcagtccgctgctcaggtgcacgctgcaagaaacccaacgtgctttttgagaaagctccaaggacttaagctttttagtaatgaacttatgtcagagtgcaagtatagaaatctgctaagtgcatagtgcatccaagaatgcttacactacgggggccccgtcttttgatgcgcggcacttgaaacgtctgctgtactaggttcctgcgcttcttattgcagcgcgctttgcagaagcccgttctgcaggctcctaaagcgcgcgtattccccgggtttgtgctgtggacctgggagagttcccgccttccccactaccccttcttcctcctccccctccctttttctagaactatcttcctgaattcttgctccatagtgatgtatcacattaaaagtcctgggctatgattgaaggctgtatggttctccctccaataagtgtttgcaggttctccaggacgtgttaatatccgtaatattataaaaataactctgtagacttagttactagggaggctgaggtgggaggatcgcttgagtccgggaggtcaaggctgcagtgagccatgatcaggatactgcactccagcctggacgacagtagaccctgtctcaaaaaataaaaaaattaaaaaaatttttaaaagcctgctaataattggccctatgcttgccactgtacacgatttatcttactttcgccttgataaccaccattatcatccccccccctttttttttttttgagacggagtctcgctctgtcgcccaggctggagtgcagtggcgcgatctcggctcactgcaagctctgcctcccgggttcacgccattctcctgcctcagcctcccgagtagctgggacgacaggcgtccgccaccgcgcccggctaattttttgtatttttagtagagacggggtttcaccgtggtctcgatctcctgacctcgtgatctgcccgccttggcctcccaaagtgctgggattacaggcgtgagccaccgcgcccggcctatcatcccccattttttaaaaaaaatacagaagactggggcccaaagagccaggcaacttgccaatggcaatacaagccagttttaactacaaaatgtgtgcatttttcactatattacggctgtcttaattcaaaggagtaaataatagtgggatttcaggtaagagtag

SEQ ID NO: 1563521 - DNA, 4001 bp, Homo sapiens
aacaagcatttaaaaagatgctcaacttattagaaataaaaataacacaatgaaagtaatgatgcaatatcactctacacctgtaaaattggcaaattttaaaaacaggataaaacttatcgctatgtgaatgcagagagaaggccattttcatacttcgatggtagaaatgtttgaaaagttctgacctctttggaaattaaaacttagaaggaaacattcccttcgttccattaatattcctcttgcaagtttgttcaacagaagtaaaagcaccagtatgtaatgatataggatatagtagccaaaaactggaataaagtgaacatattgactaaattgtgatacagccataccatagaatcttatatagccaataaaaataatgaattaaagctataccaattgacttagagttctagtacgtgttaatgagtgagaaatgtgtgtataatgtcccaattttataaaacaaataatgtccaagaaaacctttgtgtgtgtgtatgtgtatgtgaatatatattatcatactggggttacctagctgaggtgggggagaaggggactgatgtggaaagagggtggggagccaaacagaaagaaccaaaaagaatataaagtatgtacaacatgaccacatttaatgtttacacagccacaatctatgtattatatttaaatctttataatacacatttaaagaagacaaaaaaataaaataaatgatttcagcattcaactcaagaagcaaaaatctaacaacaaaatgaaccaaaggaaattagaaggaaggaataaatcaatgaaagtagaagcagaaactgatgcaacagaaagaaaaaagagattgataaatcaaaccaaaagaaaattcttgacaagaccaataaaatcaagaaaactcctggaaatattatttttaaaagagaggaagagaacatatacaacataaggaatgaaaaagaaaatataactacagacacagaacagtttaacaaaatcacaggagactcttacataacttgataccaatacattatcaaatctagggacagtagattgctttctatgaaagtatagaccaaaatataccaatatttactgaagaagaggtagaaaaatctgaatcaactgatgaccatagacaatattgataaagttatttaatactctgcctaaatgcaccagaacccccaaaacacgaaaagcttctgaactcaaggctcatattatccttacacccaaagtaggaaaagatattataaaaacacacattgcatgtacacacaagagaaccagacatgaaacttgtgtgtgatattgattggatttcattgccttgattctctctatggaagcttgggcaggcagagggaagttttgtctttgtcccttcaccctccctctactccagtctctagattctggaggagcagcatatgacgaagagaagcaatggacaaaacagaacaaaatatcaacaaataggtcagacctatgaaaagaattggcagttagcatttctgctaataacacagatgtgtgcacaccttacccagaaatgtttctttggggcccaggtagcatcacaaccatcctaacccgatgtctgcaccttcctccaagcagacttacatccccacaatcctggccccgatcagaccctacaggacatgcctttaccttgcgtccacaggcagctcaccgagatcactttgcatatagtcccatgacagttccactgcacccaggtagtatcttctggtggcactaaagcagaatcgcaaaaggcacagaaagaagcaggtggagagctctatttgcatgacttattgctacaaatgttcaactggagaagcaaaaggttaattcttctctaaaatatctttagctcccaggaggggaaaaaagtaaaatttctgatttaatgaaaagtcccaatttctttgcagagcattttaaggaactttacccactggatgtgctcagcactaagcagtaaccgataggattgcttcctttttatcagtgggaagcagccacaggaagaactgaagtagcaaaagggaggctgctaaacttaacccattcacttctgagagcagtaggggcataagtctgctttaatcagaacctttaaggaaaggaggagagggatggagaagtcaaagtgaacaggagctttaatttgtgctcctattcctagcctactccaaccctcttcctgagtggcagcagcaagagaagttctggatgttgtcgaagattctagaattcacttgcactagcaagagtaaccagcaacctgttagtctctctgcttttgcccttgcccctcacactgctgccagtatgaggaatttatagtttttaaaactgtagttttacatataacatgaggttaggcaactattgttttaaaaactataatttatagttataatttaaaactataaagcgagtcctgtcactcctcttctcagaatcctccaatggcttctgacctccatcagggtaaaaccctacatctttaccatggcctaggtcctagagcatcccacatggtctgcatgccctttctcctgacctctgtagtctcatctcactctggttatactggtctccttactcttccctaaaatatcaagcacactcatgcccctggacctcaacacttgctatttcttttacccaaaacacctttcccccagatttccacgtagttccactcccacaactccttcacatttcagctccaatcttccctgttgaatgaggtttaaatatggaacaccacatttatgttgtaagctctttacccccacctgcatcactgatatccctcttggcttcatttttctcaatagcactcataaccacctggcatttattcatttatttattttgttttgtttttaacctaacacttttccaggctgtttacatttggcccaggtataggatatatctctttacatcagaatgtagccatggtgagctcaaacaccctactcaggttaatgtttattagggagagtgagggcccctgcaggggcctcaaagtgtaagagattatgagaagaaacttgatcagggttgctataaaaatgttatcattgagctcagttctgcacaaacaagaatgtgttagggagcaattggtatattgtcgactggtttggaaacaggcagcaagaagcccctttgataaacactcctctctgacaggtacaaggatgcagagatgacagctgacactatatgccaggaactgttctaggtgcttttaaatacaggtactattcttaccttcattttatgggtgatgaaactgaagcacggagaggttaggcaacttctccatggccacacagcttgtgagtggtagcattcaaacccatgtactctggctccagaagtcatgctcctaaccactatgctatacttctatgcctcagaaatgaagaaatcccagttcccaaccccctgggaatgacagtccaatggaggagacagaaaagtagacagttacagtacagggtgataaattcactgccaggtgctacacataggctatctgatttaatcctcatgacaacaccgcaaagtggatacagataaagtaactgaggtacagagaggttaaatggcttgcctacagccacataactacccatttgtcctagacagatattgtcctaggcactgggtacacattgatgaaaaatataagcaactgaaagagggatgataagcaataattacaatacatgagtacattatacagtatgttagaaggtaaaataagtgctgtgcaaaaaagagaagtggggtaagggggagtaagggtggaccaggttgcaattttaaaggaggttagtcatggaaagtttcactaaggttgcatttcagcaaagggacattgacttctacactgagggcaatggggagacacggccgggttgtgagtagaggagggtggtgatcagaattatctt

SEQ ID NO: 1563522 - DNA, 4001 bp, Homo sapiens
catggatgcaccctgatgaaaccattacgctaagtgaaagcagccagacacacacggcctcacatttggtcgtataattccatctataggaaatctccagaacaggctaacctctatggacagaaagcagatggactaggggttgccagggactatcgggaacgtgtgtatgggcgggggcagggggtgtgtgtgggagggtgtgggggctggtagtggtggtgtggaaggaggcgtgcggcaagtgactgcttataggtacaggggtttcggtttcttttcggggtgttgaaaacgttttggaactaggtggtcgtgatggatgtgcaacattgtgaaggcgtggtacccgtcctcccctcgcccacccctttgtctttcccacggtgttcccatccagtagaaagggaaagttcccactggcaaagagagggtcaccagcgcgattccccctgccccgccccaccccacccccacggccctccagccacttctaggcccaggcctgctccctcgaggccaatgggaaagtgatgaggtcacctgacggacgtgtgtcccttgtgaggggccgtcaccacatgcgtgcccgtcgccggatgtgcgtgcccattggtctcggctccctagccaatgaggggctgggccctggtcgctaggatacacagtactggacgcggtaactgtcctcttgagagccatcttgcctagctgggccaagccgagatagcacactcaacgcccagcatgccgaggaggaggagacgccgagggtcctccggtgctggcggccgggggcggacctgctctcgcaccgtccgagcggagctttcgttttcagtgagccaggtggagcgcagtctacgggagggccactacgctcagcgcctgagtcgcacggcgccggtctacctcgctgcggttattgagtacctgacggccaaggtcccggagctggcgggcaacgaggcccagaacagcggagagcggaacatcactcccctgctgctggacatggtggttcacaacgacaggctactgagcacccttttcaacacgaccaccatctctcaagtggcccctggcgaggactagcttctgacacccggcccctgggacctgacaggtccactcgtccacccacccggccccaaatcccccggcctgaacccccggccttaaacaccctccccccacaacccaggccccaaagtcttgggccttcattaattctgtcaataaaatgtttcaaggaagccatctgcccgcttcagtcactttgccttggggtgggggtgggggggcggtgagatgggttggggggttgtgagacctccacagctggagggatggagaggtggtgggggtctggggttgggtgggagccagggatggcacagaggagcagtctctccgggtgacagtgcaggggagtggccctgggtgggaaggggacacccccgctggttctgagcaagtcagggcctgcccgggaaagtcctcagcatgatggtgttcgttggggcgggtgggcctcaagaccatgactgcagtgttgcgacaggacggacttctaaggcaaccggggtggggacggagaggtggacccggtgcttggcaaggggccctggaccggaagacggaggactgagtagtcggggcggggggggggggggacaacagtctagaaatgcgcagacatggaattagggtcacgagtttcgtttgggtcatgttcagatggagaggctgtgggatgcctttagcaacctagaccacttgcattgcagccgagctagcagcagctggtgccccgccaggccccgcgtaccttcccagggtcttggatccgcatccccgagaccctcgatttgcatacgccgctcacagcccggccaggccccgcctccgatcccgctctttgcacctcatcagggcaaggggcaggctcgggctggggagccggcgcgggcacggcggcagcccgccgagggggacgcagggcacgtcgccccgccccggcccgcccgccagctgcggcggcgcgtcgggaagtgcttggggcggcgagcatggcggcagcggctgcaggcctgggcggcggcggcgccggcccgggacccgaggccggggacttcctggcccgctaccggctggtatcgaacaagctgaagaagcggttcctgcggaagccgaacgtggcggaggccggcgagcagttcggacagctgggccgggagctgcgcgcccaggagtgtctgccctacgcggcctggtgccagctggcggtggcgcgctgccagcaggcgctcttccacgggcccggggaggcgctggccctcaccgaggccgcccgcctcttcctgcggcaggagcgcgacgcgcgccagcgcctggtctgccccgccgcctacggggagccgctgcaggccgccgccagcgccctgggcgccgcggtgcgtctgcacctcgagctgggccagccggccgccgccgccgccctctgcctcgagctggccgccgccctgcgcgacctgggccagccggccgccgccgccggtcacttccagcgcgccgcccagctccagctgccccagctgcccctggccgcgctgcaggcgcttggcgaggccgcctcctgccagctgctggcgcgcgactacaccggcgccctggcggtcttcacgcgcatgcagcgcctggcgcgggagcacggcagccacccggtgcagtcactgccgccgcccccgccgccggcaccccagcccgggcccggggcgacgcccgccctaccggccgcgctgcttcctccgaactccggctcggcggcgccctctcccgccgccctgggcgccttctcggacgtgctggtccgctgcgaggtgtcccgcgtgctgctgctgctcctcctgcaaccaccgcccgccaagctgctgccggagcacgcccagaccctggagaagtactcctgggaggcttttgacagccacgggcaggagagcagcggccagcttcccgaggagctctttctgctgctccagtctttggtcatggctacccacgaaaaggacacggaagccatcaagtcgctgcaggtggagatgtggccactgttgactgctgagcagaaccacctccttcacctcgttctgcaagaaaccatctccccctcaggacagggagtctgatccatcccattcacccagtgacttctttttgcccaggcctggactttttgcatcagtcacgttaaccagatgactttgcctgttaccaaacctcatgcatccacgtttgcgtctggggaggaataaaaagacatcgttcccgcttctgcgttttgttattcctactgccgccataggaattatttcgttggctgaacgttaccagcaccccgagaacacattttgatagaatcagagtagaggacatggctgtcttctaaaaagccacgacatgaaaatgacaatccctttcgtctccttcctccgctgcttccacctaacgcagcctcctgcctccgcctttgtttcatagtgaggattttattttgcacggcgccctccctctaaatacctaccctagatgatttcatcctgcccctcacttcttaacatattcctgtgtctttgtaatggccaaatttctccttccactcgtccgcacggtacgtcttcatgggagtcattttattccttacagcttccttgtaaccacagccctaaatccatgataaagctactcttgtactcctcatgtgtggttttggtgtccgtcgtctataaaatgtgactctcttacctacttgtcaggaggccagcagcagaaccagatagctgtttgggctccaggatgtattcgttcctttgaaatttgcgctatgcctcctatgtgggcaacgaacctgcagagatcatctatgatgtgctccgtactcgggtgactgcaatgcagatacatccagtgcagcgggtctggtgccgatgcatcgatttgca

SEQ ID NO: 1563523 - DNA, 4001 bp, Homo sapiens
tgttgtgatccagactgcatatacctctgcgaatggaaccagaaccgtgaattccaatgcaaatcgatgcatcggcaccagacccgctgcactggatgtatctgcattgcagtcacccgagtacggagcacatcatagatgatctctgcaggttcgttgcccacataggaggcatagcgcaaatttcaaaggaacgaatacatcctggagcccaaacagctatctggttctgctgctggcctcctgacaagtaggtaagagagtcacattttatagacgacggacaccaaaaccacacatgaggagtacaagagtagctttatcatggatttagggctgtggttacaaggaagctgtaaggaataaaatgactcccatgaagacgtaccgtgcggacgagtggaaggagaaatttggccattacaaagacacaggaatatgttaagaagtgaggggcaggatgaaatcatctagggtaggtatttagagggagggcgccgtgcaaaataaaatcctcactatgaaacaaaggcggaggcaggaggctgcgttaggtggaagcagcggaggaaggagacgaaagggattgtcattttcatgtcgtggctttttagaagacagccatgtcctctactctgattctatcaaaatgtgttctcggggtgctggtaacgttcagccaacgaaataattcctatggcggcagtaggaataacaaaacgcagaagcgggaacgatgtctttttattcctccccagacgcaaacgtggatgcatgaggtttggtaacaggcaaagtcatctggttaacgtgactgatgcaaaaagtccaggcctgggcaaaaagaagtcactgggtgaatgggatggatcagactccctgtcctgagggggagatggtttcttgcagaacgaggtgaaggaggtggttctgctcagcagtcaacagtggccacatctccacctgcagcgacttgatggcttccgtgtccttttcgtgggtagccatgaccaaagactggagcagcagaaagagctcctcgggaagctggccgctgctctcctgcccgtggctgtcaaaagcctcccaggagtacttctccagggtctgggcgtgctccggcagcagcttggcgggcggtggttgcaggaggagcagcagcagcacgcgggacacctcgcagcggaccagcacgtccgagaaggcgcccagggcggcgggagagggcgccgccgagccggagttcggaggaagcagcgcggccggtagggcgggcgtcgccccgggcccgggctggggtgccggcggcgggggcggcggcagtgactgcaccgggtggctgccgtgctcccgcgccaggcgctgcatgcgcgtgaagaccgccagggcgccggtgtagtcgcgcgccagcagctggcaggaggcggcctcgccaagcgcctgcagcgcggccaggggcagctggggcagctggagctgggcggcgcgctggaagtgaccggcggcggcggccggctggcccaggtcgcgcagggcggcggccagctcgaggcagagggcggcggcggcggccggctggcccagctcgaggtgcagacgcaccgcggcgcccagggcgctggcggcggcctgcagcggctccccgtaggcggcggggcagaccaggcgctggcgcgcgtcgcgctcctgccgcaggaagaggcgggcggcctcggtgagggccagcgcctccccgggcccgtggaagagcgcctgctggcagcgcgccaccgccagctggcaccaggccgcgtagggcagacactcctgggcgcgcagctcccggcccagctgtccgaactgctcgccggcctccgccacgttcggcttccgcaggaaccgcttcttcagcttgttcgataccagccggtagcgggccaggaagtccccggcctcgggtcccgggccggcgccgccgccgcccaggcctgcagccgctgccgccatgctcgccgccccaagcacttcccgacgcgccgccgcagctggcgggcgggccggggcggggcgacgtgccctgcgtccccctcggcgggctgccgccgtgcccgcgccggctccccagcccgagcctgccccttgccctgatgaggtgcaaagagcgggatcggaggcggggcctggccgggctgtgagcggcgtatgcaaatcgagggtctcggggatgcggatccaagaccctgggaaggtacgcggggcctggcggggcaccagctgctgctagctcggctgcaatgcaagtggtctaggttgctaaaggcatcccacagcctctccatctgaacatgacccaaacgaaactcgtgaccctaattccatgtctgcgcatttctagactgttgtccccccccccccccgccccgactactcagtcctccgtcttccggtccagggccccttgccaagcaccgggtccacctctccgtccccaccccggttgccttagaagtccgtcctgtcgcaacactgcagtcatggtcttgaggcccacccgccccaacgaacaccatcatgctgaggactttcccgggcaggccctgacttgctcagaaccagcgggggtgtccccttcccacccagggccactcccctgcactgtcacccggagagactgctcctctgtgccatccctggctcccacccaaccccagacccccaccacctctccatccctccagctgtggaggtctcacaaccccccaacccatctcaccgcccccccacccccaccccaaggcaaagtgactgaagcgggcagatggcttccttgaaacattttattgacagaattaatgaaggcccaagactttggggcctgggttgtggggggagggtgtttaaggccgggggttcaggccgggggatttggggccgggtgggtggacgagtggacctgtcaggtcccaggggccgggtgtcagaagctagtcctcgccaggggccacttgagagatggtggtcgtgttgaaaagggtgctcagtagcctgtcgttgtgaaccaccatgtccagcagcaggggagtgatgttccgctctccgctgttctgggcctcgttgcccgccagctccgggaccttggccgtcaggtactcaataaccgcagcgaggtagaccggcgccgtgcgactcaggcgctgagcgtagtggccctcccgtagactgcgctccacctggctcactgaaaacgaaagctccgctcggacggtgcgagagcaggtccgcccccggccgccagcaccggaggaccctcggcgtctcctcctcctcggcatgctgggcgttgagtgtgctatctcggcttggcccagctaggcaagatggctctcaagaggacagttaccgcgtccagtactgtgtatcctagcgaccagggcccagcccctcattggctagggagccgagaccaatgggcacgcacatccggcgacgggcacgcatgtggtgacggcccctcacaagggacacacgtccgtcaggtgacctcatcactttcccattggcctcgagggagcaggcctgggcctagaagtggctggagggccgtgggggtggggtggggcggggcagggggaatcgcgctggtgaccctctctttgccagtgggaactttccctttctactggatgggaacaccgtgggaaagacaaaggggtgggcgaggggaggacgggtaccacgccttcacaatgttgcacatccatcacgaccacctagttccaaaacgttttcaacaccccgaaaagaaaccgaaacccctgtacctataagcagtcacttgccgcacgcctccttccacaccaccactaccagcccccacaccctcccacacacaccccctgcccccgcccatacacacgttcccgatagtccctggcaacccctagtccatctgctttctgtccatagaggttagcctgttctggagatttcctatagatggaattatacgaccaaatgtgagg

SEQ ID NO: 1563524 - DNA, 4001 bp, Homo sapiens
tgttgtgatccagactgcatatacctctgcgaatggaaccagaaccgtgaattccaatgcaaatcgatgcatcggcaccagacccgctgcactggatgtatctgcattgcagtcacccgagtacggagcacatcatagatgatctctgcaggttcgttgcccacataggaggcatagcgcaaatttcaaaggaacgaatacatcctggagcccaaacagctatctggttctgctgctggcctcctgacaagtaggtaagagagtcacattttatagacgacggacaccaaaaccacacatgaggagtacaagagtagctttatcatggatttagggctgtggttacaaggaagctgtaaggaataaaatgactcccatgaagacgtaccgtgcggacgagtggaaggagaaatttggccattacaaagacacaggaatatgttaagaagtgaggggcaggatgaaatcatctagggtaggtatttagagggagggcgccgtgcaaaataaaatcctcactatgaaacaaaggcggaggcaggaggctgcgttgggtggaagcagcggaggaaggagacgaaagggattgtcattttcatgtcgtggctttttagaagacagccatgtcctctactctgattctatcaaaatgtgttctcggggtgctggtaacgttcagccaacgaaataattcctatggcggcagtaggaataacaaaacgcagaagcgggaacgatgtctttttattcctccccagacgcaaacgtggatgcatgaggtttggtaacaggcaaagtcatctggttaacgtgactgatgcaaaaagtcccggcctgggcaaaaagaagtcactgggtgaatgggatggatcagactccctgtcctgagggggagatggtttcttgcagaacgaggtgaaggaggtggttctgctcagcagtcaacagtggccacatctccacctgcagcgacttgatggcttccgtgtccttttcgtgggtagccatgaccaaagactggagcagcagaaagagctcctcgggaagctggccgctgctctcctgcccgtggctgtcaaaagcctcccaggagtacttctccagggtctgggcgtgctccggcagcagcttggcgggcggtggttgcaggaggagcagcagcagcacgcgggacacctcgcagcggaccagcacgtccgagaaggcgcccagggcggcgggagagggcgccgccgagccggagttcggaggaagcagcgcggccggtagggcgggcgtcgccccgggcccgggctggggtgccggcggcgggggcggcggcagtgactgcaccgggtggctgccgtgctcccgcgccaggcgctgcatgcgcgtgaagaccgccagggcgccggtgtagtcgcgcgccagcagctggcaggaggcggcctcgccaagcgcctgcagcgcggccaggggcagctggggcagctggagctgggcggcgcgctggaagtgaccggcggcggcggccggctggcccaggtcgcgcagggcggcggccagctcgaggcagagggcggcggcggcggccggctggcccagctcgaggtgcagacgcaccgcggcgcccagggcgctggcggcggcctgcagcggctccccgtaggcggcggggcagaccaggcgctggcgcgcgtcgcgctcctgccgcaggaagaggcgggcggcctcggtgagggccagcgcctccccgggcccgtggaagagcgcctgctggcagcgcgccaccgccagctggcaccaggccgcgtagggcagacactcctgggcgcgcagctcccggcccagctgtccgaactgctcgccggcctccgccacgttcggcttccgcaggaaccgcttcttcagcttgttcgataccagccggtagcgggccaggaagtccccggcctcgggtcccgggccggcgccgccgccgcccaggcctgcagccgctgccgccatgctcgccgccccaagcacttcccgacgcgccgccgcagctggcgggcgggccggggcggggcgacgtgccctgcgtccccctcggcgggctgccgccgtgcccgcgccggctccccagcccgagcctgccccttgccctggtgaggtgcaaagagcgggatcggaggcggggcctggccgggctgtgagcggcgtatgcaaatcgagggtctcggggatgcggatccaagaccctgggaaggtacgcggggcctggcggggcaccagctgctgctagctcggctgcaatgcaagtggtctaggttgctaaaggcatcccacagcctctccatctgaacatgacccaaaggaaactcgtgaccctaattccatgtctgcgcatttctggactgttgtcccccccccccccccccgccccgactactcagtcctccgtcttccggtccagggccccttgccaagcaccgggtccacctctccgtccccaccccggttgccttagaagtccgtcctgtcgcaacactgcagtcatggtcttgaggcccacccgccccaacgaacaccatcatgctgaggactttcccgggcaggccctgacttgctcagaaccagcgggggtgtccccttcccacccagggccactcccctgcactgtcacccggagagacggctcctctgtgccatccctggctcccacccaaccccagacccccaccacctctccatccctccagctgtggaggtctcacaaccccccaacccatctcaccgcccccccacccccaccccaaggcaaagtgactgaagcgggcagatggcttccttgaaacattttattgacagaattaatgaaggcccaagactttggggcctgggttgtggggggagggtgtttaaggccgggggttcaggccgggggatttggggccgggtgggtggacgagtggacctgtcaggtcccaggggccgggtgtcagaagctagtcctcgccaggggccacttgagagatggtggtcgtgttgaaaagggtgctcagtagcctgtcgttgtgaaccaccatgtccagcagcaggggagtgatgttccgctctccgctgttctgggcctcgttgcccgccagctccaggaccttggccgtcaggtactcaataaccgcagcgaggtagaccggcgccgtgcgactcaggcgctgagcgtagtggccctcccgtagactgcgctccacctggctcactgaaaacgaaagctccgctcggacggtgcgagagcaggtccgcccccggccgccagcaccggaggaccctcggcgtctcctcctcctcggcatgctgggcgttgagtgtgctatctcggcttggcccagctaggcaagatggctctcaagaggacagttaccgcgtccagtactgtgtatcctagcgaccagggcccagcccctcattggctagggagccgagaccaatgggcacgcacatccggcgacgggcacgcatgtggtgacggcccctcacaagggacacacgtccgtcaggtgacctcatcactttcccattggcctcgagggagcaggcctgggcctagaagtggctggagggccgtgggggtggggtggggcggggcagggggaatcgcgctggtgaccctctctttgccagtgggaactttccctttctactggatgggaacaccgtgggaaagacaaaggggtgggcgaggggaggacgggtaccacgccttcacaatgttgcacatccatcacgaccacctagttccaaaacgttttcaacaccccgaaaagaaaccgaaacccctgtacctataagcagtcacttgccgcacgcctccttccacaccaccactaccagcccccacaccctcccacacacaccccctgcccccgcccatacacacgttcccgatagtccctggcaacccctagtccatctgctttctgtccatagaggttagcctgttctggagatttcctatagatggaattatacgaccaaatgtg

SEQ ID NO: 1563525 - DNA, 4001 bp, Homo sapiens
gttgtgatccagactgcatatacctctgcgaatggaaccagaaccgtgaattccaatgcaaatcgatgcatcggcaccagacccgctgcactggatgtatctgcattgcagtcacccgagtacggagcacatcatagatgatctctgcaggttcgttgcccacataggaggcatagcgcaaatttcaaaggaacgaatacatcctggagcccaaacagctatctggttctgctgctggcctcctgacaagtaggtaagagagtcacattttatagacgacggacaccaaaaccacacatgaggagtacaagagtagctttatcatggatttagggctgtggttacaaggaagctgtaaggaataaaatgactcccatgaagacgtaccgtgcggacgagtggaaggagaaatttggccattacaaagacacaggaatatgttaagaagtgaggggcaggatgaaatcatctagggtaggtatttagagggagggcgccgtgcaaaataaaatcctcactatgaaacaaaggcggaggcaggaggctgcgttgggtggaagcagcggaggaaggagacgaaagggattgtcattttcatgtcgtggctttttagaagacagccatgtcctctactctgattctatcaaaatgtgttctcggggtgctggtaacgttcagccaacgaaataattcctatggcggcagtaggaataacaaaacgcagaagcgggaacgatgtctttttattcctccccagacgcaaacgtggatgcatgaggtttggtaacaggcaaagtcatctggttaacgtgactgatgcaaaaagtcccggcctgggcaaaaagaagtcactgggtgaatgggatggatcagactccctgtcctgagggggagatggtttcttgcagaacgaggtgaaggaggtggttctgctcagcagtcaacagtggccacatctccacctgcagcgacttgatggcttccgtgtccttttcgtgggtagccatgaccaaagactggagcagcagaaagagctcctcgggaagctggccgctgctctcctgcccgtggctgtcaaaagcctcccaggagtacttctccagggtctgggcgtgctccggcagcagcttggcgggcggtggttgcaggaggagcagcagcagcacgcgggacacctcgcagcggaccagcacgtccgagaaggcgcccagggcggcgggagagggcgccgccgagccggagttcggaggaagcagcgcggccggtagggcgggcgtcgccccgggcccgggctggggtgccggcggcgggggcggcggcagtgactgcaccgggtggctgccgtgctcccgcgccaggcgctgcatgcgcgtgaagaccgccagggcgccggtgtagtcgcgcgccagcagctggcaggaggcggcctcgccaagcgcctgcagcgcggccaggggcagctggggcagctggagctgggcggcgcgctggaagtgaccggcggcggcggccggctggcccaggtcgcgcagggcggcggccagctcgaggcagagggcggcggcggcggccggctggcccagctcgaggtgcagacgcaccgcggcgcccagggcgctggcggcggcctgcagcggctccccgtaggcggcggggcagaccaggcgctggcgcgcgtcgcgctcctgccgcaggaagaggcgggcggcctcggtgagggccagcgcctccccgggcccgtggaagagcgcctgctggcagcgcgccaccgccagctggcaccaggccgcgtagggcagacactcctgggcgcgcagctcccggcccagctgtccgaactgctcgccggcctccgccacgttcggcttccgcaggaaccgcttcttcagcttgttcgataccagccggtagcgggccaggaagtccccggcctcgggtcccgggccggcgccgccgccgcccaggcctgcagccgctgccgccatgctcgccgccccaagcacttcccgacgcgccgccgcagctggcgggcgggccggggcggggcgacgtgccctgcgtccccctcggcgggctgccgccgtgcccgcgccggctccccagcccgagcctgccccttgccctggtgaggtgcaaagagcgggatcggaggcggggcctggccgggctgtgagcggcgtatgcaaatcgagggtctcggggatgcggatccaagaccctgggaaggtacgcggggcctggcggggcaccagctgctgctagctcggctgcaatgcaagtggtctaggttgctaaaggcatcccacagcctctccatctgaacatgacccaaaggaaactcgtgaccctaattccatgtctgcgcatttctggactgttgtccccccccccccccccgccccgactactcagtcctccgtcttccggtccagggccccttgccaagcaccgggtccacctctccgtccccaccccggttgccttagaagtccgtcctgtcgcaacactgcagtcatggtcttgaggcccacccgccccaacgaacaccatcatgctgaggactttcccgggcaggccctgacttgctcagaaccagcgggggtgtccccttcccacccagggccactcccctgcactgtcacccggagagacggctcctctgtgccatccctggctcccacccaaccccagacccccaccacctctccatccctccagctgtggaggtctcacaaccccccaacccatctcaccgcccccccacccccaccccaaggcaaagtgactgaagcgggcagatggcttccttgaaacattttattgacagaattaatgaaggcccaagactttggggcctgggttgtggggggagggtgtttaaggccgggggttcaggccgggggatttggggccgggtgggtggacgagtggacctgtcaggtcccaggggccgggtgtcagaagctagtcctcgccaggggccacttgagagatggtggtcgtgttgaaaagggtgctcagtagcctgtcgttgtgaaccaccatgtccagcagcaggggagtgatgttccgctctccgctgttctgggcctcgttgcccgccagctccaggaccttggccgtcaggtactcaataaccgcagcgaggtagaccggcgccgtgcgactcaggcgctgagcgtagtggccctcccgtagactgcgctccacctggctcactgaaaacgaaagctccgctcggacggtgcgagagcaggtccgcccccggccgccagcaccggaggaccctcggcgtctcctcctcctcggcatgctgggcgttgagtgtgctatctcggcttggcccagctaggcaagatggctctcaagaggacagttaccgcgtccagtactgtgtatcctagcgaccagggcccagcccctcattggctagggagccgagaccaatgggcacgcacatccggcgacgggcacgcatgtggtgacggcccctcacaagggacacacgtccgtcaggtgacctcatcactttcccattggcctcgagggagcaggcctgggcctagaagtggctggagggccgtgggggtggggtggggcggggcagggggaatcgcgctggtgaccctctctttgccagtgggaactttccctttctactggatgggaacaccgtgggaaagacaaaggggtgggcgaggggaggacgggtaccacgccttcacaatgttgcacatccatcacgaccacctagttccaaaacgttttcaacaccccgaaaagaaaccgaaacccctgtacctataagcagtcacttgccgcacgcctccttccacaccaccactaccagcccccacaccctcccacacacaccccctgcccccgcccatacacacgttcccgatagtccctggcaacccctagtccatctgctttctgtccatagaggttagcctgttctggagatttcctatagatggaattatacgaccaaatgtgag

SEQ ID NO: 1563526 - DNA, 4001 bp, Homo sapiens
attacaaataaaagctgttgtgatccagactgcatatacctctgcgaatggaaccagaaccgtgaattccaatgcaaatcgatgcatcggcaccagacccgctgcactggatgtatctgcattgcagtcacccgagtacggagcacatcatagatgatctctgcaggttcgttgcccacataggaggcatagcgcaaatttcaaaggaacgaatacatcctggagcccaaacagctatctggttctgctgctggcctcctgacaagtaggtaagagagtcacattttatagacgacggacaccaaaaccacacatgaggagtacaagagtagctttatcatggatttagggctgtggttacaaggaagctgtaaggaataaaatgactcccatgaagacgtaccgtgcggacgagtggaaggagaaatttggccattacaaagacacaggaatatgttaagaagtgaggggcaggatgaaatcatctagggtaggtatttagagggagggcgccgtgcaaaataaaatcctcactatgaaacaaaggcggaggcaggaggctgcgttaggtggaagcagcggaggaaggagacgaaagggattgtcattttcatgtcgtggctttttagaagacagccatgtcctctactctgattctatcaaaatgtgttctcggggtgctggtaacgttcagccaacgaaataattcctatggcggcagtaggaataacaaaacgcagaagcgggaacgatgtctttttattcctccccagacgcaaacgtggatgcatgaggtttggtaacaggcaaagtcatctggttaacgtgactgatgcaaaaagtccaggcctgggcaaaaagaagtcactgggtgaatgggatggatcagactccctgtcctgagggggagatggtttcttgcagaacgaggtgaaggaggtggttctgctcagcagtcaacagtggccacatctccacctgcagcgacttgatggcttccgtgtccttttcgtgggtagccatgaccaaagactggagcagcagaaagagctcctcgggaagctggccgctgctctcctgcccgtggctgtcaaaagcctcccaggagtacttctccagggtctgggcgtgctccggcagcagcttggcgggcggtggttgcaggaggagcagcagcagcacgcgggacacctcgcagcggaccagcacgtccgagaaggcgcccagggcggcgggagagggcgccgccgagccggagttcggaggaagcagcgcggccggtagggcgggcgtcgccccgggcccgggctggggtgccggcggcgggggcggcggcagtgactgcaccgggtggctgccgtgctcccgcgccaggcgctgcatgcgcgtgaagaccgccagggcgccggtgtagtcgcgcgccagcagctggcaggaggcggcctcgccaagcgcctgcagcgcggccaggggcagctggggcagctggagctgggcggcgcgctggaagtgaccggcggcggcggccggctggcccaggtcgcgcagggcggcggccagctcgaggcagagggcggcggcggcggccggctggcccagctcgaggtgcagacgcaccgcggcgcccagggcgctggcggcggcctgcagcggctccccgtaggcggcggggcagaccaggcgctggcgcgcgtcgcgctcctgccgcaggaagaggcgggcggcctcggtgagggccagcgcctccccgggcccgtggaagagcgcctgctggcagcgcgccaccgccagctggcaccaggccgcgtagggcagacactcctgggcgcgcagctcccggcccagctgtccgaactgctcgccggcctccgccacgttcggcttccgcaggaaccgcttcttcagcttgttcgataccagccggtagcgggccaggaagtccccggcctcgggtcccgggccggcgccgccgccgcccaggcctgcagccgctgccgccatgctcgccgccccaagcacttcccgacgcgccgccgcagctggcgggcgggccggggcggggcgacgtgccctgcgtccccctcggcgggctgccgccgtgcccgcgccggctccccagcccgagcctgccccttgccctgatgaggtgcaaagagcgggatcggaggcggggcctggccgggctgtgagcggcgtatgcaaatcgagggtctcggggatgcggatccaagaccctgggaaggtacgcggggcctggcggggcaccagctgctgctagctcggctgcaatgcaagtggtctaggttgctaaaggcatcccacagcctctccatctgaacatgacccaaacgaaactcgtgaccctaattccatgtctgcgcatttctagactgttgtccccccccccccccgccccgactactcagtcctccgtcttccggtccagggccccttgccaagcaccgggtccacctctccgtccccaccccggttgccttagaagtccgtcctgtcgcaacactgcagtcatggtcttgaggcccacccgccccaacgaacaccatcatgctgaggactttcccgggcaggccctgacttgctcagaaccagcgggggtgtccccttcccacccagggccactcccctgcactgtcacccggagagactgctcctctgtgccatccctggctcccacccaaccccagacccccaccacctctccatccctccagctgtggaggtctcacaaccccccaacccatctcaccgcccccccacccccaccccaaggcaaagtgactgaagcgggcagatggcttccttgaaacattttattgacagaattaatgaaggcccaagactttggggcctgggttgtggggggagggtgtttaaggccgggggttcaggccgggggatttggggccgggtgggtggacgagtggacctgtcaggtcccaggggccgggtgtcagaagctagtcctcgccaggggccacttgagagatggtggtcgtgttgaaaagggtgctcagtagcctgtcgttgtgaaccaccatgtccagcagcaggggagtgatgttccgctctccgctgttctgggcctcgttgcccgccagctccgggaccttggccgtcaggtactcaataaccgcagcgaggtagaccggcgccgtgcgactcaggcgctgagcgtagtggccctcccgtagactgcgctccacctggctcactgaaaacgaaagctccgctcggacggtgcgagagcaggtccgcccccggccgccagcaccggaggaccctcggcgtctcctcctcctcggcatgctgggcgttgagtgtgctatctcggcttggcccagctaggcaagatggctctcaagaggacagttaccgcgtccagtactgtgtatcctagcgaccagggcccagcccctcattggctagggagccgagaccaatgggcacgcacatccggcgacgggcacgcatgtggtgacggcccctcacaagggacacacgtccgtcaggtgacctcatcactttcccattggcctcgagggagcaggcctgggcctagaagtggctggagggccgtgggggtggggtggggcggggcagggggaatcgcgctggtgaccctctctttgccagtgggaactttccctttctactggatgggaacaccgtgggaaagacaaaggggtgggcgaggggaggacgggtaccacgccttcacaatgttgcacatccatcacgaccacctagttccaaaacgttttcaacaccccgaaaagaaaccgaaacccctgtacctataagcagtcacttgccgcacgcctccttccacaccaccactaccagcccccacaccctcccacacacaccccctgcccccgcccatacacacgttcccgatagtccctggcaacccctagtccatctgctttctgtccatagaggttagcctgttctggagatttcctatagatggaattata

SEQ ID NO: 1563527 - DNA, 4001 bp, Homo sapiens
attacaaataaaagctgttgtgatccagactgcatatacctctgcgaatggaaccagaaccgtgaattccaatgcaaatcgatgcatcggcaccagacccgctgcactggatgtatctgcattgcagtcacccgagtacggagcacatcatagatgatctctgcaggttcgttgcccacataggaggcatagcgcaaatttcaaaggaacgaatacatcctggagcccaaacagctatctggttctgctgctggcctcctgacaagtaggtaagagagtcacattttatagacgacggacaccaaaaccacacatgaggagtacaagagtagctttatcatggatttagggctgtggttacaaggaagctgtaaggaataaaatgactcccatgaagacgtaccgtgcggacgagtggaaggagaaatttggccattacaaagacacaggaatatgttaagaagtgaggggcaggatgaaatcatctagggtaggtatttagagggagggcgccgtgcaaaataaaatcctcactatgaaacaaaggcggaggcaggaggctgcgttgggtggaagcagcggaggaaggagacgaaagggattgtcattttcatgtcgtggctttttagaagacagccatgtcctctactctgattctatcaaaatgtgttctcggggtgctggtaacgttcagccaacgaaataattcctatggcggcagtaggaataacaaaacgcagaagcgggaacgatgtctttttattcctccccagacgcaaacgtggatgcatgaggtttggtaacaggcaaagtcatctggttaacgtgactgatgcaaaaagtcccggcctgggcaaaaagaagtcactgggtgaatgggatggatcagactccctgtcctgagggggagatggtttcttgcagaacgaggtgaaggaggtggttctgctcagcagtcaacagtggccacatctccacctgcagcgacttgatggcttccgtgtccttttcgtgggtagccatgaccaaagactggagcagcagaaagagctcctcgggaagctggccgctgctctcctgcccgtggctgtcaaaagcctcccaggagtacttctccagggtctgggcgtgctccggcagcagcttggcgggcggtggttgcaggaggagcagcagcagcacgcgggacacctcgcagcggaccagcacgtccgagaaggcgcccagggcggcgggagagggcgccgccgagccggagttcggaggaagcagcgcggccggtagggcgggcgtcgccccgggcccgggctggggtgccggcggcgggggcggcggcagtgactgcaccgggtggctgccgtgctcccgcgccaggcgctgcatgcgcgtgaagaccgccagggcgccggtgtagtcgcgcgccagcagctggcaggaggcggcctcgccaagcgcctgcagcgcggccaggggcagctggggcagctggagctgggcggcgcgctggaagtgaccggcggcggcggccggctggcccaggtcgcgcagggcggcggccagctcgaggcagagggcggcggcggcggccggctggcccagctcgaggtgcagacgcaccgcggcgcccagggcgctggcggcggcctgcagcggctccccgtaggcggcggggcagaccaggcgctggcgcgcgtcgcgctcctgccgcaggaagaggcgggcggcctcggtgagggccagcgcctccccgggcccgtggaagagcgcctgctggcagcgcgccaccgccagctggcaccaggccgcgtagggcagacactcctgggcgcgcagctcccggcccagctgtccgaactgctcgccggcctccgccacgttcggcttccgcaggaaccgcttcttcagcttgttcgataccagccggtagcgggccaggaagtccccggcctcgggtcccgggccggcgccgccgccgcccaggcctgcagccgctgccgccatgctcgccgccccaagcacttcccgacgcgccgccgcagctggcgggcgggccggggcggggcgacgtgccctgcgtccccctcggcgggctgccgccgtgcccgcgccggctccccagcccgagcctgccccttgccctggtgaggtgcaaagagcgggatcggaggcggggcctggccgggctgtgagcggcgtatgcaaatcgagggtctcggggatgcggatccaagaccctgggaaggtacgcggggcctggcggggcaccagctgctgctagctcggctgcaatgcaagtggtctaggttgctaaaggcatcccacagcctctccatctgaacatgacccaaaggaaactcgtgaccctaattccatgtctgcgcatttctggactgttgtcccccccccccccccccgccccgactactcagtcctccgtcttccggtccagggccccttgccaagcaccgggtccacctctccgtccccaccccggttgccttagaagtccgtcctgtcgcaacactgcagtcatggtcttgaggcccacccgccccaacgaacaccatcatgctgaggactttcccgggcaggccctgacttgctcagaaccagcgggggtgtccccttcccacccagggccactcccctgcactgtcacccggagagacggctcctctgtgccatccctggctcccacccaaccccagacccccaccacctctccatccctccagctgtggaggtctcacaaccccccaacccatctcaccgcccccccacccccaccccaaggcaaagtgactgaagcgggcagatggcttccttgaaacattttattgacagaattaatgaaggcccaagactttggggcctgggttgtggggggagggtgtttaaggccgggggttcaggccgggggatttggggccgggtgggtggacgagtggacctgtcaggtcccaggggccgggtgtcagaagctagtcctcgccaggggccacttgagagatggtggtcgtgttgaaaagggtgctcagtagcctgtcgttgtgaaccaccatgtccagcagcaggggagtgatgttccgctctccgctgttctgggcctcgttgcccgccagctccaggaccttggccgtcaggtactcaataaccgcagcgaggtagaccggcgccgtgcgactcaggcgctgagcgtagtggccctcccgtagactgcgctccacctggctcactgaaaacgaaagctccgctcggacggtgcgagagcaggtccgcccccggccgccagcaccggaggaccctcggcgtctcctcctcctcggcatgctgggcgttgagtgtgctatctcggcttggcccagctaggcaagatggctctcaagaggacagttaccgcgtccagtactgtgtatcctagcgaccagggcccagcccctcattggctagggagccgagaccaatgggcacgcacatccggcgacgggcacgcatgtggtgacggcccctcacaagggacacacgtccgtcaggtgacctcatcactttcccattggcctcgagggagcaggcctgggcctagaagtggctggagggccgtgggggtggggtggggcggggcagggggaatcgcgctggtgaccctctctttgccagtgggaactttccctttctactggatgggaacaccgtgggaaagacaaaggggtgggcgaggggaggacgggtaccacgccttcacaatgttgcacatccatcacgaccacctagttccaaaacgttttcaacaccccgaaaagaaaccgaaacccctgtacctataagcagtcacttgccgcacgcctccttccacaccaccactaccagcccccacaccctcccacacacaccccctgcccccgcccatacacacgttcccgatagtccctggcaacccctagtccatctgctttctgtccatagaggttagcctgttctggagatttcctatagatggaatt

SEQ ID NO: 1563528 - DNA, 4001 bp, Homo sapiens
ttacaaataaaagctgttgtgatccagactgcatatacctctgcgaatggaaccagaaccgtgaattccaatgcaaatcgatgcatcggcaccagacccgctgcactggatgtatctgcattgcagtcacccgagtacggagcacatcatagatgatctctgcaggttcgttgcccacataggaggcatagcgcaaatttcaaaggaacgaatacatcctggagcccaaacagctatctggttctgctgctggcctcctgacaagtaggtaagagagtcacattttatagacgacggacaccaaaaccacacatgaggagtacaagagtagctttatcatggatttagggctgtggttacaaggaagctgtaaggaataaaatgactcccatgaagacgtaccgtgcggacgagtggaaggagaaatttggccattacaaagacacaggaatatgttaagaagtgaggggcaggatgaaatcatctagggtaggtatttagagggagggcgccgtgcaaaataaaatcctcactatgaaacaaaggcggaggcaggaggctgcgttgggtggaagcagcggaggaaggagacgaaagggattgtcattttcatgtcgtggctttttagaagacagccatgtcctctactctgattctatcaaaatgtgttctcggggtgctggtaacgttcagccaacgaaataattcctatggcggcagtaggaataacaaaacgcagaagcgggaacgatgtctttttattcctccccagacgcaaacgtggatgcatgaggtttggtaacaggcaaagtcatctggttaacgtgactgatgcaaaaagtcccggcctgggcaaaaagaagtcactgggtgaatgggatggatcagactccctgtcctgagggggagatggtttcttgcagaacgaggtgaaggaggtggttctgctcagcagtcaacagtggccacatctccacctgcagcgacttgatggcttccgtgtccttttcgtgggtagccatgaccaaagactggagcagcagaaagagctcctcgggaagctggccgctgctctcctgcccgtggctgtcaaaagcctcccaggagtacttctccagggtctgggcgtgctccggcagcagcttggcgggcggtggttgcaggaggagcagcagcagcacgcgggacacctcgcagcggaccagcacgtccgagaaggcgcccagggcggcgggagagggcgccgccgagccggagttcggaggaagcagcgcggccggtagggcgggcgtcgccccgggcccgggctggggtgccggcggcgggggcggcggcagtgactgcaccgggtggctgccgtgctcccgcgccaggcgctgcatgcgcgtgaagaccgccagggcgccggtgtagtcgcgcgccagcagctggcaggaggcggcctcgccaagcgcctgcagcgcggccaggggcagctggggcagctggagctgggcggcgcgctggaagtgaccggcggcggcggccggctggcccaggtcgcgcagggcggcggccagctcgaggcagagggcggcggcggcggccggctggcccagctcgaggtgcagacgcaccgcggcgcccagggcgctggcggcggcctgcagcggctccccgtaggcggcggggcagaccaggcgctggcgcgcgtcgcgctcctgccgcaggaagaggcgggcggcctcggtgagggccagcgcctccccgggcccgtggaagagcgcctgctggcagcgcgccaccgccagctggcaccaggccgcgtagggcagacactcctgggcgcgcagctcccggcccagctgtccgaactgctcgccggcctccgccacgttcggcttccgcaggaaccgcttcttcagcttgttcgataccagccggtagcgggccaggaagtccccggcctcgggtcccgggccggcgccgccgccgcccaggcctgcagccgctgccgccatgctcgccgccccaagcacttcccgacgcgccgccgcagctggcgggcgggccggggcggggcgacgtgccctgcgtccccctcggcgggctgccgccgtgcccgcgccggctccccagcccgagcctgccccttgccctggtgaggtgcaaagagcgggatcggaggcggggcctggccgggctgtgagcggcgtatgcaaatcgagggtctcggggatgcggatccaagaccctgggaaggtacgcggggcctggcggggcaccagctgctgctagctcggctgcaatgcaagtggtctaggttgctaaaggcatcccacagcctctccatctgaacatgacccaaaggaaactcgtgaccctaattccatgtctgcgcatttctggactgttgtccccccccccccccccgccccgactactcagtcctccgtcttccggtccagggccccttgccaagcaccgggtccacctctccgtccccaccccggttgccttagaagtccgtcctgtcgcaacactgcagtcatggtcttgaggcccacccgccccaacgaacaccatcatgctgaggactttcccgggcaggccctgacttgctcagaaccagcgggggtgtccccttcccacccagggccactcccctgcactgtcacccggagagacggctcctctgtgccatccctggctcccacccaaccccagacccccaccacctctccatccctccagctgtggaggtctcacaaccccccaacccatctcaccgcccccccacccccaccccaaggcaaagtgactgaagcgggcagatggcttccttgaaacattttattgacagaattaatgaaggcccaagactttggggcctgggttgtggggggagggtgtttaaggccgggggttcaggccgggggatttggggccgggtgggtggacgagtggacctgtcaggtcccaggggccgggtgtcagaagctagtcctcgccaggggccacttgagagatggtggtcgtgttgaaaagggtgctcagtagcctgtcgttgtgaaccaccatgtccagcagcaggggagtgatgttccgctctccgctgttctgggcctcgttgcccgccagctccaggaccttggccgtcaggtactcaataaccgcagcgaggtagaccggcgccgtgcgactcaggcgctgagcgtagtggccctcccgtagactgcgctccacctggctcactgaaaacgaaagctccgctcggacggtgcgagagcaggtccgcccccggccgccagcaccggaggaccctcggcgtctcctcctcctcggcatgctgggcgttgagtgtgctatctcggcttggcccagctaggcaagatggctctcaagaggacagttaccgcgtccagtactgtgtatcctagcgaccagggcccagcccctcattggctagggagccgagaccaatgggcacgcacatccggcgacgggcacgcatgtggtgacggcccctcacaagggacacacgtccgtcaggtgacctcatcactttcccattggcctcgagggagcaggcctgggcctagaagtggctggagggccgtgggggtggggtggggcggggcagggggaatcgcgctggtgaccctctctttgccagtgggaactttccctttctactggatgggaacaccgtgggaaagacaaaggggtgggcgaggggaggacgggtaccacgccttcacaatgttgcacatccatcacgaccacctagttccaaaacgttttcaacaccccgaaaagaaaccgaaacccctgtacctataagcagtcacttgccgcacgcctccttccacaccaccactaccagcccccacaccctcccacacacaccccctgcccccgcccatacacacgttcccgatagtccctggcaacccctagtccatctgctttctgtccatagaggttagcctgttctggagatttcctatagatggaattat

SEQ ID NO: 1563529 - DNA, 4001 bp, Homo sapiens; identical to SEQ ID NO: 1563526

SEQ ID NO: 1563530 - DNA, 4001 bp, Homo sapiens; identical to SEQ ID NO: 1563527

SEQ ID NO: 1563531 - DNA, 4001 bp, Homo sapiens; identical to SEQ ID NO: 1563528

SEQ ID NO: 1563532 - DNA, 4001 bp, Homo sapiens
gagagagaacgcctactcatcttttaagacccagatgaaaatattctctctctatcaattgtttccccatttaatgtgttcctttctctatgatcccttagtacctagtgcacattttatcacattatattgaaacctctcacctggcctcatgctgctttagatcaaagagggagtctggtttatccccatacccctagtaccctgacacagtacctggcaccatagttgtaactcagtaatgtctgaatgaaggacatctttgatgcatacactttacaaaactaaactggttttacagaactgttttaatttcaaaattccaaactgttgcaataatacctaaaggcagcagccatgaaaatgcaacatctcagcaaatcactcaccgaaactccttttagaagccaatgagagtttaatagcagaagagagtgctgcattaatactgtctatccttagaaaaattcccctggccccttcctcaagggcttattatctctggctacaatggctgcagaatcacattgcctttctccttagtattatctggggatcgtatacttaacttcccttcaggtttatcgctagtcattatttcccaggctccaaaagcctggttcatccttattcttatctatcctttccccagcatctgaagtcttcaagggggcagaagccctcttacaaccttcatcatctcaccacttatatagaagaaagggtttggatgctttgtcctcccagatgtcacactaatgagatatatctaatggccttgctttatgtcctgctttgtgagttttccaacaaattttctttatcccttgactttactcactttgctagtttaacctctgtatttttttttatcgttatttcagcatttcagtctgatttcacagctgacatcatgtctggagtgggaaccacagggccagtcagctttctgggggtgcttagggttggcacccctgatcctggtactgtcagctactagatttgattctagaaagttgacaagtaagtgtgataaatgcttcctgtgagaacatgctgtttgtccaaatgggataatttcttccctgtatgccttcctctgggaaatacataaagtcactgtagttgtgaaaaaacaaagtgatatatgttgcattagctaacttcctactctttatgtcaattcttaagcttgcttttctcccctagggaactcaactgagtattgtgtttccccaaatatcaactccaagatgtttgacatagagacaaaatgattttttcctaatccatgaaaagctttggtgataactaacagcttgctaatgaaaggttaatctttatgttttaactaaaactttaaattgaagatatataatttaaaaaattagagacacacctcattacatacttctgaaaccttgaaatgtcatatatcttaaaatcagactttttgtgtaaataaggccattgtttgtgcttttgtttcccattttgatttcaaagtggtaagtccaaacaaaaataatgtggttattttttttcactatattctgctatttctttgttttcccacttttaatttttttaaaccaaggagatgaatgttttctaacaggaattacatgaccaaatcatgaactgaacagtgtttattaaacataaatgcatcataagcattgtcgatctatttagttttaaaaatgaagaagaagaaaacctagctaacaaagaaccagtacttaccaacctgcgtgctggctgttagactcttcaatattgctgtcaaatcatgtaatcaaaatttagtgaagaagacagcatcagatatttctatatctaaaaggcaagcatactcaatgtattttaaaaaaggaaacaaacctgtacattcagcactgagtagatatcctaaaaggcagatggtgatgaggcctggtgattctgccatgatcatgttcacgcgctgcataacctttgctagcagattgtgaaagtggtaaggtcgattagttgtaccaaagtacaagctgagctgtatttacttctgggaaataatgtccatctccctcaatgggtctttggactatttccaatggcctcttgggacaagtgaagagaatgggcagtggtcattattaaatttcacctctgatttcgtgggcttctgccactgtggctgatttgagtctgaaacaggaagtgacacatcttcagaatggagataggcatagtggctacatttactgtggcagcacagttcatcagtgggacccaccgtatctttgtcagagagcaatgatgtttaccaaaatggctgtaccactttacatttccatcagcaatgtatgagtggtccagttagtctgattttttttttttactgtcagattcttaaggttgtttatatattctagatatgagtcctttcatagatacgtggattaaatatattgtctccagcctgtagcttgtcttttgtcctcttaattaggtctttcacagagtagaattttttagttttgatgtagtccagtttatttgtttttgttttatggatcacatttagaactcttccactaacactagatcctgatgatttttttcctatttttttctaaatgttttacagtttgaagttttagatttatgcccatgctccattttgagttaatatttgtgtaaagtatgatgtttaagtcaaacttcatttttttttccataggtatgtccaatttatccagcacaatttgttaaaacaaaaaacaacaataccaccctatccttcctcgattgaatggcttctgaaattttttcgtaagtcagttaaccatattgttttgggtctacttccagtttctctatctattctttgtgccattgatgtatttatccctctgccaatataacactgtcataattactgtagctatgtagtaagactttatattaggtagagtgattcctccaactttattcttcttttggtaagatatttttaactgttctaagggcttgtataaattttagaatgatcttttttttattattatactttaagttttagggtacatgtgcacaacgagcaggtttgttacatatgtatacatgtgccatgttggtgtgctgtacccattaactcgtcatttagcattaggtatatcccctaatgctatccctcccctcaccccccaccccacaacaggccccggtgtgtgatgttccccttcctgtgtccaagtgttctcattgttcagttcccacctatgagtgagaacatgcggtgtttggttttttgtccttgcgatagtttgctgagaatgatggtttctagcttcatccatgtccctacaaaggacatgaactcattttctttttatggctgcctagtattccatggtgtatatgtgccacattttcttaatccagtctatcattgttggacatttgggttggttccaagtcattgctattgtgaaaagtgccgcaataaacatacgtgtgcatgtgtctttatagcagcatgatttataatactttgggtatatacccaataatgggatggctgggtcagatggtatttctaggtctagatccctgaggaatcgccacactgacttccacaatggttgaactagtttacagtcccaccaacagtgtcaaagtgttcctatttctccacatcctctccagcacctgttgcttcctgagtttttgatgatcgccattctaacttgtgtgagatggtatctcattgtggttttgatttgcatttctctgatggccggtgatgctgagcattttttcatgtgtctgttggctgcataaatgtcttcttttgagaagtgtctgttcatatccttcacccacttgttgatggggttgtttgtttttttctgtaaatttgtttgagttcattttagattctaggtattagcccttggacagatgagtagattgcaaaatttttctcccattctttaggttgcctgttcactctg

SEQ ID NO: 1563533 - DNA, 4001 bp, Homo sapiens
gacacaaaaagttaagaaatgcttttaaggccgggcgcagtggctcacacctgtaattccagcactttgggaggccgaggtgggtggatcacgaggtccggagatcaagaccatcctggctaactcgatgaaaacccgtctctactaaaaaatacgaaatattagccgggcatggtggcgggcgcctgtagtcccagctactcgggaggctgaggcaggagaatggcgtcaacccgggaggcggagcttgcagtgagcgaagatcgcaccactgcactccagcccaggcgacagagcgagactccgtctcaaaaaaaaaaaaaaaaaaaaaaaaaaaaagaaatgtttttaagatcacagagctagatcgtagaaaagctaggatttctgaacccagggagtctgactctagagtccatccttctaatcattatgttacacaatcttctatgtgccaggttcttgatatgtattatctgctattggtgtggcacaaggtcacagagccatgaacagacagtccaaaatttgaaatatatcatctttctactattaggttggtgcaaaagtaattgtgatttttgccattaaaagtaatgtcaaaatctcaattacaaaatcacaattacttttgcaccaaccgaatacatcccattgcctccctaactggtagaaaagcatgcatgagtgggtagaggctggggagggggtacggcaagaagacaggatatgtctttgaaaggtaaccaggagtacaatacaaatattaataattcatacattcaggagcacatactgagatagtatttgctgcatgcctattctttgttaagtagtattgtagattctggaaataaagcaatgacgaaaaacaaatgaaacagcagagaggtgaaaacaagcagagtataaataaacaatactagactgtagctcaagatctccaggtaaccaatcacttatatgacagagatgaatagtcctgcctgcacaattctatagagaacgaatgagctgcttaatttttttaatttagaactttcaacaatttttgtgcaaatcattttacttcagtttccttatgcataaaatatgaatattgcctatataactgcatccgtgaaatagaatatgtttaagtacccaggcagagtatttcacatatactatgcaataaatatatggtagacgcagcttttactatcctagaccaagtactacttttactttaaatcaattttaaaaagaattggttgaatggtaagcagcaggttgatctggggcctgtgagagacggaagaatagagagagagaaagggagagggagagagaaagagagagactgactttccatagctgagaatcagtttgaaattcacacctgctttaccccacacacagtaattatgcacaaataggacaaatggataggaaggactatgacggtaccaaaatagtccaacccatgcccacagtaaatgtccttggtaaaaataaacgtactacaacacccagaagtctcccttcatccccaataaatgcctctcctaagtcgccctagtagagaatggaaaggaaaccacaaccaccgccaccactaagcttcctggatcctgctaaaagacctgtccctccagcctcttctgaattgcattctcacctttctctgtcggatcagcttggccagctgcatccccgaaagcagaagcaatggttcagtcaccggccgaggggtctttgaggcaaactttggaccccctaagactaaagctgctcggcctactaagcctatgagaaagcctagcgcccgcaagaggaacaactgaatgcgggcggtaaatgaaggtgccatcgcagcctggattccgcacggtcctagtgcttgagggttacgtgcaccctggggaaaggacgagaaaagtactaagcaaagagggacttatgaagcttttcgtttacaagtccagtgtctacccacaattccacaggagcttgtttatcatcacctgcagggctcctagccagagatgggggcggagacttcccagcagctgcctgtgtgcaatgctacctgtcgttagtgctgttgtaacccaagacagaaaatgcgtcataagaaagaacactggccttggaattccccagttctgctactgtgtagccctggccaacctacactatatctcctagtcagtttactcataagaaaaaaaatgggaataactactcctatatcaaagggttaccataaacactagataataagtaaaaacatttagcacaatttatggtaaatagtataagtggtagttgttatagtttatttcagctgtgcttgtgaaaaaagtgttgtaagtatacctttgtatgcaaatattcagtatgctcaacaaacaactaaatggcaagtatatatatattttccatatgcatattatttaatccttataagatcactaacaggtagtactgatgaacatcaaatctccagcccatctgtctcctaaactggacacttgaaatgccttttttgacatatccatgtgaatgtcttccagatcgttcaaactcaacaagtccaaaactcatccttttgtcccccagactgctgcccctacaggtctacaaatggaattttcatccacccagtcagccatgccaaaaatctagaatcacttcagattcttccatttctcttattctcatgacagaatccagcccttccttctcaactcagtctggctcagatctcactgaggtttacatgaacttctacaaataatctagctgatcactctgcctttatttatagagtgttctttctaatatgtaaatctgacaatattacacccctgccaataactccgcaataattctccattttccacagattcaagacccatctactttgtccagcattcgactctcatgactggtgtctgaaaaactctatgcttcatccctaaccccttctatccctcacatgctaagctcctgacaaacaactatccgaaagttctctcttccctccttatctttgcatctgctttcccaacctcttcatctagttcaggacaagtaccacctcctccagtaagtcttccctgaacttacaactgggtgtgatgccactcttttgtaaccctgcactccacagattaacaaaatcatagcacttacaaccctctgttatgtgttaggtttttgtgtctatgccccatctagatataaactcctcgaagaacagggtcattctaattcctctttgtattgccagagcctgacatagggcttgatgagaagtcaatacaggtttgtaggctgaaggtatgtgattatgagataatgagcgttgaagatagggattcgagcttggcatttaaggtcttgggtaggtgaaatgacaacgtcatccaggtcactgtcttttcacctgcagaacttaggttgatactgaaagtgtcatcacagcacttctagcctaattcaagcacctggtagaaagcaggttaatcatgacaggcacatctagcagatccagtaaagaaagctgataaagcaggttgtcataatctaggctccattacagttctgagcaaaacctgttagctgagtgaaacttccttaccagagaaaggttttgtcaaaatgaaaatatttactttgcccaacttttgttactttatttaagttgtaaatgacaaatatgtgagcctgaggtacaaagaatgctcactgattgggctctgaccagacagacctgaatccaaatcctagatccagcactcattatgtttttgaccttgaacaaatcacttaatgtccctaggtgtgttttctcatctgtaaagtagaataacagctgccatatggtgttatgaagattaaatcacatatggatgtaaagcttctgttttttttttacaatcttaaatattttaattttatattaatagttagaccatgttaagtatattgccattgttggcaacatatcacca

SEQ ID NO: 1563534 - DNA, 4001 bp, Homo sapiens
ttgccctctttactgccatttcttcttcttttcctgaaaataaattgtaaagagagagttgttacatgaaacaactgatcttttggatgcttaaattgtaaagccgtgacaacatacatatatgagaacttgtctgaaaaaatgtcactatctgctatcccaagatataaaagtcatataagtactccattaccaggcatgaagataaaaaaatgtaatacaagaactctaagtaaagccaagctgtgcatttcatttctagaaataattttcataaccttaaatgatccttgaaaataaagaatatgaggaatttaatagctaagttttcaaaatctacctaattagtttcattgttttgactccatgaagttacaattccagggtaagtgatttttaactccttcaataagatcgtaagacatgtgtgtctgccagtgtctactcttaagttcttatgccagtggtgtagcgacactgaagagatatttcttgtatgctgaatgtggttaggcacttactgttgctataccagctaatattatgacatagttactccactagattgtcaccatgagattgtggctgattacttccttgaaacattcttttctcaaaattgttttcaatgattggtaagattacatcttcagtttcaagttccttgtcaataagtaatcagattgcagcgtttgacatagttttcacagcactctattattaaccagacatttgcttagagacttacttttgagtttttggtactcctaagaatggctgagtttactcatttttataatttcattactctttaatcaattctcatctctaggagactgagtactaggagactctaggagactgagtactgagtacaaaatgccaaataaaaaatcacgtagaaaactgctcctatattacactccattatgaaatgattgattatatataaagaaaaaatgaccgggtgtaaatattattttatttcacaatgtttattgagcatccactaagtgctaggcactcctccaggtgccaggataaaagagtgaaacaaacacatgccacagctctgccttcattagggagcatggtgatgtttgtctttgatcatggtattttgagtatttgagtattttgcgctcaagttttactgaaactttcaacagcttacaatacgtttgcattgtttttaaaacagagtaatactatgaaaatgatttttcaaagtgtgaagctgagtttaaaaagcggaatgttcatgaaacaatgttaatctcattttttaaaatgcaactttacgaatgaaaaacatctaaggaaatttatcacagaatatgattaatggtcacggctgggtgatcggactgtggataagattggtttcctttattacgctttaacagtctaaccaagttttctaccatgagattcagagacgtttgtaatgaaagaatacattgataaaggtccatagaaccccagtaacacgtggagaaagatgacaaaaccaatcagagaaacagaaataccagttgctagggtacctagcagcctcaccgaggaaatgccaatttgaaaaacagaatgctattgtccactgactgagttttcgcgagggaccacatccccacctcacccccgcctccagggcttgtaaggcactgacaaccaaagaaccagcatgttctttcggagaaggcttcgcgggattttttttcaagcacgaagggcggggcacgaggcaagcagggccgcgccaccggccaacactgtcacctgcaggtcatgagagccgagcgccaccaaccccggaagaaaatacatatccgctgcgtttccgccctgagccccgagatcttggctgagaaagcaaagcgtgatgaccgtggggaccagagctcggactggtaccggccggaaaggccccgacgaacttaccgtacagggcagcctcccatagtcctgccctcggaaccatagcaaccgcgcaggaagttcctgcgccgccggaaaaacgcagcccggagggcggggctggccaaggattgacgggctctgggcctgcgcatcggagcccggggaggtcggctcctgtttcctctgggtccgccgcaggctcccttccctgcagttgggagctgacgcctgagggacgatccgctgagggtcaggctctgctgcgcgactgcccgagccgccccatgttcgagacctgtgccaatcccatggacattctcctcccacccagccagcctctgaacacgcttctcacgtggcacacgccctgtcctcgcagccctcacaccgctgatcctcctcggcgacctcagcgcccccggggctgaccaggccgtggccggcgcctctccgtcctcgggggggtctccttccccccacttaagtctcttctgcccgcggtcatgccctgggcctcaggaaagaccgcgcccctccacgatgtccatttcttgcatcccccattctcataacgggcagcacccgatcgtgtcctaacagctacctcttccagtgccccagcatccacagcctttagcctcaaggaggcctcctctccactaaccacaaccgcgttcctcaccattcaccttccttagccagcttacccaaagctattaactctctcctccctactctcctggcagtccccccgccgccaagtagacaaacaatgtacaccctccacaagtgtaccttctctgtctagtctacttacaagatccctccacaagcaccagcacccaattttctcatgatattcactgatattcccttgagaaaatagaagcaatcagagaagaattcacaccacttcccaacagcagtagacctgcacttataatcttggctgcttccctggaggaagagacaggatcctacttgagaccaggcccttcacctggatcctatgccttccaccttcttaagggatcatcctttgcagttatgctttctcctgaattatcatgttcctctatctgtatttattatctaaaaagttggcaaagggagtgctagagtttaggctgatcctggttcttgctgttaagtaggtgatctcacagggggctgcattccctgaggatggaagggaagatgtggaaagtggctgattcaagaactaaagatcatgccataaaggaagcctaacccagctaggggctaggtgaccctgcagccgaggctgtggagtagacagccctggacaggggacttttagactgccatgtttgtcgctgcattgtgcaattttaacaagaatcctgctaagtcagtttagttagaatttcccatcatcaatatctcagttaggttcctcatcccccaggtgatgtctagtcaccctggcccaccttcaccaacaatcctgttagttcaatttagccacaatacccccttacccgtggtgtttcctcttagtaattttccgtccattgctccccaccctgctccttggctataaatttccacttttcgttgttgtatttggagtggaacccagtttctctcccttcactgcaaaaccccatagcagtggtccctacacctatcttgatggtcctgaatgaagtctgccttaccgttctttaacaaatgccatgaataattttttttccttaacacccttcacttggatcccatgcccttccacattctcaaggaacaagcttttgtaatgatcattccttttacttgaatcaccatgttctccatgtctatcggatcatgctatcgtctacaaagtgggcaaatagatggttagaaatgagggattttgctttcaagagctgatcttggttattgctgtgttgtaggtgagaccccaaggggctgcattctctgaggaaggtggaggggttggagggtatggaaagtggctgattcaagagccaggggtgctaccatggggcaagcttaagccagataaggactaggttaccttgcagctgaggctgtggagtggacaaccctggccaggg

SEQ ID NO: 1563535 - DNA, 4001 bp, Homo sapiens
atcttgagaatcctgaaagatagggtttctcttattccttttgggctgggtggaatgatggttgccctctttactgccatttcttcttcttttcctgaaaataaattgtaaagagagagttgttacatgaaacaactgatcttttggatgcttaaattgtaaagccgtgacaacatacatatatgagaacttgtctgaaaaaatgtcactatctgctatcccaagatataaaagtcatataagtactccattaccaggcatgaagataaaaaaatgtaatacaagaactctaagtaaagccaagctgtgcatttcatttctagaaataattttcataaccttaaatgatccttgaaaataaagaatatgaggaatttaatagctaagttttcaaaatctacctaattagtttcattgttttgactccatgaagttacaattccagggtaagtgatttttaactccttcaataagatcgtaagacatgtgtgtctgccagtgtctactcttaagttcttatgccagtggtgtagcgacactgaagagatatttcttgtatgctgaatgtggttaggcacttactgttgctataccagctaatattatgacatagttactccactagattgtcaccatgagattgtggctgattacttccttgaaacattcttttctcaaaattgttttcaatgattggtaagattacatcttcagtttcaagttccttgtcaataagtaatcagattgcagcgtttgacatagttttcacagcactctattattaaccagacatttgcttagagacttacttttgagtttttggtactcctaagaatggctgagtttactcatttttataatttcattactctttaatcaattctcatctctaggagactgagtactaggagactctaggagactgagtactgagtacaaaatgccaaataaaaaatcacgtagaaaactgctcctatattacactccattatgaaatgattgattatatataaagaaaaaatgaccgggtgtaaatattattttatttcacaatgtttattgagcatccactaagtgctaggcactcctccaggtgccaggataaaagagtgaaacaaacacatgccacagctctgccttcattagggagcatggtgatgtttgtctttgatcatggtattttgagtatttgagtattttgcgctcaagttttactgaaactttcaacagcttacaatacgtttgcattgtttttaaaacagagtaatactatgaaaatgatttttcaaagtgtgaagctgagtttaaaaagcggaatgttcatgaaacaatgttaatctcattttttaaaatgcaactttacgaatgaaaaacatctaaggaaatttatcacagaatatgattaatggtcacggctgggtgatcggactgtggataagattggtttcctttattacgctttaacagtctaaccaagttttctaccatgagattcagagacgtttgtaatgaaagaatacattgataaaggtccatagaaccccagtaacacgtggagaaagatgacaaaaccaatcagagaaacagaaataccagttgctagggtacctagcagcctcaccgaggaaatgccaatttgaaaaacagaatgctattgtccactgactgagttttcgcgagggaccacatccccacctcacccccgcctccagggcttgtaaggcactgacaaccaaagaaccagcatgttctttcggagaaggcttcgcgggattttttttcaagcacgaagggcggggcacgaggcaagcagggccgcgccaccggccaacactgtcacctgcaggtcatgagagccgagcgccaccaaccccggaagaaaatacatatccgctgcgtttccgccctgagccccgagatcttggctgagaaagcaaagcgtgatgaccgtggggaccagagctcggactggtaccggccggaaaggccccgacgaacttaccgtacagggcagcctcccatagtcctgccctcggaaccatagcaaccgcgcaggaagttcctgcgccgccggaaaaacgcagcccggagggcggggctggccaaggattgacgggctctgggcctgcgcatcggagcccggggaggtcggctcctgtttcctctgggtccgccgcaggctcccttccctgcagttgggagctgacgcctgagggacgatccgctgagggtcaggctctgctgcgcgactgcccgagccgccccatgttcgagacctgtgccaatcccatggacattctcctcccacccagccagcctctgaacacgcttctcacgtggcacacgccctgtcctcgcagccctcacaccgctgatcctcctcggcgacctcagcgcccccggggctgaccaggccgtggccggcgcctctccgtcctcgggggggtctccttccccccacttaagtctcttctgcccgcggtcatgccctgggcctcaggaaagaccgcgcccctccacgatgtccatttcttgcatcccccattctcataacgggcagcacccgatcgtgtcctaacagctacctcttccagtgccccagcatccacagcctttagcctcaaggaggcctcctctccactaaccacaaccgcgttcctcaccattcaccttccttagccagcttacccaaagctattaactctctcctccctactctcctggcagtccccccgccgccaagtagacaaacaatgtacaccctccacaagtgtaccttctctgtctagtctacttacaagatccctccacaagcaccagcacccaattttctcatgatattcactgatattcccttgagaaaatagaagcaatcagagaagaattcacaccacttcccaacagcagtagacctgcacttataatcttggctgcttccctggaggaagagacaggatcctacttgagaccaggcccttcacctggatcctatgccttccaccttcttaagggatcatcctttgcagttatgctttctcctgaattatcatgttcctctatctgtatttattatctaaaaagttggcaaagggagtgctagagtttaggctgatcctggttcttgctgttaagtaggtgatctcacagggggctgcattccctgaggatggaagggaagatgtggaaagtggctgattcaagaactaaagatcatgccataaaggaagcctaacccagctaggggctaggtgaccctgcagccgaggctgtggagtagacagccctggacaggggacttttagactgccatgtttgtcgctgcattgtgcaattttaacaagaatcctgctaagtcagtttagttagaatttcccatcatcaatatctcagttaggttcctcatcccccaggtgatgtctagtcaccctggcccaccttcaccaacaatcctgttagttcaatttagccacaatacccccttacccgtggtgtttcctcttagtaattttccgtccattgctccccaccctgctccttggctataaatttccacttttcgttgttgtatttggagtggaacccagtttctctcccttcactgcaaaaccccatagcagtggtccctacacctatcttgatggtcctgaatgaagtctgccttaccgttctttaacaaatgccatgaataattttttttccttaacacccttcacttggatcccatgcccttccacattctcaaggaacaagcttttgtaatgatcattccttttacttgaatcaccatgttctccatgtctatcggatcatgctatcgtctacaaagtgggcaaatagatggttagaaatgagggattttgctttcaagagctgatcttggttattgctgtgttgtaggtgagaccccaaggggctgcattctctgaggaaggtggaggggttggagggtatggaaagtggctgattcaagagccaggggtgctaccatggggcaagcttaa

SEQ ID NO: 1563536 - DNA, 4001 bp, Homo sapiens
agaggcaatctgaccatacttgctacctctgtatcttgagaatcctgaaagatagggtttctcttattccttttgggctgggtggaatgatggttgccctctttactgccatttcttcttcttttcctgaaaataaattgtaaagagagagttgttacatgaaacaactgatcttttggatgcttaaattgtaaagccgtgacaacatacatatatgagaacttgtctgaaaaaatgtcactatctgctatcccaagatataaaagtcatataagtactccattaccaggcatgaagataaaaaaatgtaatacaagaactctaagtaaagccaagctgtgcatttcatttctagaaataattttcataaccttaaatgatccttgaaaataaagaatatgaggaatttaatagctaagttttcaaaatctacctaattagtttcattgttttgactccatgaagttacaattccagggtaagtgatttttaactccttcaataagatcgtaagacatgtgtgtctgccagtgtctactcttaagttcttatgccagtggtgtagcgacactgaagagatatttcttgtatgctgaatgtggttaggcacttactgttgctataccagctaatattatgacatagttactccactagattgtcaccatgagattgtggctgattacttccttgaaacattcttttctcaaaattgttttcaatgattggtaagattacatcttcagtttcaagttccttgtcaataagtaatcagattgcagcgtttgacatagttttcacagcactctattattaaccagacatttgcttagagacttacttttgagtttttggtactcctaagaatggctgagtttactcatttttataatttcattactctttaatcaattctcatctctaggagactgagtactaggagactctaggagactgagtactgagtacaaaatgccaaataaaaaatcacgtagaaaactgctcctatattacactccattatgaaatgattgattatatataaagaaaaaatgaccgggtgtaaatattattttatttcacaatgtttattgagcatccactaagtgctaggcactcctccaggtgccaggataaaagagtgaaacaaacacatgccacagctctgccttcattagggagcatggtgatgtttgtctttgatcatggtattttgagtatttgagtattttgcgctcaagttttactgaaactttcaacagcttacaatacgtttgcattgtttttaaaacagagtaatactatgaaaatgatttttcaaagtgtgaagctgagtttaaaaagcggaatgttcatgaaacaatgttaatctcattttttaaaatgcaactttacgaatgaaaaacatctaaggaaatttatcacagaatatgattaatggtcacggctgggtgatcggactgtggataagattggtttcctttattacgctttaacagtctaaccaagttttctaccatgagattcagagacgtttgtaatgaaagaatacattgataaaggtccatagaaccccagtaacacgtggagaaagatgacaaaaccaatcagagaaacagaaataccagttgctagggtacctagcagcctcaccgaggaaatgccaatttgaaaaacagaatgctattgtccactgactgagttttcgcgagggaccacatccccacctcacccccgcctccagggcttgtaaggcactgacaaccaaagaaccagcatgttctttcggagaaggcttcgcgggattttttttcaagcacgaagggcggggcacgaggcaagcagggccgcgccaccggccaacactgtcacctgcaggtcatgagagccgagcgccaccaaccccggaagaaaatacatatccgctgcgtttccgccctgagccccgagatcttggctgagaaagcaaagcgtgatgaccgtggggaccagagctcggactggtaccggccggaaaggccccgacgaacttaccgtacagggcagcctcccatagtcctgccctcggaaccatagcaaccgcgcaggaagttcctgcgccgccggaaaaacgcagcccggagggcggggctggccaaggattgacgggctctgggcctgcgcatcggagcccggggaggtcggctcctgtttcctctgggtccgccgcaggctcccttccctgcagttgggagctgacgcctgagggacgatccgctgagggtcaggctctgctgcgcgactgcccgagccgccccatgttcgagacctgtgccaatcccatggacattctcctcccacccagccagcctctgaacacgcttctcacgtggcacacgccctgtcctcgcagccctcacaccgctgatcctcctcggcgacctcagcgcccccggggctgaccaggccgtggccggcgcctctccgtcctcgggggggtctccttccccccacttaagtctcttctgcccgcggtcatgccctgggcctcaggaaagaccgcgcccctccacgatgtccatttcttgcatcccccattctcataacgggcagcacccgatcgtgtcctaacagctacctcttccagtgccccagcatccacagcctttagcctcaaggaggcctcctctccactaaccacaaccgcgttcctcaccattcaccttccttagccagcttacccaaagctattaactctctcctccctactctcctggcagtccccccgccgccaagtagacaaacaatgtacaccctccacaagtgtaccttctctgtctagtctacttacaagatccctccacaagcaccagcacccaattttctcatgatattcactgatattcccttgagaaaatagaagcaatcagagaagaattcacaccacttcccaacagcagtagacctgcacttataatcttggctgcttccctggaggaagagacaggatcctacttgagaccaggcccttcacctggatcctatgccttccaccttcttaagggatcatcctttgcagttatgctttctcctgaattatcatgttcctctatctgtatttattatctaaaaagttggcaaagggagtgctagagtttaggctgatcctggttcttgctgttaagtaggtgatctcacagggggctgcattccctgaggatggaagggaagatgtggaaagtggctgattcaagaactaaagatcatgccataaaggaagcctaacccagctaggggctaggtgaccctgcagccgaggctgtggagtagacagccctggacaggggacttttagactgccatgtttgtcgctgcattgtgcaattttaacaagaatcctgctaagtcagtttagttagaatttcccatcatcaatatctcagttaggttcctcatcccccaggtgatgtctagtcaccctggcccaccttcaccaacaatcctgttagttcaatttagccacaatacccccttacccgtggtgtttcctcttagtaattttccgtccattgctccccaccctgctccttggctataaatttccacttttcgttgttgtatttggagtggaacccagtttctctcccttcactgcaaaaccccatagcagtggtccctacacctatcttgatggtcctgaatgaagtctgccttaccgttctttaacaaatgccatgaataattttttttccttaacacccttcacttggatcccatgcccttccacattctcaaggaacaagcttttgtaatgatcattccttttacttgaatcaccatgttctccatgtctatcggatcatgctatcgtctacaaagtgggcaaatagatggttagaaatgagggattttgctttcaagagctgatcttggttattgctgtgttgtaggtgagaccccaaggggctgcattctctgaggaaggtggaggggttggagggtatggaaagtggctgattcaa

SEQ ID NO: 1563537 - DNA, 4001 bp, Homo sapiens
aactgtaaggacaacccccaagaaccttggttggggaaataggtttgcggtttctttctacccaaccctgtactacttttctttttcttcttcctgcccacctcctttacttcccaagccttgctattctctacacgtaggaacttgaaacctaagagtatgggaaagcaacagagcagcagcagtggtgccaagaactggggatgctgccaagctgttccccaggccccatatgcagtgacccaactacatgcagattggacttaactgcctatggggccttgcacacttaatattcctttttgcttctgctcattttcttcctcccacttaaagcagcctcctcccaagcttgtgactcattcaaatccaatccacctttgaagacccaggtgaggtccgacttcttcagggaagcctcccctgaccactttagtccaaagatatcccaccactcccacatacagaaaacaggaactgtacttactgtctggaccataaggcataatcacatacacattgctataattaaatgtttcatgtgtatacatttaactttccaagggcatgagcagtgtctcacatgtctttaaaacccttacactcagtgagttaatacttgctgaacagtgactgaatcagtgggtttttatgtgtttaggctaaggcaggaggaagaagatgcatgttgaaatgaaaaaggctgaatggacacagatgggtaaaaaagcagcagtgggtgaagacggaaaaacaatgtagaagaaaggtgttcagttcacacctgcttaagtgatttactgcgaggttggaaagagatacaggagagagatgtcaactggcaaaagcagggtaaaggcatttcagtttgaggcagaagacaccaggagaaagatgaggctacaaaagaaattctgactagattctgctgaaacctagtggtaggccaattggataagggaagctaaagggagctactgggatgacatgagtagagatatggccatgtaggtgagtgaatccgtagggggtggtatgaagggggaggtaaatggataaaatggtagagggtagttaggcaggtaggttagctgttgggcgggtaggtgggtgggtagatgggaggtagggtagtgggtaagtgggtaggtggttaggtatttagttgggagggaataggtgtggggcttattatttaagatccggcccctccctcaccttgacccggaagcggatgagtgctagcctcacgcagtggctcaggcaggccggtggcaggaaccaggcccgcggtggaggggtgcccttgttgcccacgtgtcccacgatcagttgcgctgtctgccgctcggcctggcaccgacggccccactcggccagccggtccttgcccaggccccccgggaacatgaccacgagctccaggccgtcgccgccaggataggcacaagcctggcacagcgctgacaagtagcccagcatggcgttccattggccgccacacacccaatccgtctggtagccgccatagagccgcggcagcgccgagccggcgtccaccagcacccgggccccgggcagctgagggggcggcggcggcggcagcggagggtgcagcccgggctgcgcttggccatgatggtggaagtggtgagcggggtgatggtgccgagtcggccccgcgcccccggagtaggcacccaaggcagcgggcggaagcggcggttgcagaggcacggagcccctggcggcgcgtggagccccgggcgctagggctgcagtcggcggcagctggcggtgcaagtgctgctgctgctgctggcgcgagaccgtgcgcgcgagttttaggaggtccacgggcaccacggccccgggacagcgcttctccaggaactcttggaagccctggacacccatgcttcgtcggtgggcagacgcgatagcggctgcgcaagcaggataggcgacgatctgggcgcgaagctgggggcgggcgcgtgcgcactccgcggggggcgagggggggcgggaaaaggattcccgaggggaggggtgaggaagcgagggaatgagggcggggaggggaggagaccacaaattggatttgggtagagagaaggggaggggcagaccggacccgggagaggctgggaggataaaagcgaggatgggctctagtcacttctcttttttctcctttccggccgctcttcttcccgctttagaaggggtgaagcctctttcttccacctccgggagccatgttgcctcgtcttctcggtggtacacgctttctagctggaggaaggggagcgaggaggggcggggcggggcggggagaggggcatcttggtagttgtagtcttctctatggccttaggatatagtcgaggaaccagactaccacccttctcagcccttgtgctcacagggtcacaggaagcggggcgtgatgatgagtgtttaggagttgcactccaactccttgcatctcactgagttgcttaggttatttactgctttttcctggaaaaagagttttgggggatggattgatgcatcatgggaatggaagttagagtggattgactgaattcagctaaagtgagctaaaactccccaggagggaggattttccccttagtggaaagataatatttaaagagctgttggtcccaattaagaaagacgtaactggtcgggcgcggtggctcacgcctgtaatccctccgaggcgggcagatcacgaggttaggagatcgagaccatcctggccaacatggtgaaaccccgtctctactaaaaatacaaaaagtagccgggcgtggtggcacgtgcctgtaatcccagctactggggaagctgaggcaggagaatcgcttgaacctgggaggcggaggttgcagtgagccaaaatcatgtcaccgtactccagcctggtgacagagccagactccgtctcaaaaataaataaataaataaaaagaaacttacattatttacttgcctaaggcaatgcagagacaaagttaaatcgaatatccttgccctcagcatctctttgggcagggagataattaccaacacaaattacattacaaattgtacctttttggtactcctagatccactatgtcctatggttagggcctttggtttccaaacttcattgtgttttagtctgtcgggagcttttctaaatagctgcaagggctctaatttcagatgtatggagtcataatcttttgaaaaatgtattttcaacatactgagatgaaacagatgcagtgcctgtcttctttctggcttttagggccggcccactctttcagcaggaataaagcagaaaacaagatctgaaatgagtagtagccagatctggcttggaacttactggaagatgggagataatggcaggcagagttagaatgcagaagtgcagaacccaagagtgatcgggatgaatgagataggggaatactctattaggatgcaaaagcaaaaaagcttcaagctacataaaagaaattataaaatagtggagatggaacaagccagattgtcaaagaataagtagatggcaaggcagtgtacatagttaactcttgaaagcaagcagtgaaaggagagagcagtggcttgaagggatgaaggatggaaggaatggaggttttttagtataatggacacgtgtgggacggtctgcccagcccctcttttccgggaattgaccctccaccttcccccatttatagggttatggcaaaaactgtcgtgttcctataaccatagcttattgggtcagaggtgggcagctaatccaacctggggcaatcaaaatctcattttctagaaatttgcaattagacaagagataccagcttttctctaagtgtaaagcttggaagctgtcaaccaattttcccaccagagggacagaagtgaaagatgctggtctgcagaaagagagaaaaaatgcagactttcagagaagaacaaag

SEQ ID NO: 1563538 - DNA, 4001 bp, Homo sapiens
tcccacaatcccctgttctgtctaactgtaaggacaacccccaagaaccttggttggggaaataggtttgcggtttctttctacccaaccctgtactacttttctttttcttcttcctgcccacctcctttacttcccaagccttgctattctctacacgtaggaacttgaaacctaagagtatgggaaagcaacagagcagcagcagtggtgccaagaactggggatgctgccaagctgttccccaggccccatatgcagtgacccaactacatgcagattggacttaactgcctatggggccttgcacacttaatattcctttttgcttctgctcattttcttcctcccacttaaagcagcctcctcccaagcttgtgactcattcaaatccaatccacctttgaagacccaggtgaggtccgacttcttcagggaagcctcccctgaccactttagtccaaagatatcccaccactcccacatacagaaaacaggaactgtacttactgtctggaccataaggcataatcacatacacattgctataattaaatgtttcatgtgtatacatttaactttccaagggcatgagcagtgtctcacatgtctttaaaacccttacactcagtgagttaatacttgctgaacagtgactgaatcagtgggtttttatgtgtttaggctaaggcaggaggaagaagatgcatgttgaaatgaaaaaggctgaatggacacagatgggtaaaaaagcagcagtgggtgaagacggaaaaacaatgtagaagaaaggtgttcagttcacacctgcttaagtgatttactgcgaggttggaaagagatacaggagagagatgtcaactggcaaaagcagggtaaaggcatttcagtttgaggcagaagacaccaggagaaagatgaggctacaaaagaaattctgactagattctgctgaaacctagtggtaggccaattggataagggaagctaaagggagctactgggatgacatgagtagagatatggccatgtaggtgagtgaatccgtagggggtggtatgaagggggaggtaaatggataaaatggtagagggtagttaggcaggtaggttagctgttgggcgggtaggtgggtgggtagatgggaggtagggtagtgggtaagtgggtaggtggttaggtatttagttgggagggaataggtgtggggcttattatttaagatccggcccctccctcaccttgacccggaagcggatgagtgctagcctcacgcagtggctcaggcaggccggtggcaggaaccaggcccgcggtggaggggtgcccttgttgcccacgtgtcccacgatcagttgcgctgtctgccgctcggcctggcaccgacggccccactcggccagccggtccttgcccaggccccccgggaacatgaccacgagctccaggccgtcgccgccaggataggcacaagcctggcacagcgctgacaagtagcccagcatggcgttccattggccgccacacacccaatccgtctggtagccgccatagagccgcggcagcgccgagccggcgtccaccagcacccgggccccgggcagctgagggggcggcggcggcggcagcggagggtgcagcccgggctgcgcttggccatgatggtggaagtggtgagcggggtgatggtgccgagtcggccccgcgcccccggagtaggcacccaaggcagcgggcggaagcggcggttgcagaggcacggagcccctggcggcgcgtggagccccgggcgctagggctgcagtcggcggcagctggcggtgcaagtgctgctgctgctgctggcgcgagaccgtgcgcgcgagttttaggaggtccacgggcaccacggccccgggacagcgcttctccaggaactcttggaagccctggacacccatgcttcgtcggtgggcagacgcgatagcggctgcgcaagcaggataggcgacgatctgggcgcgaagctgggggcgggcgcgtgcgcactccgcggggggcgagggggggcgggaaaaggattcccgaggggaggggtgaggaagcgagggaatgagggcggggaggggaggagaccacaaattggatttgggtagagagaaggggaggggcagaccggacccgggagaggctgggaggataaaagcgaggatgggctctagtcacttctcttttttctcctttccggccgctcttcttcccgctttagaaggggtgaagcctctttcttccacctccgggagccatgttgcctcgtcttctcggtggtacacgctttctagctggaggaaggggagcgaggaggggcggggcggggcggggagaggggcatcttggtagttgtagtcttctctatggccttaggatatagtcgaggaaccagactaccacccttctcagcccttgtgctcacagggtcacaggaagcggggcgtgatgatgagtgtttaggagttgcactccaactccttgcatctcactgagttgcttaggttatttactgctttttcctggaaaaagagttttgggggatggattgatgcatcatgggaatggaagttagagtggattgactgaattcagctaaagtgagctaaaactccccaggagggaggattttccccttagtggaaagataatatttaaagagctgttggtcccaattaagaaagacgtaactggtcgggcgcggtggctcacgcctgtaatccctccgaggcgggcagatcacgaggttaggagatcgagaccatcctggccaacatggtgaaaccccgtctctactaaaaatacaaaaagtagccgggcgtggtggcacgtgcctgtaatcccagctactggggaagctgaggcaggagaatcgcttgaacctgggaggcggaggttgcagtgagccaaaatcatgtcaccgtactccagcctggtgacagagccagactccgtctcaaaaataaataaataaataaaaagaaacttacattatttacttgcctaaggcaatgcagagacaaagttaaatcgaatatccttgccctcagcatctctttgggcagggagataattaccaacacaaattacattacaaattgtacctttttggtactcctagatccactatgtcctatggttagggcctttggtttccaaacttcattgtgttttagtctgtcgggagcttttctaaatagctgcaagggctctaatttcagatgtatggagtcataatcttttgaaaaatgtattttcaacatactgagatgaaacagatgcagtgcctgtcttctttctggcttttagggccggcccactctttcagcaggaataaagcagaaaacaagatctgaaatgagtagtagccagatctggcttggaacttactggaagatgggagataatggcaggcagagttagaatgcagaagtgcagaacccaagagtgatcgggatgaatgagataggggaatactctattaggatgcaaaagcaaaaaagcttcaagctacataaaagaaattataaaatagtggagatggaacaagccagattgtcaaagaataagtagatggcaaggcagtgtacatagttaactcttgaaagcaagcagtgaaaggagagagcagtggcttgaagggatgaaggatggaaggaatggaggttttttagtataatggacacgtgtgggacggtctgcccagcccctcttttccgggaattgaccctccaccttcccccatttatagggttatggcaaaaactgtcgtgttcctataaccatagcttattgggtcagaggtgggcagctaatccaacctggggcaatcaaaatctcattttctagaaatttgcaattagacaagagataccagcttttctctaagtgtaaagcttggaagctgtcaaccaattttcccaccagagggacagaagtgaaagatgctggtctgcagaaagagagaaaaaatg

SEQ ID NO: 1563539 - DNA, 4001 bp, Homo sapiens
attatacttaataaatgaaaaagtcaacctgttttttccccaaaatatggatgttataatcagttcaacagcaaggattatctctttctttgccttcactgtgcttgattaatatgtttttggctaattgtactctcatctccttttttggactaatgccatttctacagggtctcgcaaattggctctctacctaagatgaattgtctccttataaaagtgaaatacaataggctcaggaggtgagccaacctaaccttcactattacaagatgctaccttaaaacagaccctcgatgacttattgacatgaaaacacaagaccctaccactgaaattgaagagtcgattctctccaccgttttctaaaacctgccttttcactgaccctaagctacagaccacccttcttttttattcactgcaatgcatttcaggcagttttagaacctgaaaacattagggcaaatccaaatcacgtactacgatgtgaacataccacttaattacaagttattagataaattgtgatttattaaagtaaacatctgttaatgccaggattcctaaactaagcttagaaatagcagctctgagagacaggtgtcaagttgcacatctagttccaggggcttcgatctgacattccctggtgtaagttagtcggggcaagcaacctgtcagaagagccagaagctttctgcagttccttttacagagggacaacatggccccaggtagagggggaccgtttcctccacactgcccaaagttggagattaaactttcactccaccttgggacccaagtcactgtcaagcaaacaagtcgccaccccctcaggttgaagagcccaaatgagctcaaacgtgcactttaaggaaggaagattgcttgcatgggggcaaggagcccctgaatcctgtactccatcctccccaaccctgctcacctgagcccatggattaggggagcgctgctggatctcctcagggttcccccataagatgtgtcaggctcaaggtccagctccattttctcctgagccatgtcagacttgcaggcaggcacagcgggcagtgctcagctcctggtgcttagctatggactcccaagactctcactgcaggactgagctgctggggactggcagctgggggcgggggctaaggggcggaggcttggggacgggggcgggggctgggggcggagaaaagtaggagaggaggagggaaggaggatgatgatgaggaagggaggatgatggtgaggcaggagaggaggacgaagaggtagtggtggaaggtgacagaatgaaggaaaaggatgaaggaaagaaggatggagggaaaacaaggatggagggaggagggaagagggagggaaaaggataggtggaaaagcaggaggacagagaggataagaggagggcagaggggggaaagggagaggaagggggcggaggagggaggggaagggagagggcagaggggagggaggaggacagagggtaagggaaaagaagcgcaggggcgggaaagaaggaggtggtctgggaagaggagagaggagggagaagaggagggggaggaaactaggcagcggcggaactcatgctgctatctttccggctgaggaccacaagcggggccgggctacagatgctgcggctgcccgggcagcgctagcaccgaggacctgacagtcgggtaggacccggccgggcggccttggcggctccagctccccatgctcggggacccggtccagccccccatgctcccggacccggtcccggaggctcctcagccctgggatcggtgcttctcccctccctgcccccctcccgcctcgaggacaggttgggggttcggcctctcagccgccgccgcggtgcctcctcttcctctctcgggttctaatggtctgggggaacccgttggggccaagaccaaaatctacaacctgcagtctcttccgcctcccacgcttcagaagcgggaacctccgctgggccagttcttccgcgtccgggcacccatcgggtcctgcgcacgcgtccagcggccactccaatgggcccgcgggcacggagcgtgcgtgggagccccgcctcgaaatccgcctccaaaggggaggagcgtttccagggggcccggcgccttcctcgatggcattggcctggggaccctggcgcccaattttgaaaagaaccaatagtttgaaaatgctggagcatcagctttcaggaggagtttgggccaatattcatgggaaatagagaaaaacatggggtttccatgttatttcactcctaatttgtacgctccgacctctgtgatccccactcatgccttaaatccctcgattttgttggtctttgtctgcaggggctgatttctttttcagatcatccattcggatgcactagacaaaagagaagtgggaaaacaaacgcaatgggtaaaaataaagcgaatatcatgacagttcgtatagctaatgagaaactcagctcccttttgcaagcacctttagattcaacaaaactaggaaaagtcctgaagaacgggtagcaagcagaaccaaatgttttttcttactaggaattacagagtccctaacaatcatgcctcagcgtgggtgagatctggattttttttttttttttttttttaaacagagtctcgctctttcgcccaggctggagggcagtgcacgatcttgtctcactgcaacctctgccccaccccgcctgggttcaagcgattctcttgcctcagcctcccaagtagctgggattacaggcgcctgccaccacgcctggttaattttttgtatttttagtagagacggggtttcgccatgttggctaggctggtctcgaactcctgacctcaggtgatccacccgcctcggcctcccaaagtgctgggattacaggcacgagccaccgcgcccggtcaagatttggattttttatttaacaaacacctacataacacttgttatgtgctaggcactattctaagagttatagaaatattaactctgtcgtgggtgtgactggccagtggtgcaggtgctaaagaaatttacggagacagtcacaggtaacgaaaggcagatttattagagaatatatgaaaatatgttgcaaggatgcaatgggcagcactgcagaggagctgtctgcaaagaggcaggggctggagggaagttttatagggtcatgctggaggcgggtaggtgcagaaagaggtcatgctgctggggccactgtgtggaaggtgtgccctctggttgtttgtgttcattgttcttccccacctggggcccacctggcccctttctcattgttgcttattctcaggactccacatcccaccaccgtaacacccctcagaacaccaatgacaaatctttgacactggggctgaggtctcatcttccaactgcttcctgctgattaggggtgtggagttgaccccacctatggttgttggtctgtcaagagaccctgtgggtcattgtcccagattgtgggacttaggatattgaatcttgctggaggaagggactcatcacagagtgggagtatgtcaaggcaaaactggtgaccagccgaatccaggggagactcataaaggtagcaggcatcactggggagagactgatatcccatttacgcattacttgaaagtgaaactgctgaattctagaagataaaagtttgtttcttaagccagttactgaaaaggcaaacaaacaaacaaacaaaccccacaaccatttgcagtgtgactgtttttccttattggaagcccatttagttagcctggaagttaaactcaatgaaaaagtgtttaaatgtaattagacacaagaagagtgtattcagggttatgagtatagcaggtgaatacataactcttaggaaaagcgtgaaaagtttttttttttacattgagaatttagacatattttttaaaagccaagcg

SEQ ID NO: 1563540 - DNA, 4001 bp, Homo sapiens
ttatctctttctttgccttcactgtgcttgattaatatgtttttggctaattgtactctcatctccttttttggactaatgccatttctacagggtctcgcaaattggctctctacctaagatgaattgtctccttataaaagtgaaatacaataggctcaggaggtgagccaacctaaccttcactattacaagatgctaccttaaaacagaccctcgatgacttattgacatgaaaacacaagaccctaccactgaaattgaagagtcgattctctccaccgttttctaaaacctgccttttcactgaccctaagctacagaccacccttcttttttattcactgcaatgcatttcaggcagttttagaacctgaaaacattagggcaaatccaaatcacgtactacgatgtgaacataccacttaattacaagttattagataaattgtgatttattaaagtaaacatctgttaatgccaggattcctaaactaagcttagaaatagcagctctgagagacaggtgtcaagttgcacatctagttccaggggcttcgatctgacattccctggtgtaagttagtcggggcaagcaacctgtcagaagagccagaagctttctgcagttccttttacagagggacaacatggccccaggtagagggggaccgtttcctccacactgcccaaagttggagattaaactttcactccaccttgggacccaagtcactgtcaagcaaacaagtcgccaccccctcaggttgaagagcccaaatgagctcaaacgtgcactttaaggaaggaagattgcttgcatgggggcaaggagcccctgaatcctgtactccatcctccccaaccctgctcacctgagcccatggattaggggagcgctgctggatctcctcagggttcccccataagatgtgtcaggctcaaggtccagctccattttctcctgagccatgtcagacttgcaggcaggcacagcgggcagtgctcagctcctggtgcttagctatggactcccaagactctcactgcaggactgagctgctggggactggcagctgggggcgggggctaaggggcggaggcttggggacgggggcgggggctgggggcggagaaaagtaggagaggaggagggaaggaggatgatgatgaggaagggaggatgatggtgaggcaggagaggaggacgaagaggtagtggtggaaggtgacagaatgaaggaaaaggatgaaggaaagaaggatggagggaaaacaaggatggagggaggagggaagagggagggaaaaggataggtggaaaagcaggaggacagagaggataagaggagggcagaggggggaaagggagaggaagggggcggaggagggaggggaagggagagggcagaggggagggaggaggacagagggtaagggaaaagaagcgcaggggcgggaaagaaggaggtggtctgggaagaggagagaggagggagaagaggagggggaggaaactaggcagcggcggaactcatgctgctatctttccggctgaggaccacaagcggggccgggctacagatgctgcggctgcccgggcagcgctagcaccgaggacctgacagtcgggtaggacccggccgggcggccttggcggctccagctccccatgctcggggacccggtccagccccccatgctcccggacccggtcccggaggctcctcagccctgggatcggtgcttctcccctccctgcccccctcccgcctcgaggacaggttgggggttcggcctctcagccgccgccgcggtgcctcctcttcctctctcgggttctaatggtctgggggaacccgttggggccaagaccaaaatctacaacctgcagtctcttccgcctcccacgcttcagaagcgggaacctccgctgggccagttcttccgcgtccgggcacccatcgggtcctgcgcacgcgtccagcggccactccaatgggcccgcgggcacggagcgtgcgtgggagccccgcctcgaaatccgcctccaaaggggaggagcgtttccagggggcccggcgccttcctcgatggcattggcctggggaccctggcgcccaattttgaaaagaaccaatagtttgaaaatgctggagcatcagctttcaggaggagtttgggccaatattcatgggaaatagagaaaaacatggggtttccatgttatttcactcctaatttgtacgctccgacctctgtgatccccactcatgccttaaatccctcgattttgttggtctttgtctgcaggggctgatttctttttcagatcatccattcggatgcactagacaaaagagaagtgggaaaacaaacgcaatgggtaaaaataaagcgaatatcatgacagttcgtatagctaatgagaaactcagctcccttttgcaagcacctttagattcaacaaaactaggaaaagtcctgaagaacgggtagcaagcagaaccaaatgttttttcttactaggaattacagagtccctaacaatcatgcctcagcgtgggtgagatctggattttttttttttttttttttttaaacagagtctcgctctttcgcccaggctggagggcagtgcacgatcttgtctcactgcaacctctgccccaccccgcctgggttcaagcgattctcttgcctcagcctcccaagtagctgggattacaggcgcctgccaccacgcctggttaattttttgtatttttagtagagacggggtttcgccatgttggctaggctggtctcgaactcctgacctcaggtgatccacccgcctcggcctcccaaagtgctgggattacaggcacgagccaccgcgcccggtcaagatttggattttttatttaacaaacacctacataacacttgttatgtgctaggcactattctaagagttatagaaatattaactctgtcgtgggtgtgactggccagtggtgcaggtgctaaagaaatttacggagacagtcacaggtaacgaaaggcagatttattagagaatatatgaaaatatgttgcaaggatgcaatgggcagcactgcagaggagctgtctgcaaagaggcaggggctggagggaagttttatagggtcatgctggaggcgggtaggtgcagaaagaggtcatgctgctggggccactgtgtggaaggtgtgccctctggttgtttgtgttcattgttcttccccacctggggcccacctggcccctttctcattgttgcttattctcaggactccacatcccaccaccgtaacacccctcagaacaccaatgacaaatctttgacactggggctgaggtctcatcttccaactgcttcctgctgattaggggtgtggagttgaccccacctatggttgttggtctgtcaagagaccctgtgggtcattgtcccagattgtgggacttaggatattgaatcttgctggaggaagggactcatcacagagtgggagtatgtcaaggcaaaactggtgaccagccgaatccaggggagactcataaaggtagcaggcatcactggggagagactgatatcccatttacgcattacttgaaagtgaaactgctgaattctagaagataaaagtttgtttcttaagccagttactgaaaaggcaaacaaacaaacaaacaaaccccacaaccatttgcagtgtgactgtttttccttattggaagcccatttagttagcctggaagttaaactcaatgaaaaagtgtttaaatgtaattagacacaagaagagtgtattcagggttatgagtatagcaggtgaatacataactcttaggaaaagcgtgaaaagtttttttttttacattgagaatttagacatattttttaaaagccaagcgtacagaattaagttatattagaggaaaacattgcttaatttttttgattttcaagatgaaatattttagcattaggc

SEQ ID NO: 1563541 - DNA, 4001 bp, Homo sapiens
cctacctttgaacactgctgtttgatggaataaacatagctgagattgttgccccttctgcctcaaatgctctccctcctgccaacatctattaaaatccttcctgtccttccacatccatcttgaatgccatacccttcagtgaaggcatggcacaaacctctcttcaatccacaaacggaatgcaatcactctctcctttgaacccaaagagtacactgggagatgagatgcttcttgagacacctactttgtctcttaattaaagagaaatgtggatgtgtcttaaacccattggtagagaggtgttttgttaatctttgtataatatccctgcagtgcctagcagagggcgatgcccacaataaggatgagaattccagaaggattttcagaactgaactgcactgggctttcagggcccactgagatcacctaattcagctctcttaattttcaaagagagaacagcctcagaaaggttaaatgactcattcgtgatcatagctagttagtgaaaactgggaccaggcctggtctccttgccccttcttgtgtcacatcatgctgtgttttcagtgattatttaaatcatgattcaaaaaacagtatgtttttgctacaatagtctaaatacaggtcaatagaattgctgaagtccctagcaattgcttgcttatgagatttcaaaagacaatcagaaaaagaccagtttattgttatagtaaccaaaataaatgcagggccaaggacagcaacaggaaagcaaaaagtcactcctacattccctcagtttcaaaattatacttaataaatgaaaaagtcaacctgttttttccccaaaatatggatgttataatcagttcaacagcaaggattatctctttctttgccttcactgtgcttgattaatatgtttttggctaattgtactctcatctccttttttggactaatgccatttctacagggtctcgcaaattggctctctacctaagatgaattgtctccttataaaagtgaaatacaataggctcaggaggtgagccaacctaaccttcactattacaagatgctaccttaaaacagaccctcgatgacttattgacatgaaaacacaagaccctaccactgaaattgaagagtcgattctctccaccgttttctaaaacctgccttttcactgaccctaagctacagaccacccttcttttttattcactgcaatgcatttcaggcagttttagaacctgaaaacattagggcaaatccaaatcacgtactacgatgtgaacataccacttaattacaagttattagataaattgtgatttattaaagtaaacatctgttaatgccaggattcctaaactaagcttagaaatagcagctctgagagacaggtgtcaagttgcacatctagttccaggggcttcgatctgacattccctggtgtaagttagtcggggcaagcaacctgtcagaagagccagaagctttctgcagttccttttacagagggacaacatggccccaggtagagggggaccgtttcctccacactgcccaaagttggagattaaactttcactccaccttgggacccaagtcactgtcaagcaaacaagtcgccaccccctcaggttgaagagcccaaatgagctcaaacgtgcactttaaggaaggaagattgcttgcatgggggcaaggagcccctgaatcctgtactccatcctccccaaccctgctcacctgagcccatggattaggggagcgctgctggatctcctcagggttcccccataagatgtgtcaggctcaaggtccagctccattttctcctgagccatgtcagacttgcaggcaggcacagcgggcagtgctcagctcctggtgcttagctatggactcccaagactctcactgcaggactgagctgctggggactggcagctgggggcgggggctaaggggcggaggcttggggacgggggcgggggctgggggcggagaaaagtaggagaggaggagggaaggaggatgatgatgaggaagggaggatgatggtgaggcaggagaggaggacgaagaggtagtggtggaaggtgacagaatgaaggaaaaggatgaaggaaagaaggatggagggaaaacaaggatggagggaggagggaagagggagggaaaaggataggtggaaaagcaggaggacagagaggataagaggagggcagaggggggaaagggagaggaagggggcggaggagggaggggaagggagagggcagaggggagggaggaggacagagggtaagggaaaagaagcgcaggggcgggaaagaaggaggtggtctgggaagaggagagaggagggagaagaggagggggaggaaactaggcagcggcggaactcatgctgctatctttccggctgaggaccacaagcggggccgggctacagatgctgcggctgcccgggcagcgctagcaccgaggacctgacagtcgggtaggacccggccgggcggccttggcggctccagctccccatgctcggggacccggtccagccccccatgctcccggacccggtcccggaggctcctcagccctgggatcggtgcttctcccctccctgcccccctcccgcctcgaggacaggttgggggttcggcctctcagccgccgccgcggtgcctcctcttcctctctcgggttctaatggtctgggggaacccgttggggccaagaccaaaatctacaacctgcagtctcttccgcctcccacgcttcagaagcgggaacctccgctgggccagttcttccgcgtccgggcacccatcgggtcctgcgcacgcgtccagcggccactccaatgggcccgcgggcacggagcgtgcgtgggagccccgcctcgaaatccgcctccaaaggggaggagcgtttccagggggcccggcgccttcctcgatggcattggcctggggaccctggcgcccaattttgaaaagaaccaatagtttgaaaatgctggagcatcagctttcaggaggagtttgggccaatattcatgggaaatagagaaaaacatggggtttccatgttatttcactcctaatttgtacgctccgacctctgtgatccccactcatgccttaaatccctcgattttgttggtctttgtctgcaggggctgatttctttttcagatcatccattcggatgcactagacaaaagagaagtgggaaaacaaacgcaatgggtaaaaataaagcgaatatcatgacagttcgtatagctaatgagaaactcagctcccttttgcaagcacctttagattcaacaaaactaggaaaagtcctgaagaacgggtagcaagcagaaccaaatgttttttcttactaggaattacagagtccctaacaatcatgcctcagcgtgggtgagatctggattttttttttttttttttttttaaacagagtctcgctctttcgcccaggctggagggcagtgcacgatcttgtctcactgcaacctctgccccaccccgcctgggttcaagcgattctcttgcctcagcctcccaagtagctgggattacaggcgcctgccaccacgcctggttaattttttgtatttttagtagagacggggtttcgccatgttggctaggctggtctcgaactcctgacctcaggtgatccacccgcctcggcctcccaaagtgctgggattacaggcacgagccaccgcgcccggtcaagatttggattttttatttaacaaacacctacataacacttgttatgtgctaggcactattctaagagttatagaaatattaactctgtcgtgggtgtgactggccagtggtgcaggtgctaaagaaatttacggagacagtcacaggtaacgaaaggcagatttattagagaatatatgaaaatatgttgcaaggatgcaatgggcagcactgcagaggagctgtctgcaaaga

SEQ ID NO: 1563542 - DNA, 4001 bp, Homo sapiens
actccgtcttaaaaaaaaaaaaaaaaggaaacaagatttagtaatcccagatcttcagaaatacagttaaccatcatttagtgtagtgtttctaaatccttttttcattattgaccctctaaaaagcctttttagacatttttcccctaattgctcccccttcgtgaaattttaataacacatatatagtatatatctgtgtacatactgtatgtatatctgcgctttatacataaaaagagtaaaaatttttcacactcccccaagaactattttctcttccccttgggggaagtatcacccagtgagaatgtgtaatttaggagatcaagcttctgtggtaccaaaactttctgctccaataaaaaataggtgtaggccaggagcagtggctcacgtctgtaataccagcactttgggaggctgaggcaggcggatcccctgaggccaggagttcgagaccagcctggccaacatggtgaaaccctgtctctactaaaaatacaaaaaattaggccgggcacggtggcttacgcctgtaatcccagcactttgggaggccgaggcgggcggatcacgaggtcaggagatcaagaccatcctgactaacacggtgaaaccctgtctctactaaaaatacaaaaaattagccgggagtgttggtgggcgcctgtagtcccagctacttgggaggctgagtcaggagaatggcgtgaacccgggaggtggagcttgcagtgagccgagatcacgccactgcactccagcctgggcgacagagtgagactccgtctcaaaaataaataaacaaataaataaaaaataaaaatacaaaaaattaccaggtgtggtggtgggcgcctgtaatcctagctactagggaggctgaggcatgagaattgcttgaagccaggaggcggaggttacagtaagctgagatcgtgccaatgcactccagcctgggcgacagagcaagactccgtctcaaaaaaagacaaaaaaaaaaatgtaaaaaagtccaaagcttatttgcttgacaaccatttccattcaagcggctggaggtgaaggtcagaggtgacaaagcagctgaaatgacaaatattacagtcatggcagaagatctggaggtgagtgggggaggatactaagtttcttcaaaggagtgggtaagaaatgggttgaagttagaaaaaagccgtgctccacaccaactggctgctactttcgggtccgagtggactatcaggggaggatgttcagattcagatgtttgtcaacctcagggtgggtgcgcgctccccctcaggtcagcccgtcccactacccccacccaaggttgagggtgggatctccggacaccaggaacaagggagttacctgcagaacctcaacaaataaagggacgggaattctataggaaatcactttcccgaacacctcctccccaccgcttgcctcctccagtatctcaacccggctcacccaagtccattgatcaaaggggcactgttgactcttctcagaatgttgccgtctgcggtagtggaactcggcagcgacttgaaacctagtttcattttctcctgtgccatgtccgggtcgaggaataagttctcaaggctttccggctcccgtccacacaaggacaagtctacttagtgggcaggtgatgtaaggagagaggcaaaggggaaaaagagaagagaggagaaagctcttaggcgagtaggggtgcccacctttgcagccctagcagccctaacatcagtgaacacaaagttaggcagaactggctccgaaccgcctatctcccatgatcggggcctctaacgatgagaagatcccccacctccaagtctataatgtaactggggaatttaatctgtcaccgccgcgaatccttctccatctctctcagccctggcaactcatggtaagcctttccggccaaaacaaaaactacaatctgccgcctttgacaatcagttgggtcccgcccctcagagcctgcgataagctatcagccggacgacgcctgttgtgatgcaggcaatgacgtcacttcaggcgccttagtcagctttgccaggggcgcacgcgcagttaagaaaccgctttatccccatgtcctgccctccttcctctttccccaatgcccacttaccgtggttgtgcctctactcttttactaaccctggcatggtttccttaagcattatttagaaatgaaagcgttgggaggagtgaggtccttcctgccctatgcctaattctcatttttcttatccctttatgactgaggccaacaagcttctaacctcctatgatgcatttttccatcctgtaacagcagacacactacacctttgtaattttagaaaagcaaaagtctgaaaaaaaaaaaaaaaaaaagatactgctacctaagtgcttagaggccacttggtcccaaagggtcttgctaaggtgctaacctaactgagctcatttggcaaacgaattactgttttcagtgtggtttctttctttcttttttaaaccataatcgtacagttttttgtttttttttttttgagatggaatttcgctcttgttgctcaggctggagtgcagtggccgcgatctcggctcactgcaacctccacctcccaggttcaagcgattctcctgcctcagcctcccgagtagctgggattacaggtgctcgccaccacgcctggttaatttttgtattttagtagagacggggtttcaccatgttggccaggctggtctcgaactcctggacctcaggtgatccgcccgcctcgtcctcccaaagtgctgggattacaggcgtgagccaccgcgcctgcctcagtgtgtatttttacattatatataatctggctcctcacagctattcatataaaaaataaagacctcagctaatttacaaagatttgagttaaagcagtgaggcttttttaaaaacaaatatctcagaatttagtatcaatgcaaatcagtgttttcatttcaggtagtattagaagctacatacattctaagaatgctgccatggctcatatcgttttaagaactactcttttagaaattttcaccatcacttaatgagccacactgagtactgaaatcttaactccatgctaataattttgtaaaaccacacattttagtaaccatatagagaactggcagacaaggcaaataaacctagtgaaatgggagttattaattaaaatagtcataacactggtatagcactttacggataacatttttttttttttgagacggagtttcgctcttgttgcccaggctggagtgcaatggcgcaatcttggctcaccacaacctccacctccctggttcaagcgattctcctgactcagcctccagagtagctgggattacaggcatgtgccaccactcccagctaattttgtatttttagtagagatggggtttctccatgttggtcaggctggtctcgaactcccgacctcaggtgatccacccgcctcggcctcccaaagtgctgggattacaggtatgagcctccacgcctggcctacaaaatgttttcacatacttatctggattggttcaatcatcaaccctgctcagctacccagtggtgaacttaaaataatgggacagtcttgagatagttcgtgacaagttatgacatgtaaggtaataaatatgtattctttgttcattctgggaatagaataagacaaacttgagtatattaggcagaattagattacttaaatcccagacatgaggatgatgtggagtctccattccttatataagacagattagtaatagctaccgtttgttgggcacttactatgtgccaggtactgtcctaatcactttaaataggtgattgcatttaaagtttacaataattctttgaggtaggcaccatcacaatgcccatttttcacaggaggaaaccaaagcccagaggggtttactcaagt

SEQ ID NO: 1563543 - DNA, 4001 bp, Homo sapiens
tttctgcacctacccgcctccagcatgaccctataaaacttccctccagcccctgcctctttgcagacagctcctctgcagtgctgcccattgcatccttgcaacatattttcatatattctctaataaatctgcctttcgttacctgtgactgtctccgtaaatttctttagcacctgcaccactggccagtcacacccacgacagagttaatatttctataactcttagaatagtgcctagcacataacaagtgttatgtaggtgtttgttaaataaaaaatccaaatcttgaccgggcgcggtggctcgtgcctgtaatcccagcactttgggaggccgaggcgggtggatcacctgaggtcaggagttcgagaccagcctagccaacatggcgaaaccccgtctctactaaaaatacaaaaaattaaccaggcgtggtggcaggcgcctgtaatcccagctacttgggaggctgaggcaagagaatcgcttgaacccaggcggggtggggcagaggttgcagtgagacaagatcgtgcactgccctccagcctgggcgaaagagcgagactctgtttaaaaaaaaaaaaaaaaaaaaaatccagatctcacccacgctgaggcatgattgttagggactctgtaattcctagtaagaaaaaacatttggttctgcttgctacccgttcttcaggacttttcctagttttgttgaatctaaaggtgcttgcaaaagggagctgagtttctcattagctatacgaactgtcatgatattcgctttatttttacccattgcgtttgttttcccacttctcttttgtctagtgcatccgaatggatgatctgaaaaagaaatcagcccctgcagacaaagaccaacaaaatcgagggatttaaggcatgagtggggatcacagaggtcggagcgtacaaattaggagtgaaataacatggaaaccccatgtttttctctatttcccatgaatattggcccaaactcctcctgaaagctgatgctccagcattttcaaactattggttcttttcaaaattgggcgccagggtccccaggccaatgccatcgaggaaggcgccgggccccctggaaacgctcctcccctttggaggcggatttcgaggcggggctcccacgcacgctccgtgcccgcgggcccattggagtggccgctggacgcgtgcgcaggacccgatgggtgcccggacgcggaagaactggcccagcggaggttcccgcttctgaagcgtgggaggcggaagagactgcaggttgtagattttggtcttggccccaacgggttcccccagaccattagaacccgagagaggaagaggaggcaccgcggcggcggctgagaggccgaacccccaacctgtcctcgaggcgggaggggggcagggaggggagaagcaccgatcccagggctgaggagcctccgggaccgggtccgggagcatggggggctggaccgggtccccgagcatggggagctggagccgccaaggccgcccggccgggtcctacccgactgtcaggtcctcggtgctagcgctgcccgggcagccgcagcatctgtagcccggccccgcttgtggtcctcagccggaaagatagcagcatgagttccgccgctgcctagtttcctccccctcctcttctccctcctctctcctcttcccagaccacctccttctttcccgcccctgcgcttcttttcccttaccctctgtcctcctccctcccctctgccctctcccttcccctccctcctccgcccccttcctctccctttcccccctctgccctcctcttatcctctctgtcctcctgcttttccacctatccttttccctccctcttccctcctccctccatccttgttttccctccatccttctttccttcatccttttccttcattctgtcaccttccaccactacctcttcgtcctcctctcctgcctcaccatcatcctcccttcctcatcatcatcctccttccctcctcctctcctacttttctccgcccccagcccccgcccccgtccccaagcctccgccccttagcccccgcccccagctgccagtccccagcagctcagtcctgcagtgagagtcttgggagtccatagctaagcaccaggagctgagcactgcccgctgtgcctgcctgcaagtctgacatggctcaggagaaaatggagctggaccttgagcctgacacatcttatgggggaaccctgaggagatccagcagcgctcccctaatccatgggctcaggtgagcagggttggggaggatggagtacaggattcaggggctccttgcccccatgcaagcaatcttccttccttaaagtgcacgtttgagctcatttgggctcttcaacctgagggggtggcgacttgtttgcttgacagtgacttgggtcccaaggtggagtgaaagtttaatctccaactttgggcagtgtggaggaaacggtccccctctacctggggccatgttgtccctctgtaaaaggaactgcagaaagcttctggctcttctgacaggttgcttgccccgactaacttacaccagggaatgtcagatcgaagcccctggaactagatgtgcaacttgacacctgtctctcagagctgctatttctaagcttagtttaggaatcctggcattaacagatgtttactttaataaatcacaatttatctaataacttgtaattaagtggtatgttcacatcgtagtacgtgatttggatttgccctaatgttttcaggttctaaaactgcctgaaatgcattgcagtgaataaaaaagaagggtggtctgtagcttagggtcagtgaaaaggcaggttttagaaaacggtggagagaatcgactcttcaatttcagtggtagggtcttgtgttttcatgtcaataagtcatcgagggtctgttttaaggtagcatcttgtaatagtgaaggttaggttggctcacctcctgagcctattgtatttcacttttataaggagacaattcatcttaggtagagagccaatttgcgagaccctgtagaaatggcattagtccaaaaaaggagatgagagtacaattagccaaaaacatattaatcaagcacagtgaaggcaaagaaagagataatccttgctgttgaactgattataacatccatattttggggaaaaaacaggttgactttttcatttattaagtataattttgaaactgagggaatgtaggagtgactttttgctttcctgttgctgtccttggccctgcatttattttggttactataacaataaactggtctttttctgattgtcttttgaaatctcataagcaagcaattgctagggacttcagcaattctattgacctgtatttagactattgtagcaaaaacatactgttttttgaatcatgatttaaataatcactgaaaacacagcatgatgtgacacaagaaggggcaaggagaccaggcctggtcccagttttcactaactagctatgatcacgaatgagtcatttaacctttctgaggctgttctctctttgaaaattaagagagctgaattaggtgatctcagtgggccctgaaagcccagtgcagttcagttctgaaaatccttctggaattctcatccttattgtgggcatcgccctctgctaggcactgcagggatattatacaaagattaacaaaacacctctctaccaatgggtttaagacacatccacatttctctttaattaagagacaaagtaggtgtctcaagaagcatctcatctcccagtgtactctttgggttcaaaggagagagtgattgcattccgtttgtggattgaagagaggtttgtgccatgccttcactgaagggtatggcattcaagatggatgtggaaggacaggaaggattttaatagatgttggcaggagggagagcatttgaggcag

SEQ ID NO: 1563544 - DNA, 4001 bp, Homo sapiens
aaaaaaaaggaaacaagatttagtaatcccagatcttcagaaatacagttaaccatcatttagtgtagtgtttctaaatccttttttcattattgaccctctaaaaagcctttttagacatttttcccctaattgctcccccttcgtgaaattttaataacacatatatagtatatatctgtgtacatactgtatgtatatctgcgctttatacataaaaagagtaaaaatttttcacactcccccaagaactattttctcttccccttgggggaagtatcacccagtgagaatgtgtaatttaggagatcaagcttctgtggtaccaaaactttctgctccaataaaaaataggtgtaggccaggagcagtggctcacgtctgtaataccagcactttgggaggctgaggcaggcggatcccctgaggccaggagttcgagaccagcctggccaacatggtgaaaccctgtctctactaaaaatacaaaaaattaggccgggcacggtggcttacgcctgtaatcccagcactttgggaggccgaggcgggcggatcacgaggtcaggagatcaagaccatcctgactaacacggtgaaaccctgtctctactaaaaatacaaaaaattagccgggagtgttggtgggcgcctgtagtcccagctacttgggaggctgagtcaggagaatggcgtgaacccgggaggtggagcttgcagtgagccgagatcacgccactgcactccagcctgggcgacagagtgagactccgtctcaaaaataaataaacaaataaataaaaaataaaaatacaaaaaattaccaggtgtggtggtgggcgcctgtaatcctagctactagggaggctgaggcatgagaattgcttgaagccaggaggcggaggttacagtaagctgagatcgtgccaatgcactccagcctgggcgacagagcaagactccgtctcaaaaaaagacaaaaaaaaaaatgtaaaaaagtccaaagcttatttgcttgacaaccatttccattcaagcggctggaggtgaaggtcagaggtgacaaagcagctgaaatgacaaatattacagtcatggcagaagatctggaggtgagtgggggaggatactaagtttcttcaaaggagtgggtaagaaatgggttgaagttagaaaaaagccgtgctccacaccaactggctgctactttcgggtccgagtggactatcaggggaggatgttcagattcagatgtttgtcaacctcagggtgggtgcgcgctccccctcaggtcagcccgtcccactacccccacccaaggttgagggtgggatctccggacaccaggaacaagggagttacctgcagaacctcaacaaataaagggacgggaattctataggaaatcactttcccgaacacctcctccccaccgcttgcctcctccagtatctcaacccggctcacccaagtccattgatcaaaggggcactgttgactcttctcagaatgttgccgtctgcggtagtggaactcggcagcgacttgaaacctagtttcattttctcctgtgccatgtccgggtcgaggaataagttctcaaggctttccggctcccgtccacacaaggacaagtctacttagtgggcaggtgatgtaaggagagaggcaaaggggaaaaagagaagagaggagaaagctcttaggcgagtaggggtgcccacctttgcagccctagcagccctaacatcagtgaacacaaagttaggcagaactggctccgaaccgcctatctcccatgatcggggcctctaacgatgagaagatcccccacctccaagtctataatgtaactggggaatttaatctgtcaccgccgcgaatccttctccatctctctcagccctggcaactcatggtaagcctttccggccaaaacaaaaactacaatctgccgcctttgacaatcagttgggtcccgcccctcagagcctgcgataagctatcagccggacgacgcctgttgtgatgcaggcaatgacgtcacttcaggcgccttagtcagctttgccaggggcgcacgcgcagttaagaaaccgctttatccccatgtcctgccctccttcctctttccccaatgcccacttaccgtggttgtgcctctactcttttactaaccctggcatggtttccttaagcattatttagaaatgaaagcgttgggaggagtgaggtccttcctgccctatgcctaattctcatttttcttatccctttatgactgaggccaacaagcttctaacctcctatgatgcatttttccatcctgtaacagcagacacactacacctttgtaattttagaaaagcaaaagtctgaaaaaaaaaaaaaaaaaaagatactgctacctaagtgcttagaggccacttggtcccaaagggtcttgctaaggtgctaacctaactgagctcatttggcaaacgaattactgttttcagtgtggtttctttctttcttttttaaaccataatcgtacagttttttgtttttttttttttgagatggaatttcgctcttgttgctcaggctggagtgcagtggccgcgatctcggctcactgcaacctccacctcccaggttcaagcgattctcctgcctcagcctcccgagtagctgggattacaggtgctcgccaccacgcctggttaatttttgtattttagtagagacggggtttcaccatgttggccaggctggtctcgaactcctggacctcaggtgatccgcccgcctcgtcctcccaaagtgctgggattacaggcgtgagccaccgcgcctgcctcagtgtgtatttttacattatatataatctggctcctcacagctattcatataaaaaataaagacctcagctaatttacaaagatttgagttaaagcagtgaggcttttttaaaaacaaatatctcagaatttagtatcaatgcaaatcagtgttttcatttcaggtagtattagaagctacatacattctaagaatgctgccatggctcatatcgttttaagaactactcttttagaaattttcaccatcacttaatgagccacactgagtactgaaatcttaactccatgctaataattttgtaaaaccacacattttagtaaccatatagagaactggcagacaaggcaaataaacctagtgaaatgggagttattaattaaaatagtcataacactggtatagcactttacggataacatttttttttttttgagacggagtttcgctcttgttgcccaggctggagtgcaatggcgcaatcttggctcaccacaacctccacctccctggttcaagcgattctcctgactcagcctccagagtagctgggattacaggcatgtgccaccactcccagctaattttgtatttttagtagagatggggtttctccatgttggtcaggctggtctcgaactcccgacctcaggtgatccacccgcctcggcctcccaaagtgctgggattacaggtatgagcctccacgcctggcctacaaaatgttttcacatacttatctggattggttcaatcatcaaccctgctcagctacccagtggtgaacttaaaataatgggacagtcttgagatagttcgtgacaagttatgacatgtaaggtaataaatatgtattctttgttcattctgggaatagaataagacaaacttgagtatattaggcagaattagattacttaaatcccagacatgaggatgatgtggagtctccattccttatataagacagattagtaatagctaccgtttgttgggcacttactatgtgccaggtactgtcctaatcactttaaataggtgattgcatttaaagtttacaataattctttgaggtaggcaccatcacaatgcccatttttcacaggaggaaaccaaagcccagaggggtttactcaagttgcaactactaagtggca

SEQ ID NO: 1563545 - DNA, 4001 bp, Homo sapiens
agcctgggcaacagagtaagactccatcccaaaaaaaaaaaaaaaaaaaaaagaaggcagagagttgttgactgagtgctgccctgcaagcccaccttaggataatctatcgggatattgagcttttcccagagatagatggggtggcagaggcatgttagcacagtagatttcaaagattagcatgcagagatatgttgaagataatttttttttctgcccattagggaaggtggtaattgtattgtgtttcaggtcattcattaaacaagtttgtacctaaattaactacagttctgcattcctttctccactacctacccaattaaagcaatataaatgtaaatgctttttctgaagtatctaagccacttagctggttccctgataatgcgttaaataaaactgtgagaggtgttcaccaacaaatgtgtgagatgtatggcttgtaaccatttggggtatatgcttttagacagttttttggaaatgagggaagaaaaagcaccctttctgactattccttaccttatcttggccacattcagattaaggttcatttcctaagaggcacaaaactgcttgtttacaacattaatcgtctgggattggtcactggtaagatctccatttgcaggacaccacaggactctgtgtcaacatcagtcatagcatggcagggcatatagcttttgaacaagatatggaccccatttacagaaccagggagggaaaagtgccatattcattgagaccatttcttttcaataatgtctgacatttattgaaaataaggaaaagactttctccaggtagtgtattagagcagagcagaatgcaggggttactgtgttgaacaaaaggcacacatcagagagacagttgcaaactcagaatactgcgttatgggcaaaactaactggtccacaagagaaaatgagagactcgatttggctgccaggaacacctgggcctaggcaagaacacaagaggtttctgggggtggggaggaaataggtctcgctgaaggtgacagatcccttggggggcggccagctgtctggatcactgtccagggactgtggccagcccagatacctccgaggtgagtccagatcactaggagcagcagtctgtcggtgggatgcgatggatggcgatggctgtggcagcgcaggtctgtgggcagaatgatgtagtcgtctggcagtctggtggggaggagagggcttggcagcggcggcagtgggtggtctgtccagtgtgtaacaggagcccagcttgcagctggagcgcaggacagcgtccaaatgtacatgggaggggctggctggctggaaggagagggcggcggctcgctccagagtgaggcccaggggcggcagcaggagcctggagcgctattcctggaacaaaggcaagcactacgcgggagggaacaggagcgcaggggacatcgcggcggctcgagggggagggaggcgcggagggagggcgccggtggcgaccctggcggcggccagtaacacagcggaccctccccagagcacccgcccccaggcccgagggtctcccggcctagaagtcctcgtcctcctcccatccaaagactcgcttcatctcggccagaaagccccggtaatcattgaggagggggctctccttcttgatgtaggggatcacccactgcagggcgggccctgtgaggcgggtgatgaggaacgtcaccttcagggcgtcgctggagaacgtgttctcgtccacgaacatgtaggagcccgtctgcacgatgaactccgggagtcggtcggtatcgccgtcaaacgtctcgggaaagggaatcgggttcctccagcgacgcgtcgcaggccggatcggcaaggccaggagggcctttatcagctgcacccgaccgtccatcgctgctcctcgcttcgctggacgtcaatgggctccacccggctctgcagaggtcagtaccgaggcgtcgccggaaatgcgtgtccacgaaggccggcctaggcttgggtgggcggggccacgagcggggctccaaccctctcatggactccgcccacaaagccgggtggtccctagtacgcaggcgtgtcgtggggtatacactggcgaagaggggcctaaagccctcaaggaggccggcttgtatcggagaggctgggctaaagtttcctgaggtagcgggacggggagcaggagaggaaccagggagacctggtggtgtacggggcgcggggagctcgctccgaggggatgttaggggccctacgtagttctggtagttgaggagtccttcggcagcactcgtccccacctctcatcagcccttgggtatgcattcaaggagccttggccctagacgccactcgtatgaggttctgtgaacacattttcctgctgctgctttcatctctcaaccagattattggctccctattttgcaacattaatagagaagccccacatattagcaaatacaatccagagcagcatattcaaagagtaatgcaccacgcttgagggatggatactccattctccatgatgtgattattaacacctagtatttgatagcacaagatgactacagtcaaaataatttaattgtacatttaaaaataactaaaagtataattggattgtttgtagcacaaaggataaacgcttgaggggaatggatgccccatttaccattatgtgatcattatgcattgtgtgcctatgttaaagcatttcatgtatccaataaatacgtatacctattatgtacccacaaaaagtataaataattttttaaaaagaataatataccacgagcagttaatgtaaggagggttaaatattaagaaatctcttaatttgttataaaagctgccctcagttctctgccatgttgccctgtccacaggcagttcacaacagtgccgcttgtttcttcatggaacaaagggagaatgtgtctccttgaaagatggagtcatgaaggggtggccagcccctccacacctgtgggagggtttcttgtcaggtgggacgagagactgagaaaagaagagacaaagtatagagaaagaaaagtgggcccaggggaccagcgctcagcatacggaggacccgcgctggcactggtctctgagttccctcagtatttattgatcattatctctaccatctcggagaggggcacgtggcaggacaatagggtaatagtggggagagggtcagcaggaaaacatgcgaacaaaggtctctgtgccataattaagtttaaggaaaggtgctgtgccttgatgtgcacgtatgcaaacatcttggtgcattaaagagcagtattgccgccagcatgtctcacttccagccctaaggtggttttctcctatctcagtaaatggaacatatgatcgggttttacaccgagacattccattgcccagggacgatcaggagacagatgccttcctcttatctcaactgcaaagaggccttcctcttttactaatcctcctcagcacaggccctttacaggtgtcgggctaggggacggtcaagtctttccgttcccaggaggccatatctcaggctatcatatggggagaaaccttggacaatacctggctttcctaggcagaggtccctgcagccttcggcagcctattgtgtccctgggtacttgagattagagaatggtgatgacttttaacaagcatactgccttcaagcacttttttaacaaagtgcatcctgcatagccctaaatccattaaaccttgagtcaacacagcacatgtctctgcaagcacagggttggggctagggttacagattaacagcatctcaaggcagaagaatttctcttagtacagaacaaaatggagtctcttatgtctacttctttctacatagacacagtaacagtctgatctctctttcttttccccacaagtcatgtataaactaacgtaatcatgggagttacatctcat

SEQ ID NO: 1563546 - DNA, 4001 bp, Homo sapiens
tgatggaacagaggctgtttatagcactatagatttaagagattagcctacagataaaaagtaatgagtattaacttttattctgctcattagagaaagttataattgtattataactaaattataatacaattatataattgtattataattgtattatatacaattgtataatacaattatacaatataataatataatataaattgtattataacctaaattaataatcacagctctgcatccctttccccattacctccatattcaaggttttataaatataaaacacctctttcatagaacacctctgcaattctgatgtttcattaatgaatctctggttaaataaaactttgacaggtgttcacaaacaaatgtatgggatttctggtatgtagcaatttgagatttgtgttttgtagccattttttgaaaataaggaaaccttttacaaaaagcttttccacagcttttgacattgccttggccaaaatcagatcaatgtctgcctcaaaagtggcatgaaactgcgtggtttagaagggtcatcatttggcattagatggttgccgataagatctccatccctaggacactccacaggactcagtcttttgtttttataatgcaagagtcaacttcagccgtagtatgacagggcacatagcatttgaagaagacatggaccctatttacagaaccagggagggaaaggtgccatattcattgagactccatttctatttaatagtgtctgacatttattaaaaataaggaaaaaacctttgtacaggtagtgtattagagcagggaagggagcagggcttactgtgttgaacaaaaggcacccatcagagagacagctgcaaattcagaagaaaacaggattctaggcaaaactaactggtccacaggagaaaatgagagattcgatttggttgccaggcacacttaagccctggcagctatgtggcaggaacacaagaggtctctggggatggggaggaaatgggtctcgctgaaggtgacaggctccttgggggacggccagctgtctggatcactgtccaggggctgtgtccagctcggatacctccgaggtgagtccacatcactaggagccacagtctgttggtgagatgcggtggatggcgatggcagtggtagcgtaggtctgtgggcagaatgatgtagttggctggcagtctggaggagtggaggtgggttggcagcagcggctgtgggtggtctgtccagtatgtaacaggagcccagcttgcacctgaagtgcaggacagcgtccaaatgtgcatggaggggctgggctggcaaaagagggcggaggcagcgcgctctagagtgcggcccaggagctgcagcaggagcctggagcgctattcctggaacaaaggcaagcactacgcgggaggggacaggagcgcaggggacatcgcggcggctcgagggggagggaggcgcggagggagggcgcctgtggagaccctagcggtggccactggcacagcgaactcttcccagagcacccgcccccaggcccaagggtctcccggcctagaagtcctcgtcctcctcccatccaaagacccgcttcatctcggccaggaagccccggtaatcattgagcagggggctctccttcctgatgtaggggatcacccactgcagggctggccccgtgaggcgggtgatgaggaacgtcaccttcagggcgtcgttggagaacgtgttctcgtccacgaacatgtaggagctcgtctgcacgatgaactccgggagtcggtcggtatctccgtcaaacgtctcgggaaagggaatcgggttcctccagcgacgcgccgcgggccggaggggcccggccaggagggccttcatcagctgcacccgaccgtccatcgtgccgcgcgcgctccgcggagtttcgctgggttgcgtgggggtcagcgctaaggcgtcgccggaagcgcatgtcgagggtgggggcccgggccgggacgggctgtgggcggagccatgggggagagcccaggcgcttgcgcgagctccgcccacaaagacttgtggtcactagtgcgctggtgcgtcacagggcgcggaagggcaatgccaggagttctggggtgggtctcatactgtggaggaggccgtgtagcctcagaggagtagggcggagattatgcgaggcgcgccagtggggctctcaggacagcaggcggtgtgcggggaggctgagcctgttgcccctggagagcagaagatccatgttctggagatcgatgcggcctcctgccgcactcctgacccctcactctttagtccttggacattgctttcagaaccctgggctctggacgccacttgagtagagttctgtgaacacatttttttttgcttcttcgtatatgtctcagtcagattatttgctccctgctttgcaacattaatgggaaaatcccaaatattagcaaatataatccagagcagcatattcaaagtgtaatgtgccataagcagttaatgaaaggtgggttaaattctaagaaatctcttaatttgctatattaagacaccaaaaggaggacaatcagttgattatcacaagagaagttgaaagaggaaaatgagaatggttgggtgctttccaaacatgacattatacgtgttaatacataagaataaaggaaagaaataacaaagtttcacaaattggaaagggggaaggaaaattaagcattacactttgtatcctaatttagttgtgtggctgagtacaaaattaatagtaattcatcactagatttcacatatgcagaaaataacctattaaaatatataatttggctttgagaggccgaggtgggcagatcgcgaggccaggagatcgagaccatcctggctaacacggtgaaaccctgtctctactaaaaatacaaaaaattagcccggcatggtggcgggcacctgtagtcccagctactccggacgctgaggcaggagaatggcatgaacctgggaggcggagcttgcagtgagccgagatcgcgccactgcactccagcctgggcgacagagtgagactctgtctcaaaaaaaaaaaaaaaaaaaaaaaaaaaatatatatatatatatataatataaatttggttaaagacccaatttgaaaagtaattcaaaataaatagggatttagaaataaacattaaaaattataaattgccacataaaactttttttattgctgaagaggaaaacaaaagaatactcaaaaaatgaaaggatatccctggatctgggataggatgactcaacatcataaagatgttaattttctttatgtgaggagatggaggagttgtagatttataccatgaacttcacatactgccccaggagttggagaagctgaaggaggagacctagcagggctaaatgaactacagatccagctattgccccataccaacaaggtgacacaacaaatttgccttcacctctgtgaattgcaacagtacctggtgacaccataacctttcacatgcaaaatatctggcaggcctgattaaggcagtagtattcagagaaagctgttctgaaaagtgttgttccattaatgcttagttgatacaatataaatacattacaactgtggtgataaaccagtttaccccactgtaatacaggcaacacttttttcttctgcttggctggtcccatgtcagcactgagctactcaggaggctgaggcaggagaatggcgtgaacccaggaggcggagcttgcagtgaaccgagattgcaccactgcactctctgtcgcctgggcgacagagggagactccatctcaaaaaaaaaaaaaagtaaggacacattatatataggattgcatataaaagtacatgcatccatccagatatgtagtcaggggtattctgggtggattcacggcctcaccactgcagtcctgcctctgctaaatttaa

SEQ ID NO: 1563547 - DNA, 4001 bp, Homo sapiens
tggtaaaataaaatcaaagttcaggctacctggtaacttgaggccagaactgttgtaaagcaggaggcacaaagccaattaaaacatttcccttattgtgcatggaaaataacaaaaaatttttttacccaagcttatgaaatgtaccaggatcacatgtaattgaataaaatgataccaaatacccaattcttctgcaaaataaaaccccctggtcatcaaccaggtttgtatctaaattaatgatctcatttctgcatttccccccactacctacataatcaagaatttataaatgcttttgaaaagcacctatataattctgttggttccctgaatcatgggttgagtaaaattttacagctgttcaccaataatctgtgtgggatttatggtttgtaacaatttgggaattgtgttttcaaaccactttctggaaatgaggatacattttccaagagcctgctggctgacttctcacatagtgttgaccaaaatgaggtaacgattcatttactaagaggcttgggataatcctaactggtttagaggattcaacatctgggacagaaggatcaccagtggggacactatcccccaggttaccacaggactctatcttagatgttttataatgcaggagtcaacatcagtcactgaatggcaggggatatcgcttctgaacaagatatggaccacatttacaggaccagggagggaaaggtgccatattcattcagactctatttctttctcaatagtgtctgacatttattgaaaatatggaaaatacttttctccaggtagtataaaggagttaagcagaagatacaagttattttgttgatcaaaaagcacctgagaaaatgctgcaaattcagaagagaaatggattctgggcaaaactaactggtccacaagagaaaatgagagactcgatttggctgccaggcacaactgagccctggcagccatgtggcaggagcacaaaaagtctctgggattggggaggaaatgggtctcgctgaaggtaacaggtcccttgaggggcagccagctgtctggatcattgtccaggggctgtgtccagcccagatacctccgaggtgagtacagatcactagaagcagcagtctgtcggtggaatgcgatggatggcgatggcagtggcagcgcaggtctgtgggcagcatgatgtagtcgtctggaagtctggtgaggaggaggggggttggcagcggcggctgtcagtggtctgtcagtgtgtaacaggagctcagctttgtgcaactggagcgcaggacagcgtccaaatgtgcatgggaggggctgagctggcacgagagggcggaggcagcccgctccagagtgaggcccaggggcggcagcaggagcctggagcgctattcctggaacaaaggcaagcactacgcgggaggggacaggagcgcaggggacatcgtggcggctcgagggggagggaggcgcggagggagggcgccggtggcgaccctggcggcggccagtaacacagcggacccttcccagagcaccggtccccaggcccgagggtctcccggcctagaagtcctcgtcctcctcccatccaaagacccgcttcatctcagccaggaagccccggtaatcactgaggagggggctctccttcttgatgtaggggatcacccactgcagggcgggccccgtgaggcgggtgatgaggaacgtcaccttcagggcgtcgttggagaacgtgttctcgtccacgaacatgtaggagctcgtctgcacgatgaactccgggagccggtcggtatcgccatcaaacgtctcgggaaagggaatcgggttcctccagcgacgcgccgcgggccggaggggccgagccaggagggccttcatcagctgcactcgaccttccatcgcgccgcgctggctccgctgagtttagctgagctgcgctgggcttcgccgggggctgcaccgaggcgtagcgggaagtgcatgtcgcgggaggagaagccgggatgtgggcggagccatggggagggcccaggcgctttggcaagctctgcccagaaggcctggaggtcattagtgcgccagggggtcccggggcacccagcggagcaggtggtgggaaatgtggtggctggcttaactggtcaaggaggcagggtcgcaccgtaggggtggggcaaagtctttctaggcggttggggagtgaggatttttttggtgacgtccaagcccatgtgcttggagagcaaagcctgtaagttctttaaagctgattagtcagcctggtatatctattccttgtcccatgctctctgtccttccatgttccttcgcaaaccctcagctatgacacttttgaaaattattggtcaacaattttttttaaatgtccctagatttgctttcctctgatgttttctcatgattagaatcagttatttttgccaggtatactacagcaaagattttgtgtgttagtttatcatatcaaggtgttcatgatgtagtatattttgttattgatgatgtgtaccttgatcacttgtttgccatagatactttcaacgcagttgggttgactaggttatgtaagtcctgatgagcagagtagcacccatatttccgaaacatccatacaggccattcagtaaaagtgtcctaccagtacaactaaatgtgatatatctttcctccaaattacaagataccctccatgaattttatctatttcttaataggaaatgaaatcagtcaaatgcattttctgtgtctattgaatatggtcctatggattttctctttgcgttagctttttgttgctgtcttaacgaattaccacaaatttagtggtttaaaacaacacaaatttatcatcttattgttttgtaggtcagaagttccatatgggtcatactagaccaaagtcatagtattgggaggctatgttcctttctggagattctatgaaataatttctttcccgttcagttagactattggcagaattcagttccttgtggttgtaggattgaggtagtgttcttgctctgtaatatgagggccattcccagcttgtagaggacgccatatttactggctcaatgccaccttcttccccttcaaagtcagcaatagtgggtgtcaaatttttctcatgtggcttctttctaatcctctctgccttcatcttccacttttaagagttcatatgattagataattgatgataatcttcatattttcagtgcaactgattagcaactttagttctgtctgcagctttaattccttctttgtagggagaccccctgaaactattgctatggaataaaagatgaaatactcctgattattgtaaatacaaaattgcatgcaggattgtataaagacaatgccaggttggaatgccacaaagagccaacagcacgtgatgtgcttccccctgcagagagcctatgaatggatgtgcagtcagggaggtttcacatcaccgagattcctatcccagaaaagctgatgttcatagctctgggaatggaatgcgaccctcgtggagagcctataaatgaacgcatgaagggtgcctgtccatatggataagatagggctataaatgccctcatcttgccacggctcttctaggcctctttagggttaaggcatactcccttctgagaatttctggtctaaccagttgtctagcttcacgtcctgtttctatggattgtttgtaaccagtttttgctgcaactgttactgctgattaatatcttgctaatcataggttatggaaagactgtttctgttttaaggctctgttagaaattactgatgcacacactatattgtaaattcttttctctgtatactgtacttctgcatacagatgttatgttaaagaattacttaatccccatgtgaccatctcacctcataatcaaatgaccttaaatccctcactaacctacccccgccctcac

SEQ ID NO: 1563548 - DNA, 4001 bp, Homo sapiens
ctcatgactgactctaaaatactaattcctaatgctacaaagtttaaaacataagagcatacatttttttaaatctccataatttaaaataaaaatagtaagtttcagaacaatatttatggtataacatcaatgacgtaaatcattgtttctataacatatgttttgattaaaattattcaacgaaaggatatgcacttagtaaatttcattcaccattatactacaatcctctaccacatttgcccggcatatgacaagcacaaaaatatattagttgaataacaaaaaaatgaactttatgcactgttggaactgtaaattgtgataataattctgcagagagtttggcaatatgtatacaataataatttcataatatgaaatgatcatccccaagccatccatttctaggaatttatcttatgaccaattttcacaagtgcatagaaatacatgctttaggtatccagggacactttgattatagcaggaaaatagtatgtatttaaggggagagatggtatagaaatggccaccctataacaggaatctggtcaaataaattaaggcaattatttccatggaatatgcacttacttaaaaataagatgtcgatcatttgccatgaaaatatagccattagtaattgataaattaaatgaaaagattacaaaacataatatggtgtcacatagataaagcagtatacataaataggcaggtatgtatatgcacaaggaaatttctggaaggaagtgcatcaaaatgctagtaattcttatcatttggtggttaagattttgtgtttttactactgttggaattttctatattgttttatctttgcaatgttcacagactttgacaattagagataaacaataaaagtaaatgcatttatgaaacagaaaagcgtttcctaacttttaaaaaacgtgattacatgacaaagcacaaattctataaagattaatctaactttaatacatttcctcatttgaaatgaataatttatcatatttcatattttaatttaccacttgtattctatgaccaggtttagatagttaatgcggttaagtatgtaattgtctacattagtatgccaaattacctctgtggattttcctgtttccatagaattatcaagataattctctaaaataaatctttaaatgactgtatcctgtaaacttttattcagatggagatgagtaatttttgtcattctttaaaatgtgctaaatatgatccttacctttcaatgaaaagtaaatactcgtcttttttattgtaccaagggagttgttctgtagcagaaaaaaaaatcctgtaaataaaaataacaaatactcgtttttaaacttcattttgcaaaagtttattcacatattactggacttgtaaatcatactatagtatggctagaattttacaacattagaaggaaattggtggcagatgacatcgcatacactgacagaagatgcacattcattagcacaaattccccctcccatcccactgttcttggaattgaaacctgctgcacaaaagtataacgcaaatcatttgctttttaacaatactacctaacatttaatacctctttgttttatctacaaggttgttacaagcattgagaagggctacgtggcaagttagcagcaaggttggggtatataatatgccagcctaaaaagagaaatataataaaaatggtgtaactgactcacggcaacatgggttcgcaaaccttgtagatggatataaaccaggcttgccaaacatcacagacagcacttattaaatcagcttcgtggaatgcaatacgcctgctgtctagtccctccctcctctgccaataaccgactctccccttttttatccagtgtaaaaatgcatgctcatagaatatttagagaaaatcgttttgtttttaaatcgtccatagtcacactacccaatgacgccatttggaccattttcattcaatttttttttttttttttttttttttttacagctttttgtcaagagacccgtgacaaactaaacgggaattcagggtgggcggatgggagaaggaagacacgcctcttttgcccttgttaggaactatggctggtatttttacctcatgtctacgcttttttttcttttttaattataaaactataaatatagactttttggggggcagggggacaccttccaaggggtcgcacctcagccagcgagcggcgtctgggaaggtgggcggagccaggagtagtggcgtttggccgttcgttgggcgtacagtttgtcaattaaggtggaccagcaaatgaggagcgaactaaaggcacactgggaacgaaattaacgggaggtctgactgcaaggggagggggctcgcgatctaaaacgagaagagatctcggggtctcatactgcgccattcggctgcggtacatctcggcactctagctgcagccgggagaggccttgccgccaccgctgtcgcccaagcctccactgccgctgccacctcagcgccggcctctgcatccccagctccagctccgctctgcgccgctgctgccatcgccgctgccacctccgcagcccgggcctccgccgccgccactcaagcatccgtgagtcattttctgcccatctctggtcgcgcggtctccctggtagagtttgtaggcttgcaagatggcagaagcagattttaaaatggtctcggaacctgtcgcccatggggttgccgaagaggagatggctagctcgactagtgattctggggaagaatctgacagcagtagctctagcagcagcactagtgacagcagcagcagcagcagcactagtggcagcagcagcggcagcggcagcagcagcagcagcagcggcagcactagcagccgcagccgcttgtatagaaagaagagggtacctgagccttccagaagggcgcggcgggccccgttgggaacaaatttcgtggataggctgcctcaggcagttagaaatcgtgtgcaagcgcttagaaacattcaagatgaatgtgacaaggtagataccctgttcttaaaagcaattcatgatcttgaaagaaaatatgctgaactcaacaagcctctgtatgataggcggtttcaaatcatcaatgcagaatacgagcctacagaagaagaatgtgaatggaattcagaggatgaggagttcagcagtgatgaggaggtgcaggataacacccctagtgaaatgcctcccttagagggtgaggaagaagaaaaccctaaagaaaacccagaggtgaaagctgaagagaaggaagttcctaaagaaattcctgaggtgaaggatgaagaaaaggaagttcctaaagaaattcctgaggtaaaggctgaagaaaaagcagattctaaagactgtatggaggcaacccctgaagtaaaagaagatcctaaagaagtcccccaggtaaaggcagatgataaagaacagcctaaagcaacagaggctaaggcaagggctgcagtaagagagactcataaaagagttcctgaggaaaggcttcaggacagtgtagatcttaaaagagctaggaagggaaagcctaaaagagaagaccctaaaggcattcctgactattggctgattgttttaaagaatgttgacaagctcgggcctatgattcagaagtatgatgagcccattctgaagttcttgtcggatgttagcctgaagttctcaaaacctggccagcctgtaagttacacctttgaatttcattttctacccaacccatacttcagaaatgaggtgctggtgaagacatatataataaaggcaaaaccagatcacaatgatcccttcttttcttggggatgggaaattgaagattgcaaaggctgcaagatagactggagaagaggaaaagatgttactgtgacaactacccagagtcgcacaactgctactggagaaattgaaatccagcc

SEQ ID NO: 1563549 - DNA, 4001 bp, Homo sapiens
cccaaagtcttggagggacacgagctaggctagaaagcaactgtctcactctccagctcttggccccagctcgaggatgtgtgaggccaccacccctcctggtctccttgtcatctgaccctttgaccttgctgttctctttcctcccaaaggcaggtcacctggccaggctgggcgagcagggcagtaccatcaagtcccaaatgtttgcagccctcacccacctaactgtccagagcaaccccgccgagggtcaagaagtttcttaacactcagctcttccctaggcgggccggtctgcagctgcctcacctctcctctggatacctatccccagcagctagaaagccagtgttccccccactgtcaccatggggtgctgggaaggcactgggagttttgtatgagaatgcactaaccttcagtggccttcccaccagtcgctgttccctgttcccagctccttcctttgtcaggggagaagagcctgcaggtgacttccttgggagaagacaggcagcccctgggctcgacctgcctcggctctggccagtcacctcaggtcacataaggtcaagtgtgtggtgtgccccaccaccaggagtgctcgtcctctcacccactggcagaagccaaagggtgagggtttggttgccaaatattcttcctcccatctttggccttccccctgcaccagccagtcccaggacgttcagttccagcctctgaaaggagaggggcatggctggctgaggatggaggctggggggagcacaatccctcctgccacctcattgtcagcccagggccctgcggcccctccccactcatgagggagcagggcgccaggaagccccaggcctaaggtgcccaaacccggaattaatagaagttagccaggtggttacctgacctgaatccctgaggcctcttcactagggaaggtcccagggtggcactggtagtgctgcactgggcacggtgggagtggtggggtgggtagaaagggagacttccttttttctcccggtcccactgcggccgctgccgctgcccagggcggctgctgtggctgcggaagccagtccttaccttacagcctttcgtgcaggaccggattgagtactcttccgcctgtaagtatttatgcagcacgaggtcgaactcgtcatatttttcctgagcgtgtcggtccagccgctggtacgcctcgatacagttgctacacgcctcccaggccccggagcccgggctggccaccacggccagcaggtcccccatcagggtgtccaggctacagtccaggctgtcggggcggtccatgcccagcagcaagtcccagaccgtgtaggtgtcgcaaaaggagagagtgaagttccgaaagtggcctttgagcaagttttttttggcggaggggaactcggccggggcacgggaaagggagtcagggggccgcagagggggggccggagtagtcggttcgaaaagtctctgcaaagattgcaatttggtgcaagctgcgtccagccccgtgggctctgggacgccgccgcagaccggccgagagccggcggcgggggcggctttggtcaggttgctgtatctggggccgcaggtgcctgggggcgcgctgggctcgccgggcggcggcggcggcagcggcagcaccgcgcgaggaggcaccggctgccgctcccggccggccccccatgggggccgcatggcgctgctcagctccctggcccggggccgggcccccgcgcacagccacagatggtcagcgagcagcacggtgaagaagagcagggacgccagggacagtcgccatcgctgcgcccgctcggagtcggcgcaaggtttgtcgctcggcctgggagcccagcagcagcagcagcagcagatagtcagcgcggcggcgtctttcccgggccacatccaagcgcccctgaacatatttcaggggggtccgggctggagggaacaggcaggcgcgaggccagacggccgtctggggcgggcgggctgcgcgccgctctgcgctcctcggcgccgtccaggctctacctcgggggctgcatggtgaggcaggccggccggcgcgatgccccgctcaggccggagtcgcggggcgctctggtgccgtctccgcgccgctcccgcgctccgtcgctctcagcccgggcgccgccgcccggcccgctaggcgctgcccggcgtcccggctgggggcggtgcggggcactggggcggtggcggctgcggcggcggcgccgcactcctcatagtgtcgggcccctcagctgccctcggctccgtgccacttcactccgcgccggcggccgcccggctcgcactccaaaccggccgtctcggttcggcgcagctctgcgcccctcagcgccgccgtgcgggccccgccgccgcgctccgctccgctcccctcgccccgcgccgctccgctcccgcccgtccgcccgctgcccgctccacgccgctccctgcctcgctcgcgccctcctaggccggccggccggtccgttgccgggcccttcgggcttcgttcgcgctccgggtgttcgccggggccagtccctggcgggctccgctctggctccgcacccgctgctcctggagttccggctcgggcgggccacctggctcccggcagcgccacaggcgccggacgcagacaccgggctttacttagtgcgcctctcgcttccgcctctcgttcgcaccgctgtggctgcagcccagcggcacggccccgtggctcccgctggccatgcaccctcagtctgtcgccatcttccgctgtgcggagaacaccttgagagcccctgtgcaagtgtgtttggcggggagcagggcggagaaagaggcacggagaggaggagggagcgggactggtgccccgactgcgcctgcgcctcaggactccccccaccccaccccgccccagcccccgccggccgcagccggtgctgtttggggatgtttccagtccacccccaactccattcacttcagcgcctccgttcatccgcccgctgcccgcgtgcacatgccacacgctgagtcccaggcctcggcgctccccctcccccactaacccgggcgcccgccttcctctccatggccgtccctcactcccccgagggctaggggacttctgagggtgattcttggaggcaaggagcagcaggcatctcgtagctgcttgctgcctctctgggtcgcctccgccgtccccgtgactggaagacgctcgagccggctgcggatcggaccagtccagtgtccctaactccaccttcgccctcaccgtcctgcccgaggacaaggcggcccttggtgctgaaggacagctcccagcttagctgctgaggaagactgagtttggagagcgtcctggagggggcaaggcggtgggctaagatagtagtggtggggtgtcggtgtttgcccttaggaatatttccagcagcctccaccccccacccgcccgccccccacccaagcaccagcccccgtcctagctttttggctccccctacaggctgctgagaatagctgactgagagttagagaagctgcgccgcccggatggaaccatgtgcttgggccctcacagagtcacatggcactaggaattcggacgtacaaacatcctgacgcgccactaaccttgtttggactccactgaccctgtggtctgcttgccttcctcactcccagtaactcacattgtaattttttgtcaaccgttgccggcaagcatttgttaatgttaagaataacaataaagaaaatagccttaattgagcgcgtactatgtgctaggtactgctctatacattttgcatgcattcgtcatccaatcttcacaacagtgttatgagataggtactactgttatcttcatttacatacaaagaagctgaggtttagtgtggttgttgcctaaagtaaccagagcagctaaaaaagaaactcagtct

SEQ ID NO: 1563550 - DNA, 4001 bp, Homo sapiens
ggcgcgattttggctcactgcaaactccgcctcccgggttcaagcaattctcatgcctcagcctcccaagtagctgggattataggtgtctgccaccacgcctggctaatttttgtattttcagtagagacggggtttcatcatgttggccaggctggtttcgaactcccaaccccaggtgatctgcccgcctcggcctaccaaagtgctgggattacaggcatgagccactgcgtcagccactgtcttaactttctacgtagcacttaccacactgtgatgtgctatatatttactgaccaactctatgctatcagggatgttgttggttttggtctctgttgtatctgcagaacctagaacagtactcaaatatacagcagacgctcaggaaattcttgttgaaggatggctggagtggggccctttacacacattgctaagatgcacagatgccctccaagatggatattggccccattttactgattatgatacatactgaggttcaaggagacaagtgacttgcccaatgtcacacaatcaagacttgggggctccaggctttgaaatcatgtctgccagcctccaaaacccatagttcctggaccgagacctcacagccaaaaaggtaagaaatttcactcctgagacacagactcccaaacagctcagatactcaaagacatcaaaaagagctcactaatctcacaacctgaaacagactccaaaatccctgcacagagaccccacaacttgacacagacccccaaacagaacagagaccacacatgctgtgacaaagacccccacacacaacagaccaaagttctcactcctgggaaacaaattaaaaccattcagatatctcacaccctagacagagaccccccccaaaccactcagacacctcccaacctaatacaaaacagaaacagaagttcaagtagctcagaaacatcacataatcttaagataaagtccccagacaaatcagagaacctacattctgggcagagacccctccctcctccaaacagctcagatactttataccttaagcaaaattgtcctcaccaacaccagctgggaaacatcacaacttgggacccagaattgcaaacagctcagagacttcacatcctggggtgcagacacctacatagagctctcacacccagggacacaaatgtccaaaaagctcagaagatgcacacccaggccaggcgtggtggctcatgtctgtaatcccagcactttgggagaccgaggtgggaggatcacttgaggccaggagttcaaaaacagcctgatcaacatagcgagactccatatctacaaaataaaaaataaaaaacttagccgggcatggtggtgagcacctatagtcgcagctactcgggaggctgaggcgggaggatagcttgagcctaggagtatgaggctgcagtgagccatgatcagccactgcactccagcctgggcgacagagtgagactctgaaaacaaacaagagaaaagaaaagaaggcatatccagacacataggcacacaaaatccactgagataaaatatcccattcagacacaatctggaccccaaacggcccagagtgatcaaatacacccaaacagcatctgagatgtcatgcctaaagatacacatccccgaaactgcttcacccgcattacttcctaggcaaacaccaaacaagctcagagaccgctccctggacattaattgagtgtagcgggaggaacgatggtgccgtgccaaaagcgccagactaggcttgtcaccgagttaaggataaacaagactgaaagagctcacgtgaagcaaatgactagggcgaactttgccggggtggcatctccagcccctttgggactgtcagttggtgagtaggccaaagaactctactgtatcaaaagccacacaccctcctcgctcccgctgcctgaacttcagctccgcaatcgtcgtgcctgtcacaaactgaaggccaatgggaaccagagatgcgaagagggaggcaggggctagccggtccatccggagccactccgcgccccggaaaagcttagtcggggcactctcgcagtaaccaatcacctcccgggacggccctcgaccccgcccttcacatcttggagccaatcgcttgcccctttgcggtccccagcgggatttgactatgtagaaacgagggggtggaggtaaagtgaaaatgatgcctcgaacaggctgggagaaccgagtggtgcgagtagggacggacctaacggggcaggaactgtggcggatgctacacgtgggtttaaagagacccttagtgctgtcgcacacaagggattattccaaaatggacaggcggagtggactgtccttcctctgcgcccctcagtggtacatcccaggatagaactgttccatcccgcgcgccccttggtggtgcaaacaaggaacagctagtggatgcagatacccatggaccattccgggctggtccccagagggtgagagggcaaagtcaggacaaaaactgactgtatactcactgcaatcttgaacaggagaaaagtgttcctaagcagcagacttccattaccttcctgcagcgtccaccatcaaacgtttaccacgtgctgggcattgtgctcacttgtccctccctgggtaatgcagaatagatctaatggggggcctgctggcctgggaacccagccacagtcccccaaggggcaggagggatggaactcctgactgggctcagaaggcctgatgcgggccaggtgtctgtccttgactgtcagtaatgggtgagagggacagcaggaccttcaagctctgttagggaaagggccatctctcaggggcccccaaggagaatgagtaggccaaataaatcctgtcacacctgaatatgtgccctagcagaatcctcaacctgtctagctatatctctcaccagaattttgcattggtttattcatttgctaatttattcattctgtccaaagtatgtgccaggcactgttataggtgttaggaatacagctgtgtggaaagagacaaaaactcctgccctcgtggagcttacattctattgggatcatatggcacaaaaatgtaagcatgtaatttgtcaggtggtggtaattgctgtaatgaaaagtcagggtagtgaaatagaagaggggaggatcctatctagaaagagtagccaaggaagatctttctgagaacgtgaaattgacatttcaataggagatgaatatctgagagaagcattctgggcagagataagaaccagtgcaaaagtgttgaggtggaactctgcctagcatgtgtgaggcacagtgaggaggccagtgttgctggaagaggtgggagatgagctcagaaaggtaatgaggaccagattatacaggaccttctgggccatggcaaggactttgacttactctgagcgagccatgggaaagtttttagcagagaagctcctatgcttctttcagaggccagaggcccaggtcactcaaagtatagggaagagctcctggttttgccgagggactcctccagcccctctgcagccaaatatgcctttcctggacaatcccttagactcagaaggtatcctcccaactgctccccagaaaaatccatgtcagaggatgatacccttagaagaagctgatcaagggccctgatagcatgagtgaggtcacacctagccccatgtctgagagagaaagtaacagacacagagaagatagagggaaagaaagagagtaatagagagacaagggcagagagactacttctggcagctggctgtccctgctgaattagatccacagctccggacccctatgcatgctactaggtgctgtgcctgtgtctgcagaggaaaggaagcctctccccagaaactgtgtctagggactgactcacctgcccttggcctgggcctcagtcatgagggaagacccgcc

SEQ ID NO: 1563551 - DNA, 4001 bp, Homo sapiens
gcctctaatccaagcactttgggaggctgaggtgggaggactgcttcagcccaggagtttgaggccagcctgagcaacagggcgagaccaccatctcaacaaaaaacttaaaaaattagccaggcatgatgctgcacagctatggtcccagctactggggaggctgaggtgggacgatcacttgaactcaggaggttgaggccagtgcagtccaacctgggtgacagggtgagtccatctgaaatcacaaaacaaaacaaaaagacaactatggcaggcatgagacgggggtacttctgacacagaggaagtcaaaatcaccatagcccaggtggtcaggaacagcttctcccagggcatgctatgatatatattctcatccccagttgcagatgaggtaacaggatcagagaggttaagcaactcactcaaggtcacacatctagggagtggtggtgaccatttctcactgaggtctgctgaaatacaaaagtcactccaccatttgtgacaccaatctctctttatattgtcacccgttttaattcgcattcatagacgtatacttacctgtggctctccttagtttcatattctcataagcggctacacacggtatagatttcgtcttagcacatcaggcctttcccttaaagaacctgaatttcccgtgcccggcacgactgcccagcccagaactgaacacttatctcaaattaatcttccaaccacacaccaaggaaagaaaatggattactgccacgtagagatttaatttgggtatttcacgaattctgaactacgatttgaaatgtaaccactgtccaaccagaaacagtaaaaacaaagtgcttccctatgaaaagtattcacaggacattttattaaatgccaaagcattccaggtaagacacactgcccgttttataggaagttgttgagattctgctcctaagaatacagtagtcctttctctctccactgctagtgccctgataagctcagccaaccaaggccattcgcttttccatttgcaagcaaacacaccaaactaccctcacacccacgcacaaatccaacgcacccaacgggtcagtgagtagagggaaatggtattggagatgcagatgggaatctgtggctactcagagcaccacatttctgatggcggagagggctaccgcccagggtcgcctgtactccagcaaggtggacggcggagaggccctccctctctaaacatgagaccctgcagcttgtgcggctactggacacaaatggcctggaccattcattgcgcacgaatgcagcaatcacaccgcccattaaacgcatgtctagtcgtatttcacattacgaccgtccctctgtcacacgtcggagaaagggtttgtcggacggtttgtttcaataggggcaatgcagtcctccttgaaaaccctccagtcactgtctcctgctgtgcgatgggagaggaggtggggagggaggtgatgccaaggacacggtgatttctgaacccgctgaacactgatcctagcccaagtgtagtcccgccggctaccaatgcccgcggcatcctctttctccgctgaaaaaggccacccccaagtagggaacgagaacaacgccacccccagagtgcacgaccgccattcccacaccggggagatatggacgacgtggaaaatcacccgcttccttcgaaagccccactcccggccagcccaacccagggattcgagtcccaagacaccctggcctgtgctagggacagcctccgtctcggcctctcgctctgtctctctggaagtctctctcccacccccccgctctcagtctctcccgcgcgctcgctcgctctccgtctctctcgggctctctcacgcgcgttctcgctccggagccggttcccgccgtccaagcgccaacgcggcgcctcgtttcctctgccctggaaacgcagcgccgcccgctcgtaattgaagggttaagaccatcgagaggagccgccctccggcgggctagaggcgccgcagcgcggaagggggcgccggcgaggatgtgctcacgtcacagggatgcgacgccgctgagaaactgaacctttgattggctgccgcggaccgccggagccggaagacggagcggttgggtggcttctcgcgacccacgccgctcgggtggactgcgaggggagaaggcgtggaggtcatcccttccggaggtgcgccgcggcgttcccggagcggcttctctgaagcgtggcttgtggactgccgaatgcttccggaggccatgggaagacactccctgtagcggacgtgacttcccgggcgagggacgtgggaactgggctggagggttgggaggcggccgacttctcctgtgattggctggagttttgagctagggcgcgccgctgagaaccgacacgtgctgtttcatttttttttttttttttttttttttttttactgtttttgcatgaatgataaatgcaccttggtaaagacagaaaccaaacaatccaatacattgaaattattcaggctactgccttagggagagcgccccagaagtggaaatcacactgttggggtaaccggggcggggcgggggtgtcttttactttcataggaaggagtacaccggtttcagtggggagatttatggggcagggttttttgttttttttttaatcagcggaagtctcagccagctgaacagggaatgtttctctctgtgcctagctacttttaggaggacagacttcccgtctaagtgaatcatttgtgataccctaccttgttttaacctgagtgactctttcctagcagagagagccggacagactccattttagtttcttcacttgcagccccctttatcccccttaagggaataactagtgcaagctgagtccaagcacatccaagaatacacctgctggtaagatattgaggcaggctgtaccaacagctcgggaatgtgctcggtggaaggtacctaaaagcccctgcatttatctcttaatcatagtttaagcccctgcacctggaactgtttattttttgtaactgcttctataaccaattaattttttttaactttttgcctattctgcttctgtaaaattgcttcagctaaactcccccctcccctgtttagaccacggtataaaaacaaaactagccccttccttggggccgagagaattttgagcgttagctgcctgtaggtcgccagctaataaaggtccccttaatttgtctcaaaagtgtggcgtttctctataactcgcttggttacaacacattcatgagacaaaagaacaaggactggtggtgtctgccatctgggagtcacggcacagagtgggaagacagcatcccttatctaagtctcatggagaataattggtcctgtgtggtcagtgacttcccagaacacgaaagtgtacagagatttctttaccgtggcgtatttcaggagtcaagtgacacgcaacaatgtctgtcctagcagatacatggatagtagattcctttttaaccctggaagaagccgcctcgtgaacagcagtttatgaaggaaggaaacatgaaccattctcccagaatattatcatttcattttacaaatgaagtaactgagccacaaagagattaagtaacctccccaaagtcgtacaagaaataaatggtggagtctcgatttaaatccaggtgtctgtgacttcatccccttcgtgctgtgcagccatacactgtcatttccaaatccacacatgtggctcgattctctccctggatctacagatttcttccgccaactgacaaccccacaggcccgttgcactcacctcccatccagcatcctgggcagtgggagatggcttcccagagaagagagtgttagagatcctgggtcccaaatgccctgtccagcccctggagggagaggtgggcttcaagaggaagtttagaagatttaaagag

SEQ ID NO: 1563552 - DNA, 4001 bp, Homo sapiens
cctctaatccaagcactttgggaggctgaggtgggaggactgcttcagcccaggagtttgaggccagcctgagcaacagggcgagaccaccatctcaacaaaaaacttaaaaaattagccaggcatgatgctgcacagctatggtcccagctactggggaggctgaggtgggacgatcacttgaactcaggaggttgaggccagtgcagtccaacctgggtgacagggtgagtccatctgaaatcacaaaacaaaacaaaaagacaactatggcaggcatgagacgggggtacttctgacacagaggaagtcaaaatcaccatagcccaggtggtcaggaacagcttctcccagggcatgctatgatatatattctcatccccagttgcagatgaggtaacaggatcagagaggttaagcaactcactcaaggtcacacatctagggagtggtggtgaccatttctcactgaggtctgctgaaatacaaaagtcactccaccatttgtgacaccaatctctctttatattgtcacccgttttaattcgcattcatagacgtatacttacctgtggctctccttagtttcatattctcataagcggctacacacggtatagatttcgtcttagcacatcaggcctttcccttaaagaacctgaatttcccgtgcccggcacgactgcccagcccagaactgaacacttatctcaaattaatcttccaaccacacaccaaggaaagaaaatggattactgccacgtagagatttaatttgggtatttcacgaattctgaactacgatttgaaatgtaaccactgtccaaccagaaacagtaaaaacaaagtgcttccctatgaaaagtattcacaggacattttattaaatgccaaagcattccaggtaagacacactgcccgttttataggaagttgttgagattctgctcctaagaatacagtagtcctttctctctccactgctagtgccctgataagctcagccaaccaaggccattcgcttttccatttgcaagcaaacacaccaaactaccctcacacccacgcacaaatccaacgcacccaacgggtcagtgagtagagggaaatggtattggagatgcagatgggaatctgtggctactcagagcaccacatttctgatggcggagagggctaccgcccagggtcgcctgtactccagcaaggtggacggcggagaggccctccctctctaaacatgagaccctgcagcttgtgcggctactggacacaaatggcctggaccattcattgcgcacgaatgcagcaatcacaccgcccattaaacgcatgtctagtcgtatttcacattacgaccgtccctctgtcacacgtcggagaaagggtttgtcggacggtttgtttcaataggggcaatgcagtcctccttgaaaaccctccagtcactgtctcctgctgtgcgatgggagaggaggtggggagggaggtgatgccaaggacacggtgatttctgaacccgctgaacactgatcctagcccaagtgtagtcccgccggctaccaatgcccgcggcatcctctttctccgctgaaaaaggccacccccaagtagggaacgagaacaacgccacccccagagtgcacgaccgccattcccacaccggggagatatggacgacgtggaaaatcacccgcttccttcgaaagccccactcccggccagcccaacccagggattcgagtcccaagacaccctggcctgtgctagggacagcctccgtctcggcctctcgctctgtctctctggaagtctctctcccacccccccgctctcagtctctcccgcgcgctcgctcgctctccgtctctctcgggctctctcacgcgcgttctcgctccggagccggttcccgccgtccaagcgccaacgcggcgcctcgtttcctctgccctggaaacgcagcgccgcccgctcgtaattgaagggttaagaccatcgagaggagccgccctccggcgggctagaggcgccgcagcgcggaagggggcgccggcgaggatgtgctcacgtcacagggatgcgacgccgctgagaaactgaacctttgattggctgccgcggaccgccggagccggaagacggagcggttgggtggcttctcgcgacccacgccgctcgggtggactgcgaggggagaaggcgtggaggtcatcccttccggaggtgcgccgcggcgttcccggagcggcttctctgaagcgtggcttgtggactgccgaatgcttccggaggccatgggaagacactccctgtagcggacgtgacttcccgggcgagggacgtgggaactgggctggagggttgggaggcggccgacttctcctgtgattggctggagttttgagctagggcgcgccgctgagaaccgacacgtgctgtttcatttttttttttttttttttttttttttttactgtttttgcatgaatgataaatgcaccttggtaaagacagaaaccaaacaatccaatacattgaaattattcaggctactgccttagggagagcgccccagaagtggaaatcacactgttggggtaaccggggcggggcgggggtgtcttttactttcataggaaggagtacaccggtttcagtggggagatttatggggcagggttttttgttttttttttaatcagcggaagtctcagccagctgaacagggaatgtttctctctgtgcctagctacttttaggaggacagacttcccgtctaagtgaatcatttgtgataccctaccttgttttaacctgagtgactctttcctagcagagagagccggacagactccattttagtttcttcacttgcagccccctttatcccccttaagggaataactagtgcaagctgagtccaagcacatccaagaatacacctgctggtaagatattgaggcaggctgtaccaacagctcgggaatgtgctcggtggaaggtacctaaaagcccctgcatttatctcttaatcatagtttaagcccctgcacctggaactgtttattttttgtaactgcttctataaccaattaattttttttaactttttgcctattctgcttctgtaaaattgcttcagctaaactcccccctcccctgtttagaccacggtataaaaacaaaactagccccttccttggggccgagagaattttgagcgttagctgcctgtaggtcgccagctaataaaggtccccttaatttgtctcaaaagtgtggcgtttctctataactcgcttggttacaacacattcatgagacaaaagaacaaggactggtggtgtctgccatctgggagtcacggcacagagtgggaagacagcatcccttatctaagtctcatggagaataattggtcctgtgtggtcagtgacttcccagaacacgaaagtgtacagagatttctttaccgtggcgtatttcaggagtcaagtgacacgcaacaatgtctgtcctagcagatacatggatagtagattcctttttaaccctggaagaagccgcctcgtgaacagcagtttatgaaggaaggaaacatgaaccattctcccagaatattatcatttcattttacaaatgaagtaactgagccacaaagagattaagtaacctccccaaagtcgtacaagaaataaatggtggagtctcgatttaaatccaggtgtctgtgacttcatccccttcgtgctgtgcagccatacactgtcatttccaaatccacacatgtggctcgattctctccctggatctacagatttcttccgccaactgacaaccccacaggcccgttgcactcacctcccatccagcatcctgggcagtgggagatggcttcccagagaagagagtgttagagatcctgggtcccaaatgccctgtccagcccctggagggagaggtgggcttcaagaggaagtttagaagatttaaagaga

SEQ ID NO: 1563553 - DNA, 4001 bp, Homo sapiens
gtggatcacttgaggtcagcagttcgagagcagcctggccaccggggtgaaaccccatctctactaaaaataaaaattagccgggtatagtgatgggtgcctgtagtttgggactgccatggcccttggcaagactttcacctctcattcaccctgcatgactcagctgagatagcacttctcccaggaagccttctccaagctcctaaaacgccctgtatttcccctgtcccagccccaatcccactcagctgtcaacagatggttatttctctgtcaacccactagcccaggagctgacagaggccagggactttgtcttgttcacccatcacagagccttgagcccagtggacattcacaaatatctatcaaatgaaacaagaaggatgtggggcccgtgataaacatctcactgagaatgtcaagtcaaccctgcagaatccatattttcccacgttgcaaaggcagaaattcctgcatggagaggtcaagtaacttccctcagatcacacaaccactcagggacagaattccctcccaggtctccctgactgcagatgaacacacccctggtggcattgcctctctgggtgttcagcctcccctgatacctaagcgagaaagtaatcctgagggaagagttcagacagcagagtcctaggggctgacccgcatgtccacagctgcccggggatcgggtgcaatgctgcgaatccttaccgtcacttcctcctggccagttctgttcccatgccagaaatgctgcaccaaacgcacctctcacactccccactctcattcgcttcaattctcctgtgcggaaggagaaagagaacagctaagcaagtgaatccagacgacaccctgcagatgagcgccaggaagagctttgtgtttcttttcaaaattaagccagtcccatgtgatgcttttttcaatcttccacaataatatgagataataaaatgcatttatttcagtttaaagatacagatttcatttaataatcccaattaaatatggacttttttttttttttttgagacagtctcactgtgtcgcccaggctggagtgcagtggcatgatctcagctcactgcaacctccgtctcctggtttaaagcaattctcctgcctcagcctccggagtagctgggattacaagcacccgccaccacacccggctcacatttgtatttttagtagagacagggtttcaccacggtggccaggctggccgcgaactcctgaccttgtgatctgcccacgtcggcttcccaaagtgctgagattacaggcgtgagccaccacgcccggccacatggacttttttctagaagtggcaaaatcctacagcaaaatgtctaaggtctgtgcaagttctctgggtgctgaaaaccgtgctcctagtcttgtgccatgtcatggcaaaggaatctaactcctagccacgcaacgccacacagattgaggaaagagtctgtcctacacatgacttgcagatgttctacatttttgatgcctacacagatcatctctatcctactgggtctggagcggaagagatacaatttttagcagctttgtaacaaaagaacaggtagtcagtaaagccagcaatgcccactttcaagaaagaaagaagaaaatgaagacagcagtgaagcgtggtgctggcatcaggggtctcccagcaggtgagtacacagaaaagcagcgggagtacaaccgggagtccggggagggaacaggggagggaccaagaagagtggccagagcagcaagaggaagacaaggagcaagtccgctctggcgagaatggagcttgcctagactcacccaaggcagtcaggtcgctgggttcacaaggtcgatgctgtgggtgtaggccgagtgactgctacacctttcacctacaaaagaaaataacctcactggccaggtcacattcctccaggtatttactgagggcccactccattcagcggtgccttcggtgaattatccaatgcagccccatcccaaggacgtgtcttaatctgaggaataaaatattgtccaaggagccaggaatggtggctcacgcctctaatccaagcactttgggaggctgaggtgggaggactgcttcagcccaggagtttgaggccagcctgagcaacagggcgagaccaccatctcaacaaaaaacttaaaaaattagccaggcatgatgctgcacagctatggtcccagctactggggaggctgaggtgggacgatcacttgaactcaggaggttgaggccagtgcagtccaacctgggtgacagggtgagtccatctgaaatcacaaaacaaaacaaaaagacaactatggcaggcatgagacgggggtacttctgacacagaggaagtcaaaatcaccatagcccaggtggtcaggaacagcttctcccagggcatgctatgatatatattctcatccccagttgcagatgaggtaacaggatcagagaggttaagcaactcactcaaggtcacacatctagggagtggtggtgaccatttctcactgaggtctgctgaaatacaaaagtcactccaccatttgtgacaccaatctctctttatattgtcacccgttttaattcgcattcatagacgtatacttacctgtggctctccttagtttcatattctcataagcggctacacacggtatagatttcgtcttagcacatcaggcctttcccttaaagaacctgaatttcccgtgcccggcacgactgcccagcccagaactgaacacttatctcaaattaatcttccaaccacacaccaaggaaagaaaatggattactgccacgtagagatttaatttgggtatttcacgaattctgaactacgatttgaaatgtaaccactgtccaaccagaaacagtaaaaacaaagtgcttccctatgaaaagtattcacaggacattttattaaatgccaaagcattccaggtaagacacactgcccgttttataggaagttgttgagattctgctcctaagaatacagtagtcctttctctctccactgctagtgccctgataagctcagccaaccaaggccattcgcttttccatttgcaagcaaacacaccaaactaccctcacacccacgcacaaatccaacgcacccaacgggtcagtgagtagagggaaatggtattggagatgcagatgggaatctgtggctactcagagcaccacatttctgatggcggagagggctaccgcccagggtcgcctgtactccagcaaggtggacggcggagaggccctccctctctaaacatgagaccctgcagcttgtgcggctactggacacaaatggcctggaccattcattgcgcacgaatgcagcaatcacaccgcccattaaacgcatgtctagtcgtatttcacattacgaccgtccctctgtcacacgtcggagaaagggtttgtcggacggtttgtttcaataggggcaatgcagtcctccttgaaaaccctccagtcactgtctcctgctgtgcgatgggagaggaggtggggagggaggtgatgccaaggacacggtgatttctgaacccgctgaacactgatcctagcccaagtgtagtcccgccggctaccaatgcccgcggcatcctctttctccgctgaaaaaggccacccccaagtagggaacgagaacaacgccacccccagagtgcacgaccgccattcccacaccggggagatatggacgacgtggaaaatcacccgcttccttcgaaagccccactcccggccagcccaacccagggattcgagtcccaagacaccctggcctgtgctagggacagcctccgtctcggcctctcgctctgtctctctggaagtctctctcccacccccccgctctcagtctctcccgcgcgctcgctcgctctccgtctctctcgggctctctcacgcgcgttctcgctccggagccggttcc

SEQ ID NO: 1563554 - DNA, 4001 bp, Homo sapiens
tggatcacttgaggtcagcagttcgagagcagcctggccaccggggtgaaaccccatctctactaaaaataaaaattagccgggtatagtgatgggtgcctgtagtttgggactgccatggcccttggcaagactttcacctctcattcaccctgcatgactcagctgagatagcacttctcccaggaagccttctccaagctcctaaaacgccctgtatttcccctgtcccagccccaatcccactcagctgtcaacagatggttatttctctgtcaacccactagcccaggagctgacagaggccagggactttgtcttgttcacccatcacagagccttgagcccagtggacattcacaaatatctatcaaatgaaacaagaaggatgtggggcccgtgataaacatctcactgagaatgtcaagtcaaccctgcagaatccatattttcccacgttgcaaaggcagaaattcctgcatggagaggtcaagtaacttccctcagatcacacaaccactcagggacagaattccctcccaggtctccctgactgcagatgaacacacccctggtggcattgcctctctgggtgttcagcctcccctgatacctaagcgagaaagtaatcctgagggaagagttcagacagcagagtcctaggggctgacccgcatgtccacagctgcccggggatcgggtgcaatgctgcgaatccttaccgtcacttcctcctggccagttctgttcccatgccagaaatgctgcaccaaacgcacctctcacactccccactctcattcgcttcaattctcctgtgcggaaggagaaagagaacagctaagcaagtgaatccagacgacaccctgcagatgagcgccaggaagagctttgtgtttcttttcaaaattaagccagtcccatgtgatgcttttttcaatcttccacaataatatgagataataaaatgcatttatttcagtttaaagatacagatttcatttaataatcccaattaaatatggacttttttttttttttttgagacagtctcactgtgtcgcccaggctggagtgcagtggcatgatctcagctcactgcaacctccgtctcctggtttaaagcaattctcctgcctcagcctccggagtagctgggattacaagcacccgccaccacacccggctcacatttgtatttttagtagagacagggtttcaccacggtggccaggctggccgcgaactcctgaccttgtgatctgcccacgtcggcttcccaaagtgctgagattacaggcgtgagccaccacgcccggccacatggacttttttctagaagtggcaaaatcctacagcaaaatgtctaaggtctgtgcaagttctctgggtgctgaaaaccgtgctcctagtcttgtgccatgtcatggcaaaggaatctaactcctagccacgcaacgccacacagattgaggaaagagtctgtcctacacatgacttgcagatgttctacatttttgatgcctacacagatcatctctatcctactgggtctggagcggaagagatacaatttttagcagctttgtaacaaaagaacaggtagtcagtaaagccagcaatgcccactttcaagaaagaaagaagaaaatgaagacagcagtgaagcgtggtgctggcatcaggggtctcccagcaggtgagtacacagaaaagcagcgggagtacaaccgggagtccggggagggaacaggggagggaccaagaagagtggccagagcagcaagaggaagacaaggagcaagtccgctctggcgagaatggagcttgcctagactcacccaaggcagtcaggtcgctgggttcacaaggtcgatgctgtgggtgtaggccgagtgactgctacacctttcacctacaaaagaaaataacctcactggccaggtcacattcctccaggtatttactgagggcccactccattcagcggtgccttcggtgaattatccaatgcagccccatcccaaggacgtgtcttaatctgaggaataaaatattgtccaaggagccaggaatggtggctcacgcctctaatccaagcactttgggaggctgaggtgggaggactgcttcagcccaggagtttgaggccagcctgagcaacagggcgagaccaccatctcaacaaaaaacttaaaaaattagccaggcatgatgctgcacagctatggtcccagctactggggaggctgaggtgggacgatcacttgaactcaggaggttgaggccagtgcagtccaacctgggtgacagggtgagtccatctgaaatcacaaaacaaaacaaaaagacaactatggcaggcatgagacgggggtacttctgacacagaggaagtcaaaatcaccatagcccaggtggtcaggaacagcttctcccagggcatgctatgatatatattctcatccccagttgcagatgaggtaacaggatcagagaggttaagcaactcactcaaggtcacacatctagggagtggtggtgaccatttctcactgaggtctgctgaaatacaaaagtcactccaccatttgtgacaccaatctctctttatattgtcacccgttttaattcgcattcatagacgtatacttacctgtggctctccttagtttcatattctcataagcggctacacacggtatagatttcgtcttagcacatcaggcctttcccttaaagaacctgaatttcccgtgcccggcacgactgcccagcccagaactgaacacttatctcaaattaatcttccaaccacacaccaaggaaagaaaatggattactgccacgtagagatttaatttgggtatttcacgaattctgaactacgatttgaaatgtaaccactgtccaaccagaaacagtaaaaacaaagtgcttccctatgaaaagtattcacaggacattttattaaatgccaaagcattccaggtaagacacactgcccgttttataggaagttgttgagattctgctcctaagaatacagtagtcctttctctctccactgctagtgccctgataagctcagccaaccaaggccattcgcttttccatttgcaagcaaacacaccaaactaccctcacacccacgcacaaatccaacgcacccaacgggtcagtgagtagagggaaatggtattggagatgcagatgggaatctgtggctactcagagcaccacatttctgatggcggagagggctaccgcccagggtcgcctgtactccagcaaggtggacggcggagaggccctccctctctaaacatgagaccctgcagcttgtgcggctactggacacaaatggcctggaccattcattgcgcacgaatgcagcaatcacaccgcccattaaacgcatgtctagtcgtatttcacattacgaccgtccctctgtcacacgtcggagaaagggtttgtcggacggtttgtttcaataggggcaatgcagtcctccttgaaaaccctccagtcactgtctcctgctgtgcgatgggagaggaggtggggagggaggtgatgccaaggacacggtgatttctgaacccgctgaacactgatcctagcccaagtgtagtcccgccggctaccaatgcccgcggcatcctctttctccgctgaaaaaggccacccccaagtagggaacgagaacaacgccacccccagagtgcacgaccgccattcccacaccggggagatatggacgacgtggaaaatcacccgcttccttcgaaagccccactcccggccagcccaacccagggattcgagtcccaagacaccctggcctgtgctagggacagcctccgtctcggcctctcgctctgtctctctggaagtctctctcccacccccccgctctcagtctctcccgcgcgctcgctcgctctccgtctctctcgggctctctcacgcgcgttctcgctccggagccggttccc

SEQ ID NO: 1563555 - DNA, 4001 bp, Homo sapiens
acttgatttcatgaatatgttacattcacattacagtgacatcaggggttaaataggcttctgtgagttggtctaggaaaccataagttctatttgtaacactggatcaattagttctgctccaagtttaatcattggcttcaaaggaatagtcttggatttgcttgactaggttttatgaccttgaactcaatcttttctttctgggcctgtttcttcattttttgcaatgacgatttagagtagtcataataaatttactgccacttccttttgagatgtgttatactgatattctgattatttaactataacaccttgtttccatagactataactttcatttatgtaagaaacatcttttacacattccttgtatctggtagaagctcattcaatctacagactgatttaagggaagggaggggagaaatatgctaaagacattaaaatatggaagaatttgatcaaactcacatcataaacttggatcagaagtcagaactagatttcttaatttatctccagtattttccatagctgaacccctctcctagagccttaaccacacacccccccagccctttgtatatgtatctcaaatatccacctatgttaaaacttgaggctgtatctagaacgtcttcaacccaccccccaagatttgatctaacacgtaaatgcttgcatgagagaagtctccagaacactaccttctactgaaatcagttaggaggagatacaccctctgaataaatttgtgtaagtcagtccatcctaagccttactctgtctcttcaaaggggaaggaaaccaagggatatgtcatatgaaggaatcctccagatttaagcttaccaattttggcagagcctaaagcgctaaggcaaacagttaataaaggaggaggaaaaaaagagagaatcgactagtttcctagcgctcaactaaaaaaaaaaatggggtaggggtggtggcggcggggggaacaggactgtgagacagattaaaaatagggaaaatgaagcttctagctttaaatgttccacctttcaacgccacttttcaaaagatctatggattgatcttgagccatccaaattcctctacagcgtaccggaaatggaaggggttaaacttttgcagatggatgcaaacaggggcgtatctaaaaatcaagggtgggggtttgggattcgtagggtacagatggggggagggaagggaagcaagggagggagaaggtagggaagggaggagtcgctatagccagaatatgaatgaggaaaagagagtaaaacgccggtcgaaaggaaaataggagggcaggggtgaaaatagggagggggggcagggaaggaggccgggaatgagcgctggtcgaaagcaggtgggggagggggcgactggaagcgcagcccgggacgaaggatcaggagcggggggcgaccagaagtggaaaatccacccctgccctcaggtgcagttcgtacctgttggtgtggaagcggtggagcgggtcggtgcgatggcaggaggacagctggcagccgaagtcgctgatgtccaggcagcccggctcctcgctcgggcaggtgcccaccccgcgaggaggtcccaggagtgggaagggctcctcgggggttagaaacttctcgtaggaagtgatggccgaggcctcgtcggacatggttggagatggcctggctcgggctccctctctggccctgggctgctcccgcgcccgcccctgcccccactctaacctgtccgcagtcgccgacgctccggggtgtgcccgtcgcagctcactggcaggctgggcgtcgcggcccgctgctgcttgccggggtgcggggccgcgcgaagaggctgctcgaggccacagcggcccaccggccacccagttagcgccccggtggcctctgcagcttccgccgccgccagactcagcccgtcagcgcagcgccgccgcccggcccggccaggcccgccccgcccactgcgctcgccgcttgcgactgcagcagtctgcccggcgcccgcaaggaggggaagggcggcgggaagccactccccgtgccccctgctggaccggaggaggaactgaacctccgcccgccgcggccccaagcggcccgccccgccctctacgcatcgaatcagggattcaggccgctagaaaggctaggcgcctctggccaacctcctcctccgctttctcactcgtactcgactactaagcaggaaccgcagtcccagaaaagggacttggccaaggtcacactgcgggtgcgtgagaaaacatccagatgccctggttcccagcgcactctttcattctgtcccaattcaacaagtatttattgagctcctgcagtgtgtgcccagcaccgtgcaatgaggtgtaggagaaatcgtccaagcagggaaaatagtcccttcctcacccttgatcacctaactccaagaaccctacgctgcagccactcgcctactcagagctgctggacacgtcgtactcttttgtgctttgcgccttttgctcataggcaccctgcttggaatgccctgccatttctcccctgctaatccttcaaactccagctcaaacgttatctcctcagtgaagccttccctgactcccaaaggagactaaggcacacctgctaatttgccccctccctcccgtagaaaatatattatggagcttaacttgttcaacttgaatcaacttgttaggtgttatatagtgtactttgctgtttatctcatctctcttctctatattctgggcaagtgattcctgttcttggatgcgtaagattaaaaaaaaatagaggaaaccccaagattactaatttcttactttgcccaaagaagacaatttttaaaactacctaatattattttataaaaggaagcacattttcatataagagcataattcttcaataaaagcaattctttgcattaactatatttatgaagaaactacattgatccttcaggaaagcatagaacttaaataggcggaaaggaggggaaaaatgaaagaaggcaggaggaagaagagaaagagggcaggagaagtggggggttgtcactaaaacaagccccattcagtattaaactctgtgccttgccctaccaatgcaacttatagtgaaaacagcttctccaacgtgcctttaaaatgtatacattatcttgcttcagttacttggttgtttgactgttgagcatgccggctttctttcattgagattgcaagaaggtgtgttgcattgtgtatgtggctttcaaaatgaatcattcattaatatctaatgaggctgaccaatttaaaacttgtggaagtgaggctgatgatggtttgttctatggtccctaatgcaccaatccccaggggtctgaggccagtgaggctgaatgggccatggcttagtccccaaaaacaagagacttgattatccaaatgaaacaagagtcaagtgctgcatgataatgcaggcactcaggtaatagcaccaggaactgttaataagaagctaacgaaatagtctattttattttattttattttatatttttttgagacagagtcttgctctgtcgctcaggctagagtgtattggggcgatcttggctaactgcaacccccacctcccgggttcaagctattctcctgcctcagcctcctgagtagctgggattacaggcatgtgccacgacacctggctattttttgtatttttagtagagacgggttttgccatgtttgccaggctggtttcgaactcctgacctcaagtgattgacccaactcagtctcctaaagtgctgggattacaggtggagctactgtgcctggtggtctaatttaaatatatataccttttacacatactataagaggtgggtgtttttttaaagcggagtctaatgagagagtctgtgaggtttctacaagtatgtgttttacttttgtgtttaagcat

SEQ ID NO: 1563556 - DNA, 4001 bp, Homo sapiens
tttattttttttatttttgagacggagtcttgctcttgccccccaggctggagtgcaatggcgcgatgtcggctcactgcaacctccgcctcctgggttcaagcgattctcctgcctcagcctcccaagtagctgggattacaggcgcgcaccaccgtgcctggctaatttttttttttgagacagagtcttgctctgttgcccagactgaagtgcagtggcgtgatcttggctcactgcaagctccgcctcccggttacacgccattctcctgcctcagcctccctggtagctgggactacaggcgcccgccaccacgcccggctaatttttttgtatttttagtaaagacggggtttcaccatgttagccaggatggtcttgatctccagacctcgtgatccgcccgcctcggcctcccaaagtgctgggattacaggtgtgagccaccgcacccggccatgcctggctaatttttgtatttttagtagagacggggtttcaccatcttggccagactggtctcgaactcttgacctcaggtgatccacccgccttggcctcccaaagtgttgagattacaggcgtgagccactgcgcccagctgtctttacttttttgagacggagtctcgctctgtcgcccaggctggagttatgcggtggcgcaatctcggctcactgcaacctcagcctcccgggtagctgggattacaggcacccgccaccacgccaggctcatttttttgtatttttttagtagagatgaggattcaccatgttggccaggctggtctcgaactcctgacttcaagtgatcctcccacctcggcctcccaaagtgctaggattacaggcgtgagccaccgcgcccggcctgtagtgtgtttttagatgatgtcatctactcctagctctttaattaagcaccatgtgtcaatgactttctattttctagttccagccgtggcctctcttgaaaccactccctgccagctggttcctcagtggccagctccacctggatatgtccacaaagttaccaccttagcaagtctgaagtccaattcccgagttgtttctactctccacccagccccaacctatccctccccaaggatcttcatcttacttgtccaggtgacagtagggctgtcatcgggttcatgtcgaagcccacagccacttttgtcacttcccctctaagaccacgcctctccacctggactgcccacctcctctctctcaccactcattttccaaaaagcagctggtctgctacctgcgttgggagatactgactatactaatcctcatgtcatagctcggggagctgacgtcctcagaggtgaaaggatttggttaaggtcaaggaacgagtgtttgtgcagagtcctccatttccaaaaccaaacccagtggttcacccgggcctctccagacacagatgtcgcgacgctgggcctccagccaggtgcccttttcaactccctcccgttcgctgtggaagccacccacctgccaacctcatgtccacttctcctgctgggttgggaccgccggcaagtgcactgtttgggggcaaagcggaaggacaggtttgggtgggggtcaggggcaagcctgtgcgggacccctgctgggggcgggcgcgatcggtgctacgacctgtttgtccagccgcccggccaggcagggctcctcggaaacgcgcggggaaaccctgcctggccaggaggggcctcaggaacccgttggctcacgatcttgcccacaggagcctccggggctgggacgaagatgtggttctcctgggctcgggccgttcctccgggcctgggggctggcgatgcgggccgggccggagatttctctggccgtggggagacgtgggctcggtcagggaggttccctgtcaggcccgccgacccgctccgccccgggagaggacgcaaggccgctgcgcagggtggccaggcaggcccggcaatggcggctaagggcggggccacagcccgccggccccgcccccggcagcagctgcgccgtctggctccacgcaggccccgcctccagacccgcctctaccgctcgcgctggccgccgcatgggaggggcctgaacctgtcccgccccgaacctgtcccgcccctggatccctcgtcggccccacctccgcagtgcgttcaggctgaacccaccggccgccgagtgggaggggcccacgtcggtcccgccccggaagtctcccctcggccctttctcgggtgggagagccctgcctacccaggcttagagggctggggctgcgcttgcaccctgaggtcagatttgtgagtcgtgggaagacgcagatggatctggggcagaattagaacctgttccaaagttgatccatgcgctttgtaaaggcaagggaggtacagaggcgcagatagggaagaccgcaggatccagcgtgagcctctggctgcctttccttagggtctgttttctgtccagaagcgcgttcctgctgtctctcgttatcacttttataatgggacggggcgtctcaaactatttcgacatccttgaaaactcttgcctgctccgcctgcctggtctctaacaccctcctcctcagagctgctcaagctgtgttgtttacgccacaccccaccctaaaagcagaggagaatacaactttcgggggcagtggaggggggagtttagcgctataacccgaggctttcacagcaaaccagaatttattttgaggcctctcaggttcagctttcaagtcacgtgactttcgcgtcctacacaactcttattttcacttgaaaacaagtgtgacgtcgtgaattccctaacaataggaaaaaagaaggctccagaaagagcggtgcttggctttcccagcggctccaaatggtgcccggcacccagctggctgtatggacctggggtggtctccggccgcaggcagacgcggcccttcggcctttctccagtcaccccaattctccctgactgcctggctatctcccctccgcgcctgcccgcacgctgcccccaacactgcccgggctccctctgcccatgagaacacgggtcaagctcccgtcccttctgccctgccggctgccccaagtgcgccctgaccacctactgcgctggcatggccggggccaccctgacagctgatccatcatctgtctggagagcagcagcagggcccaatgagaaccacggaaacctccctgccctttgacccaacttacgggaatctcctacccttagggaaacaatgcaaaatatagagaaagtttatagagccgggcatgggagagccctggttagaatccagcagcttctatactggagtactcaacagggtcaaggtccctttcagctgcctgctgctggggccagggctttgcatttgcgttttgtcatggaatttgacagcctctcaagtaattatggtaacgaatcttgggctccatgccctcctcaggggggcccagtcgaagaagctccaggttactcacacccttgagctgccagccggtgtttttcaaagacaatatttacatgttgttcagagcaggcatttatgaaagtgttgctttaatgagtccccctgagcattccgagacaactctcccttccttggggacaccacgtgggtgatgggccagaggcctgggattcagttccacgtcttccgtgcttcctggggcagccttgcaaaagtcccttattttctctgggatggtttggattcctgtgggggtctggccagcacggtgactagagcacatggtctgtcaccatccaggccaacgtcctggggtacactcacagtcatctgttcttccaggtcagccctcatagatcagggcagcttcagcagttctcaaatagcagatgttacaaaatgggggtgggcaatcctgcagcagacgtctctgcactttctgttagaaggacaccccaggtatttttgagcactgt

SEQ ID NO: 1563557 - DNA, 4001 bp, Homo sapiens
catttcatgtatacaaaattaaaaaataggcatcactaaaggatatgctggttaaagatgcaaatactatagcacaactataaaacagaaaaattatacataaattcaagacagcagctgcctctaaaaatgaagaaaataaatgtgattagaaaggagtatacaagggaacttaaagggtataatatccttttgcttaaattgggtgatagttcacaagtatatatttgtaatattgcttttattttgcacacacattttataaatattttataggtattcaatatttaatatacaactaaaatgttatattttctttcctttttatattttctctataataaaaagttttactttaacagatttgttcgttgcttttaacaacaccagttataaatgaatgaatacacatgtactttaaataaataatgctatttctgtgcctaagtgttaagaaaaatataaacctcgctttaagaaatcagatatctaagaaaaaacaagagggaaatttttggagtcaaatttagtttggaactcacaaaaacaaaaaccacttcttaattttctaaatggtcagcacaggctacgattcgtcttttacttaaggcggacatcaacaacaaataccctaacaacaaatatcttcagattttaattttactaaaaaactgatcctatcctaaagaccttttccttaagaaattccacaaaacattttcaaaacactttttaaaaaaggcttattcttatagcttagctacatataagtctaggaactttatatgaaacttgaaaatgctttagctttagtggattgttctggtctatatatggatttttttgaaatagctgtgttaaaaaaatactaagagtccagggaaaatctttttttttaatgttttttatctttataccaaaagaagttctccaacagcgaaatacaactgtttatctagtatagaaactgatcaaacagtgatgaaatctactaagttttatctgtttctgtaaagtcttaattctcaaatatatagggacatcaaaaataaagcaatctttatacagtttcacctactgaagtggtttccaggctgtactttcctagaaccttgtattttaaaaggtttgtttttccagcatcgaaggtttgtagttagggtaacagtctgaagcctaccaccaattacattaacactaaagagtaaaacagtagtttttagatccatctttctttcaaaaagaaacaaagataaaaagaaacttatccaattagatgcttatttcccctatatattgaaacactaaagatgggaaaaaaattcgtcaaacttgttaaattccttagtaagagaatatactaattgttttccccaaagcaaaatctcagttcttccttggaatttccaagggttttgaattgaaacgaatcgacaattcccaggatgcccttcctttccataaatccatagtgtctaataactttggaacattttcatgtcacatataaaacgccaactactatctagtatttcacttaacctccttgcacattatagactttgtagtaattttcgtatcttatatatatattgaaaaaaaaagttagtgcgaatacatatttcacataaactttacctattaagtctagcctacaactttaaggatcacgaagctttttaacgccataagtgaacttcacacctcaaatttaccagccgcgctatcccttagacccttattttatacgactataattttttgaaaaatacgttaaaagccctatacctttttccttcatccgttaaggcttaaactctgagacaatggtgaggggccaaggacagagtgaaatctgaggaaagaggtggggcggaaggttaagaagactttggagtaggacaaaagaaagaactagaaggttggctgggtgacgaaacctttaggtgccaggttagactgggtgcaggcgaaggacccaaggtgggagctggggcgcgtaacctcttgccctccagccccccaacgcccccaagcgactggaacccgttctaatcgccgctccccgcggcagccattttggagttgcaccagccccgcccctcggaggcacccggccccgccccctcggtccaggagcagaaacaggaaatgggattgcaaacctagtagctgcgcgtgccggctattcaggactagcgcaggactctgggcgacctcacatcccactcgtgctgctgccccgggcactcgcctcccgcgaaaagtcgtgggaccacgtcgaatatggggagtatcctttcctgtttgaaaagctgctcttagggcatagggaaaggtggggagggcagaggttgggaccctgggaggtgcctggtagtgacctttttggtctagctgtggagggctgagagcgctggcaccgattggtgggctccagcagcttggttttagtttttctgttttttgtttttttttttcctgggactcgctgccatcctagaatcaggggaggtgggactgctttaaagaatggtcaggggagtcgccgcactggtttgagatttagagcgcgagccctcccactctgagagcttctgtcacctgtcctttagtgaattcgtcctctttgaaattgttgggaaactgtgcgagaacagaggcaaggcaacaggagtttgccagaggtttagggtgtaggtgtaggttttgagtgcagtactagggcagatagcttttgttgaacttcacttcttttcctgggtggaggtgaccggtaaggaggtaaagtgcttaacaccaagcctccaaactaagatgattgcttgcttaataataggatttaacacatgaggaaactcatatagttccctaaagctataaaattcatcaattgcacctgtgttcccacttaagaaatgaggtcagagtttagaaccaagctgtctaaagccctgaattaaaggatgaaattgtttttcacaacggaaatgttgtaattcctcttcttcaaggagttggtattatggaaaatagaatagcttggtatactgccactgaatgaaacttggcaaaataataaaatgtgagtaatagtagttgtttgatagctcatgttaaagctcttttagcttcattcgtttgtaagcctacaacatagaaagacatttggtgaaagaattatgtaagccatactgagaatattgttaacattatatcatgtgccggactggccgagaataaaatatgaacccttgatgggcaccgataggtcatttcatcaacatagtagatgactaaaaggtctacttatcactacagtttaaaggataataaagaaagtgtagttgtattagcataataaagggaagagcactggaatatgagtcaaatcaatttctaatcccagtttatcttaagcctgtgagttaggacaggtcatatagcctcctgcaaagcttactcatctgtaatgcataactgacctgccaaccttataaagctgttgtgaagatgaaatggaagtgcttattaaattgtaaagttttgaacatgcttttaagtatgaggaaataaattacaaatcgtatcccttttcccagaacctttagaagtatttgaggtaatagctctaaatgagtttttgtttcctactctaatcaagttatttttggtctaaatctacctcatgtaatttctggtaacaagataactactatactgaccaattttctttaactgaaaggaatgcctgactgtaatcaaagttaatggtactgttatcaatagtttaatacccaacaaaagtgaacgattaacttcccttcagtctaccaaaaaaaaaaaaaaaaaaaggagctttaacttgactcacaccatctggctgtgattaagtctcttggttcatttatgtggaatatgttcagtccagacctttttcttggagtatagaacaggagaatgacatatggactcagagccctcttccataaataagttga

SEQ ID NO: 1563558 - DNA, 4001 bp, Homo sapiens
aggctggagtgtagtggcgcgatctcagctcactgcaatgtctgcctaccaggttcaagcgattctcctgcctcagcctcccgagtagctgggattacaggcatgcgctgccatgcccagctaatttttgtatttttagtagagacggggtttcaccatgttggtcaggatggtcttgaactcctgacctcgtgatccacccacctcagccccccaaagtgctgggattacaggcatgagccactgcacccagccatgaaaggcatttttttaaagggagagaaataaagaaagaaggaatcatatggattctacctaccctaggtggggtgatctcttattactttccattctccttcattgctgaactttctcccatgggatactactacctttctcctttcctataccaaaaactattttccctttttttcttataaataatgacttgccccatgaattcccaacctcccactcagtaacctccactttttttcccaccccccgacacacaaataactcctccttctcctcacatttcttcaagcatttccaacacaaatacaaatttaagttcacgctcagaaggcagttttgctgaaagacgtggcatttttttctagtcacttttttccttaagtctccttatcatggggaagtcccctccctcatttcaacaccttctactcttagtttggctacagatattcaggtcctcatattttctctcacatctgcagttaattttcataggagaaaaagggtgaatgataatggcattctttaaagaaacaatttcaaaatgcagtctttgctattttaaaatacaattggcttaataaaatccattcagtttatgattaatttgattatttttctaaactttacttgcattaaattgttctactagaggaaaataaggtaacttcactcttaaggtacttaaaagctatacaagtgaggccaggcacggtggctcacgcctgtaatcccaacactttgggaggccgaggcgggtagatcacgaggtgaggagatcaagaccatcctggccaacatggtgaaaccccgtctttactaaaatacaaaaaaaaattagctgggtgtggtggtgcatgcctgtagtcccagctactctggaggctgaggcaggagaatcgcttgaacctgggaggcagagattgcagtgagccgagatcatgccactgcactctagcctagtgacagagtgagaccccatctaaaaaacaaacaaacaaacaaaaactatacaaatgagataagacatgagtgctttaaaggaaaaaaaataatctgaaaaggaagttcaggactatataaaaaaaatacagatatgtaaacatgcttgattacctgacaataactttctttcactggtatgtagtaattaaaaacatttgatatcaaaaaaggaattaggtatagtcttttaatacttcacttcagaaacaaattaaagtttgaaaataatccatcatcaggctatttattgagatgtcaatgtgtcagtcaattaatgtaggacgtagggagttttgtaactctcttactctagagttctgaaaaaacataattcttaatactatatcaacgtatcagttatgtcttttatctcttactcttgagctagttcagaaaataaaatattaaaacaattattgatgcccttttaaacatattaactgagttcagttttaccacagccatgattttgggcacagttattaatgaaagagataattttcaaagatattttagttgaatcaaataagtttctggacaaaatataaattaaacgtcaattttgatgtgtgctcagagttaaaactaaaagaaaaactccctttctacaagattgctcaccgtgtcttctgatagtagactttgctgaatttaacagtcttactctgaagactaacatcctttaccagagttctgcatcacctgatctccacacattctctacacctcacttgctgcaattccagggttactgttgccaggagacaaggaatattattattgcatcattaatgctcttatagatgggggaattttcaaaaaataaatttaaatagggcaattctgagtcccaaatctcaaaaaagacaatgttatactagatatattaaagattaaaaacaggttcctcaagatacttgaacttaagttaaaaaatagtgaagagggaggaaggagaaaaaaatagtgaaaataaccagttaaaccatgcagattcacacagataggcaaacatttttgttttgtaagtattgtaactgcctacatgtaacttcaaaattaagttgtaatttctgaaatacagaatttgggaaaatattctctatttaatttttacccccaagtgaacatgtttttgttttaaaaaaaattcttaaacaattaaaaagaggctggtcatggtggctcatgcctgtaatcccagcaatttggaaggctgaggctggaggattacttgagcccaggagttcaagactagcctgggcaagatagagagacttcgactctataaaaaatataaaaagaaattagctcggtgtggggatgcatatctgtcattccagctactcaggaggctgaggtaggagaattgcttgagcccagaaggtcaaggctgaagtaagccatgatcacaccactgcactccagcctgagaaacagagcaagcctttgtctcaaaaagaaacagttaaaaaagtattatggttgataagtataattgttttgagtgccaacaactaatttttaaaaagaacatttaaaagacagagttcttctcaaaataatgttttgttacagtatgtccaatttatagaaactatcacataactgtttgaataagaatatcaagattacaaagataggcaaataggtagatataggaagaaaattgtctggctaagccagtgatccatgtgatatttttaagatagataatttatagcattttccagtaaaacatagaaaagactaaatacattttggaggggccaaaggtaaaacaagatacctactcaatgttttcctggcagtataatatatgacaaagaaataaataatttttagtaacatttaagactataatcctaatccttgtatataaagaatgttacactggagtttaattttaaagaaaaatatacgtgtacagtttcttaaagatatgaaaattacattacatgatatatataatactgaatataagtttttaattttaaacttttgagtgtagaatttttaaacataattaaatggcaatgataactaaaaattatatgatgcttataatgtgtcaggtattaagtgctttaattaactcaatcctcattcaaaagaatgtgaagaatagaggtagggtctatgatcccattgaaaaaaataaaaaacaaattatgcaaagaaattcatgaaaagagtaacagataaaatggacatgatgaacaaagagttagctagctaggtagggggtggaggaggggttttaagtagaataagaaatcagatattttgtagggtgccatttaatatacaagcaagggttattggaaagaaatctgaaaatgtcataaggcagtttcattaatcagcaataatgaattctgtaaagtactacatgtttaaaataaaatacatatatcagatataggtcaaattctaaaataaaatacatatatcagatataggtcaaattctcaactatctttttataaagatttaaaaatatgtcttttaccaatataaaaagtcaaaacagtataataacaaagatagtacaagtatcagtgagaaagaagataggaggaaggagttttgggagaagaaaagacaaaacagaagtcaaaagacaactactgctaaatagctgtttagcaatccaaatattctggtttcatccccattcattccaaaggtcataattcccaatttgaccaatagtgtcattctcttttgactcattt

SEQ ID NO: 1563559 - DNA, 4001 bp, Homo sapiens
actcctttactttcttaaacttttggtcctcatgggttgctctgtacttgggggtaaagtcaaacagattcctgatggattcttcatcagctcccaggtctccagcccacttgaagaattcacggagtttttccgatgtgtatctatattgaagagagtcagaaacgcactcttttgtgcttggtgtatcttcctgaagcagttcttttatgtaggatgctcgaatcttgggaggctccgagaattgatgggactctggagctttgggaggctccgggtggagactggacacccgacgactcttgggaagctccgggcggagactggacactcgacgagtcttgggaggctccggaccgagactggacgtccgacgagtcttgggaggctccgagcggagactggacgtccgacgagtcttgggaggctccgagcggagactggacgtccgacgagtcttgggaggctgcgagtggagactggacctccgacgtgtcttgggatgttccgggtggggatgggacacctgagtctcgggaggctgcaggcagggttccccacaaggggatttatgaggctcggtgggttccttagttttcttcacccgggcctcacaacgatcccatacgtccttcagcgtcctcccagaatccagcactttcagtatgtatagtaggagattggacacctgactagtgtcgggaggttccaggcggagatggcacactccagtcttgggaggcactgggtggagatgagacacttcagtcttgggaggctccgggctgagatgggacactccagtcttggaaggctccgcgtggagactggacccccgacgagtcttgggaggcgctaggcggagacgggacactccagtctcggaaggctccgagcggagactggacccccgacgagtcttggaatgctctaggcggagatgggactctccagtctccggaggctccgggcggagactggacaccggagtcttgggaggctcctggcggagatgggacagtggagtctcgaaaggccgaggacagaatttcccacaagggtatttaccaggctctgtgggttcgtcagttgtcttctcccggccctcacaaggagcccgtgcgtcttccagcttcctctcagaatccagtttcagcagctgtcgtaggagactggatctccgacgagtgatgggaggccccgggcggatatgggacactccagtctctggaggctccgggcggagatgggacactccagtctcaggaggctccgggcggagactggacaccggagtcttgggaggctccgggcttagatgggacactccagtctcgggaggctctgggaggagatgggacaccggagtctcgggaggcttcaggcagaattccccacagggatgtttaccaggctcagtgggtacctctgttgtcttctcctgggtctcacaacaagcccaagcgtcctccagctccctctcaggatccaggtgtttcagcacctgtagtaggagatctggaggcatatcttctcccagattggggtacatggccaagggatgcttggccattagctgggcttccacttgctctacgaacgccttccgtgctagctgggctggagagagcttggaaaatagggccgctttcttgagcagctttttctgcccgcttttggggtcagcttggggacctctgagagatattttggggagtaaaaactcgtcacggcgacaaacgagagtatcttcgggagacggacagccgtagcggaagtcgtccatgccctccttcacaaatacccagttctgggtgtccatgggtgggaacctcaggcgcctgtgcttgcacttcgcgaagcacttggaaggccgtttgttacagtaccagggcttggagtccatgcccggggacctcagccagtcctgcagcctctggtcccccatggtggccctcgctgtggtgccacgtctccagcttctgaggtcccagatccctgccgctctagtcgctaggagaccgccagccacgcgcagcccaggttccttcctggaggcggagcagcgctgacgccacctgcgcagcccagattctaacaggtgtgtagtggaatctcattccgggtttcatttgcgtttcctaatgactactgatattgaacatctctatatttgcttatttgccatccttatctctccttggttgaagtttctgtggattttttccccatttttaaattgtgtttctggatatcatatttagttttgagaatacttgctgtgttctagatgtaaataggttatcggatatatgatttgcaaatttttcacttcatccttggcttttccctttcattgtcttaacagtgtcaaagagaagtttttttaatttgatgaagtccaatttatcagtttgttcttttatggattgtgcttcttttgatgtatctatgaaaacttggcctatccaaaggtcaaggttttaatttttgtaaacagcacaagatatagatcaaagtttttatttaaaaatgtacctattgcttacatatatctgataattttagaactatttttgtaaagactaaatttttctccgctgaattacatttggaaattggtagaatatcagttgtgtatgttttttgaaggtcaatttctggacactcttttctcttccattgatttttctctcacacaaatttcccattctgttggttactttagctttataataaatctagaaattaggctgtattagtcctttaacaatgttcttttacaaagttagtttttcctaggtcctttgaatttctatagaaattttaaagtcagtttgtcaacgtcaaaaaaaaaaaaaagtcctgttgggaatttgattaggattttgttgaatctatagatcaatttgaggataattggcatgttaacaataggaaatctgaccactgagaaatgtacagctttctatttgtttacgtgatttttcattttctcaggaatattgtgtgttttttagtgtatgtgcctttcacatctttttctctccagatttttcctaaatattgtttttcatactattatatgtagtatttttagttgcaatttccaattttttgttgttagcatatataaatattgatgtttgtatatccattggtatcatacaaccttggaaaattcactcattatgttcagaagcatttttgtatatttcattgaattttctatatatatgatagtgtcatctgtgaataaagacagtttcccttcttcctttccaatctgaatatcgttatacctccaccagtccagttgcaacccttcattttcctttaaataatatcagttaaatttttatctctcttatagtgcttaaaacaacgctatgaaaagcatttttataaaaaattttaattatagacaaattcagcctgcattattccttaagcataccattttctcatcacataataattttttctgtacattcttactcatttttaaaagaaggtttcttacttcccttgttaggtgcagctgaacaatgttttctaccattacaagcaggtataccctagttcctccttgtaaatgaggtacgatcaatgcctctcttggttttggctcctcctctgtaaaatagacacaatatatattcctcttaggtttctcattaaatcaaagaactagattatgtgtaaatcaaaataatctatataacatgactttgtatagtgtctggaacagaataagcatcctctaaaatcttgttaatttatatggtattactacagtttgaaaataaaaatattctacatttgatgtctatataaaggaaaagcaacatcgtacatttacatatcacaaatattttcatttattgattataagaatctatgttaaagtctcaaggtatttagtagatttcataatgtgatgttggtaagaccaaatttgatatggatttatttttaactttctttttttttttcctttt

SEQ ID NO: 1563560 - DNA, 4001 bp, Homo sapiens
ccaattaagcagtaaattgaaaaccatctaatcttcttttgatgcatctgtgacgtcttctttgtacttgtaaacttgcactgcacgttgaataggagtcttaacagagtcgtaagtccatcccttcttggcaaacagcttttcaatgacgccaggcattctgtagcccttgcttagaatgaaatccttaaaggcaattggtccataaagaccgtcaagaatgtcgggttcatcaggcttttcaagtacgggcttggggtcaatcaaaggttcatcacttcttagctttttccccaacttaggctcgaagtaccatggtccataccttatcctcccacgctgtgcactataagaatgcggtgccgcccggcgtctcctgtcccagtattttatccgtaagaattcgacctcatccatgtcgtctagctccatgccgtacatcagccttgaagcacactcgtttgccttcttaatcttttggtcttgatcggttgttctgcactcaggggtaaagtcaaacagactgctgatggattcttcattaactcctaggtctccagcccacttgaagtcacggagttttctcgatgtgtgtctacgttgaagagagtcagaaacacactccattgtgcttggtgtatcttcctgaaacagttcttttagatgggacgctccggtcttggtaggctccgggcagagactggacacccgacgagtcttgggaggcttcaggcagagactggccattcgacgagttatgggaagcaccaggcggagatggggcatccgactctcaaaaggccgcggacaggattcccaaaaatggtatttaccaggcttggtgagttcctcggttgtcatctcctggccctcacaacgagcccgtgcgtcttccagcttcttctcagaatccagtttcagcacctgtagtaggaaactggacacccgatgagtgttgggaggttccaggcagagatgggacactccagcctcgggaggctccgggcagagactggacacctgagtcttggaaggctctgggcggagatgggacactccagtctcaggaggctccgggtggagatgagatacgcgagtctcgggaggctccgggcagagatgggacgctccagtatcaggaggctctgggtggacactggacaccagagtcttgggaggctctgggcagagatgggacactccagtctcgggaggatccacgcggagatgagatgcgcgagtctctggaggttccgggtggagactggacacccgagtcttgggaggctctgggcggagactggacacccgagtcttgggaggctctgggcggcgactggacaccggagtcttgggaagctgaggacggagacgggacaccggagtctcgggaggccgcgggcaggattccccacagggatatttaccagactcggtgggtacctcggttgtcttctcccgggcctcacaacgagcccaagcgtcctccagcttcctctcgggatccagctgtttcagcacctgtagtaggagatctggaggcatatcttttcccagattggggtacatggccaagggatgcttggtcatcagctgggcttccacttcctctacgaacgccttccgtgctggctgtactggcgagagctcggaaaatagggccgctttcttgagcagctttttcttcctgcttttgcggtcagcttggggacctctgagagatattttggggagtaaaaactcgtcacggcgacaaacaagcgtatcttcaggagactgacaggcgtagcggaagtcgtccatgccctccgtcacaaatacccagttctgggtgtccacaggcgggaacctcaggcgcctgtgcttgcgcttcgcgaagtacttggaaggcggtttgtcacagtaccagggcttggagtccatgccttgggaccttggccggtcctgtggcctccggtcccccatggtggccctctctgttgtgccacctctccagcttctgaggttccagatccctgccgctctagtcgctaggagaccgccagccacacgcagcccaggttccttcctggaggtggggcagcgctgacgccacctgcgcagcccggattctaacaggtgtgtagtagaatctcattctgggtttcatttgcgtttcctaatgactactgatattgaacatctctatatttgcttatttgccatccttatctccccttggttgaagtttctgtggattttccccccatttttaaattgtgttgctggatatcatatttagttttgagaatccttgctgtgttctagatgtaaataggttatcagatgcatgatttgcaaatttttcacttcatccttggctttgctctttcattgtctgtgtcaaagagaagttttttaatttgatgaagtccaatttatcaatttgttcttttacggattgtgcttcttttgatgtatctatgaaaaactttgcctatccaaaggtcacaaagatttttttcatttaaatgctataatttttgtaaacagcacaagatatagatcaaagtttttattttaaaaatgtacctattgcttacgcatatctgataatttcagaactatttttataaagacaatcttttctccactgaattacattcggaaattggtagagtatcagttgtctatttgaaggtcaatttctgggcactgttttctcttccattgatttttctctcacacaaatttcacactatcttggttactctagctttataataaatctagaaattaggctgtactaattctttaacaatgttcttttacaaagttggttcttctaggtcctttgaatttctatagaaattttaaaatctgcttgtctatgtcttagaaaaagtcctgtttggattttgattaggattctgttgaatctatagatcaatttgaggataattggcatattaccaatatgaaatgttctgaccactgaggaaggtcatctttccatttgtttatgtgatttttcattttctcgggaatattttttattttttagtgtatgtgtctttcaaatctttttctctccagattttccctaaatattgtttttcatactattatatgtagtttttttttgttttgttttgtttttttttgtttttttttaagagacggagtctcgctctttcgcccaggccagactgcagtggcgctatcttggcccactgcaagctccgcctcccgggttcatgccattctcctgcctcagcctccccagtagctgggattacaggcacccgccaccgcgccctgctgactttttgtatttttagtagagacggggtttcaccgtgttagccaagatggtctcgatctcctgacctcgtgatccacccacctcggcctcccaaagtgctgggattacaggcatgagccaccgcgcccggcctgtagtattgttttttaattgcaatttccaattttttgttgttagcatatataaatattgagttttgtatatccatcttgtatcatacaaccttggtaaactcacttattatgttcaggagcattttgtagatttcactgaattttctatatttatgataatgtcatctgtgaataaagacagtttgaggccaggtgcagtggctcacgcctgtaatcccagcacttttggaggccgaggaaggcggatctcaaggtgaggagcttgagaccagcctgacctacatggtgaaactccgtttctactaaaaatacaaaaattagctggtcatggtggcgcgtgcctgtagtcgcagctactagggaggctgaagcaggagaatcacttgaacccgggaggcggagattgcagtgagccgagatcgcgccactgcactccagcctggcgacagagcgagactccgtcaaaaacaaacacacacatacacacacacacacacacaagacaatttcctgtcttcctttccaatctcagtatctttataccccccagtccagtcgtaatt

SEQ ID NO: 1563561 - DNA, 4001 bp, Homo sapiens
ccagtattgggaggctccgggcggagactgtacatccgagtcttgggaggctctgggcggagatgggacactccagtctcaggaggctctgggcggagatgagatacgcgagtctctggaggctccgggcagagatgggacactccagtctcggggggctccggggggagactggacacccgagtcttgggaggctctgggcagagatgggacactccagtatcgggaggctccgggcggagactgtacatccgagtcttgggaggctctgggcggagatgggacactccagtctcaggaggctctgggcggagatgagatacgctactctcaggaggtgcctggtggagactggacaccagaatcttgggaggctctgggcggagatgggacactccagtctcagaaggctctgggcggagatgagatacgcgtgtcttggggggctctgggcagagatgggacactccagtgtcgggaggctctgggcggagatgagatacgtccttctctggaggctccgggcagagatgggacactccagtctcaggaggctccaggtggagactggacacccgagtcttgggaggctctgggcggagatgggacactccagtctcaggaggttccgggcggagatgagatccgcgagtcttgggaggctccaggcagagatgggacactccaatcttgggaggctccgagcggagattagatatgcgagtcttgggaggctccgggaagagaggagacactccattcttgggggtctctgggcggagaggaggtacgcgagtcttgggaggttccgggcagagatgggacactccagcctcgggaggcagctggcggagaggagatacgcgagtctctggaggttccgggcagagatgggacactccagtctcgggaggctctgggtggagactggacaccagagtcttgggaggctctgggtggagatgggacactccagtctcagaaggctctgggcggagatgagatacgcgtgacttgggaggctccaggcagagatcaggcactccagtctcaggaggctcccgatggagatgagatacgcgagtcttgggaggctctgggcagagatgagacactccagtcccaggaggctccaggtagagatgggacactccagtctcgggaggctccaggtggagactggacacctgagtcttgggaggctctgggcggagatgggacactccagtctctggaggctccaggtggagactggacacctgagtcttgggaggctgtgggcggagatgggacactccagtctctggaggctccgggcggagactggacaccggagtcttgggaggctccggggggagacaggacacccgagtctcgggaggccgaggggagaattccccacaggggtatttaccaggctccgtgggttcgtcagttgtcttctcctggccctcacaagagcctgcgtcctccagcttcctctcagggtccagcggtttcagtacctgtagtaggagatctggaggcatatcttctcccagattggggtacatggccaagggatgcttggtcatcagctgggcttccacttcctctacgaacgccttccgtgctggctgtgctggcgagagcttggaaaacagggccgctttcttgagcagctttttcttcctgcttttggggtcagcttggggacctctgagagatattttggggagtaaaaactcgtcacggcgacaaacaagcgtatcttcaggagactgacagccgtagcggaagtcgtccatgccctccgtcacaaatacccagttctgggtgtccacaggcgggaacctcaggcgcctgtgcttgcgcttcgcgaagtacttggaaggcggtttgtcacagtaccagggcgtggagtccatgcccggggaactgggccggtcctgcggcctctggtcccccatggtggccctcgctggggtgccacctctccagtttccgcggttcctgatccctgacgctctagtcgctaggagaccgccagccacgcgcagcccaggttccttcctggaggcggagcagcgctgatgccacctgcgcagcccagattctaacaggtgtgtagtagaatctcattctgggtttcatttgcgtttcctaatgactactgatattgaacatctctatatttgcttatttgccatccttatctctccttggttgaagtttctgtggatttttcccccatttttaaattgtgttgctggatatcatatttagttttgaaaattcttgttctgttctacatctaagtccgttatcatctatatgatttgcaaatttttctcttcatcgttggcttttccctttcattgtcttaacagtgtctatcaaagagaagtttttttttatttgatgaagtccaatttattaatttgctcttttacagattgtgcttcttttgatgtatctgtgaaaactttgcctatccaaaggtcacaaagatttttttaaatttaaatttgtttaaagatttgtaaacagcacacgatatagatcaaagtactttttaaaaaaatgtgtctattgcctgtgtatatctggtaatttcagtaaagactatattttctccactgaattacctttggaaatttgtagaatatcagctgtgtatatttttttgtgggtcaatttcttggcactcttttgtcttccagatttttctctcacacaaatttcaccctctgttgattactttaactttaaaataaacctagaaattaggctgtattagttctttaacaatgttcatttacaaagttggttcttctaggtcctttgaatttctacagaaactttaaaatcagtttatcaatgtctaaaaaaaattccgttgggatttcaattaggattcttttgaatctgtagataaatttgtgggtaattgacatattaaaaataggaagtcttctgaccactgaaaaaggtacattttcccatttgtttacgtgatttttaatcttctcaggaatattttgtattttttagtgcatatgtctttcacataatttctccccagattttttctaaatattgcttttgatactattatatgtagtatttttaaattgcaatttccaattttttgttgttagtatatataaatattgagttttgtatatccatcttgtatcatacaaccttacaaactcacttattactttcaggagcatttttgtagatttcactgaattttctatatatatgataatgtcatctgtgaataaagacagtttcccttctttctttccaaattgaatatcttcatcccctctgctcagtccagttgcgatccttgattttcctttgaataacatcagtgaaatttttctctctcttatggtgtttaaaactatatctatgaaaaagatttttttataaaaaatgtaattatagacaaattcagcttgcattattccttaaccatattattttctaatcacataataattttttctgtacattcttgtccatttttaaaagaaatatttcttatttcccttgttaagtgcagctgaacaatgttttctaccattactagcaggtataccctagttcctccttgtaaataaggcatgatcaatgcctctcttccctgtggctcctcctctgtaaaatagacacaatatatattcctcttaggtttcccattaacgctaataaatggtttatgtgtaaatcaagataatctatataacatgattttgtatagtgcctggcacagaataagcatccagtaaagtattgttattttatataggattactactatttgaaaataaaaatattctactttcagtgtctaaataaaggggaagcagaaatcatacagatctatttatatgtcacaaatattttcatttatcaattataagaatctgttaaactgtcaacacatttagtagatttcataatgtgaagttggtaagaccattttgatatggatttgtttttaa

SEQ ID NO: 1563562 - DNA, 4001 bp, Homo sapiens
atttagagggtcagaaagaagacaagccgccatggtgaaaagacgtgagcgtggacccgaggaggcgggagagagaaatgcaaatcgcaagctagatgctacccctgtcccaaagctggagacagggtcccccccagggtgcaaaaagagcccgaccagccacgggaccccgtaagcactagctccatgttgagggctgcggcgagaggacccacatctgcagctccttggactgctccttcttggccagctgcttctcccgctccttcaccagagcctcctgcttggccttcatgtcattcagggtcacgagacctttgaagcaaggaggcacaaggggcaaggtagtcgcagggccagcggaagagtggcccggggcccgggtgaggggcacccgcaccctgctcacccacggtgctggacttgagctctgcctccaccgcgtcgtagtgcgcagagaacttcttgtcaatgttggatttcatgatgttctcctgcggggagtgacagccaccatgagaaccacccctcactgtggaaatggcaggctggccatcaaggacctgcgttatagtccaaatctgcccctgtgcccttgtcgatggaaggttccatgaggctgggcagggctcttcaaatgctaagagtgccaaatggggctgtttccatccctgagctgctctggctcttcaggtctcctgctggggatcacaggtccctcagtagcctgaagccaccgaccctactgacctttggcctttttcatctccagcctttaagctgaagcttccgagacccaagccaagggttatgaggagagggcaaacaagaacagagtggttgaggggcctggcccctccctgagtgattttcctccctccaggccccagaatgtcatcaacagcttcccaggaggcctctctttggccccagccccaacccacttggtaccatgtcaagccctcgctgaccagtggtctcccaagaaggtggctggcagagaaatacaccttctgcttgctgggcaccccggctcagacagtgcggccagggcatgaggacttggtgtttcaaggctcctctggccaggcttccccagttccccaggcaggagcctgctctcccctggagccccgagtcctgatgagtgagtctccccaaaaggatcaagctcctccacgctccttccctgaccaccaccatcacaggccactcacggaagcagtgggtgaaccgctggcacccgggagggtcgtgcctgcctcacaggtgcaaggggttctggaaggagcctcctggccagtggacttgccaggtctggctcaggcctccccgcctctccagggggagacgaaccgccctgcccggtgtccataggaccagggcagaggcctggctctgagggccgagggggcagaggcctggctctgagggccgaggggccagagccaggacgctgggtgcccaggcgaggcgacgagaggcccgtccccgccgtgcctcccaacagaaacactggctcggctccctcctgccggaggccggtcatcagctagtggcctcagcctcggagaacgcccggctccaggcccatttcacagatgagactgtcgctggcttgcttctgtgtgccctgctggaagtcagcgagccaggggcctgccccggcgcgccgcccgcgctccgtggccaccgccccagggcttccagggccggagcgtggcgcggggccgccggggacctgggcagcgcgcatgctccgaggctccccggctcgcacctccgcgatgcgctgcttcatctgctccatctgctcgcgctgcttctcccgcttcttcatcaggtgcatggcgcggccggcctcgctcgcggcgcccttgtattgagccatggcagcggcggcggcggcggcggcggcggcgggcggcggcggcggcgacagcgacagcggcagcggcagcggcggtggcggccgaacagtcagctgacgcccgcgccgtgacgtcagccaccaggagacgcacggatgccccgccccgccgcgcgccagctggcccggagcgtgaccaccgcccgccccgccccgccggagaccgcccctggtcctgcgtggactcccgccccagcccccgccgccggctcctgtggaccccggaggctgaattccccagcccctcgcgctgcctcgacgttaacccgagccaaggctgggccccggtccctctaattcctcctggtgaccccaacgctggtcccctggctgccctagttcccccgcattaagccgaaaactggcacccgtctccctgcttcacttagaatcccatccgaggctggcccctggtcccctctgccctctcctttcaagccagaggccaggacccccgctccctctgcttcctccacgttgacacccgccctccaccacactccccctgcattgagcactgagggctgcagtcctggtgccagcatcgactcactgggtagccttaagctttaagtcaatttggccccagcgtgctctgggtgaggaattccctggtgaagaatgccaccttttacagtccagagtgaagctaagccagagccccaacccaggcagccaaagccctgccaggtacccagcttttgggagataaccatcaagatccagagattcaggtttcaaccgttttattgggaggttttgttttctgtgaaatacactagagggtggggaaggggacacattcactttgcaagataagggtttcccaccactaaaggaaaggcatggggcagggcacactggggtttgggtccgttttcccacctccttctgcttggctcacttttcttttctctcagcaagtaccacagaacacaaagacaagaaacaaaacagcaaatcaacctccaacggggccatgcccaagccttccccactcccccaggctgggcaagggctgggaggggctggggcagctcactcgacagccctcaggccacacgggaaggctgcaggctcagaaagggtgggtcaaagttaataaattagaataaattaggggggaggaatgcaactttgtgctgggagggccccttctctccaacacgcgagagttggtgggggggaggtgggggcatctccaaaggccactacagtgggggtaagagcggtgggggcagaagtcaccttttcctccacgtcttcccaaacagagcagaagaattaggggtggggggaagagacacacacaaggagaggaaccctcttttcctaggataaggaagggccaagaaagaggatgctatccaaccccccatctcccaagccatcgctagggttaaggatttggtcagtggatcaatgaggtgggtgatgggaacgtggtgggggaagcagaggatgctggagccctcgaggagaacagacacaggctggggcagcaggggctgggggcggccacaatcactgctcagcttctccaaagacgtcgttctgtttgcgcttcatgttctcaaagtcaaaggccgtgccagccatgcgtttgtagatgtctttgatgtcgttgcaggttgtctcaaagtgtgtggtggcatcgtaggagcaggaacagaacacctggaaacagccagagcccagcgcccagggtgagtcagacaggtatcctgggcgggcagccaggagcccagggctgggacgagctgcttacctggctctcacaaccatcatcaatgggctcatacaagtcactgatagccacaaacctgaggggcagacagaggggaggggacaggcctcacaatgggccatgcccttcctggtccctaagcccagctgctgggctccctccctctcccccttgggctcagcccagtccctcacttctggtcaatgggctccaacagctccagagccggctccacctccttttcagggtccgtggtctccacagtagtgctggcaatagctatgtacttgccctgggccgccacgttgtgtgcataggagatca

SEQ ID NO: 1563563 - DNA, 4001 bp, Homo sapiens
agaaaggcgaagaacaaccgacaatcaaccatgaaatgacagtcagcatcctctgcctaagaaggtagatcagttccctagggctactgcaacaaatcaccacaaattcagccacttaaacaacacacatttatactcctccgatcctggaagtcagaagtccaaaactagcctagaaagctaagatcaacgtctaagcagggctggctccttctggaggctccatgggagaatgtttccttgccttttccagcttctagaggagggctgcattccttggttgctggccccttcctccatcttcaaagcttctaactctgcttctgtcctcacgtggccttctctgacggtgactcctcctgcctttgccttataaggatgggtgtggttacacccagataatctaggatgatctcccatcttaaggtctctaatcacatcttcaaaatctcttttgctatataagatgacattcacaggttccagggattaggatagggacatctttgggaaatcaatatttagcctcctacaaaggacaaaggattgtgtaatacattttataaagaagtccctcagaaggtctaaacttgttatataaagacaattcctacctgggacccctcattccaggagatgccagataaggtgctgttactgacatgaccttccaagctttgttttacagagcaaaccccaatttacacggaccctccgagcagacggtagcagatgaggtgtcactgccatccttccctaataataactttgcaactcttcttgcaaattacagtaaatttacatatcactgggatgaacagtcctgcagcagtcctcagactctccgcccaccttgggtagaaagcacatctgcccaacccttctcccccaagcagtaaaggtaggaaataactacccgccaactaacagtatctcctatcaagatactgttgatgggccggacgaggtagctcacgcctgtaatcccagcactttgggagggcgaggcaactggatcacctgaggccaggagttcaagaccagcctggccaacatggtgaaaccccgtctctactaaaaatacaaacattagccgggtacggtggcacacacctgtaattccagctactcggaagcgtgaggaaggataattgctttagtccgggagacggaggttgcagtgagccgagatcacgccactgcactccagcctggccaacagagcgagactccgtctcgaaaaaaaaaaaaatactgttgatggctggatggaaacgatgtttctacagagatcttagcttaatcacctcgcctgggaagcgcggagcccaacactactgtggatgtcctggcagggttcggaacaggagctgcaagcagcctaggtccccggagtgacaggaaccctcggacagcgttctccaaaaggctccgcgcgactaagcgccataaagtctaccggagtgcagggccgcgggtgccggcagaaggcgtggcgcactgcgcagagctgcgggcgcccgggccggtctccgcctcgctggaggcccaacccggccacgtcctctcctagggcctgcacaccggtccacgccatggggatacctcgcggctcactgctcagcacaccgggcgcggcgcaaaggcggaggtcctcagccccgagcagggcttcccggcctctgctacggtgagcactccagaaggccggcctggccagccgggcccgctccgcgaagcgggccgcggcgccgcctgtcctggcctcccccggccgcggttacctgcctccatgatgaacctcgccactcggaagtgcaccctggcttcgggcgccggctgcccctccgggccccgcgctgcaggcccccctccgccgccctccggggcttccatgaggcgccgcggcaccggcggaaggagaggcggccccggcgcgcagaagccggcagaactggaggtgctcgcggcgggcgctgccgccccacccggccgcgtccggccccgccccgccccgcccctcgccgccccgccccgcccctcgccgccccgccccgcccctcgccgccccgccgctcctccgccccgccccgcccctcagggccctcgcccaagggtgagcgcgcgcttgcgccacagacgctgcctggccgcgcgcgcaggcgcaggcgcaggcgcagaggccgacaccacggggcggctggtatgtgtccaccggcccctaggcgcctcgagccccgcccctgggagacgcaggctcctccccgcggagcgagagcccgcggagctgctccgagacccgcgggagggcacctccggtcacccgagccgcaaatccccgccgtccgaagggggtgtcgccccgggctgtcggcccagcgtggcttaggccaggtacaaccggcagcgcccgccaagccctgggctagggacgcctgcgggagttcacggggaggcgccggtgtctgaggtctgagaagacagcggccaccggaaaaggtgctaatgtttgcagaccccgatccatcgacaccccaaggaaatgctgtgcacaaaattccaagagggccttttcgaatagacgcatgaacggtgtttgtgtctggatcgtccagcctcccgggatcgattgggaatctagcttctgcttgcctttccagcgcgacgcacagtaggagcctaataaatgtttgctgaatgaatgctgaatatcgaactcaggtatttaccatctcatttttcattcgcgtcttccacaagcaggaaatggtgcatcaggctttagggacatagaaccccaaaggtactcactcccaagttagtgacagtcactggagtcattctgatacattcagatcattgctacaatttcagacagctggcaatatggagaggaaaaagctactgctccctaaacccttctgcccaggcgccttgatctcctgatggtgtggaagtctccacctcttacccccaccccacacacccagtccggcctcattctccttcctcagcacttcctgcctccaccagcctccccaagtcctctctccatcccagctgggttagtttcctggggctgctgtaacaaatgaccacaaattgggttgctaaaaacagcagaagtatatcctctctcaattctggaggccagacacctgaaatggaggtgacactagggctttgctccctcaaaggctctggcagaggatcagttcttccttgctcttccagcttctgcagcctgagttcttcctgggcttgtggccccatcactccaatctgtgcctccgtctctacatggccttctccctgtcttctcgtctgtctcttataagcacacctgtcactggattagggcctacctagataatccaggaggagctcatcttgacatccttattttcattacatcttgcaaaggcccttctgctaaataaggtcacagtaacagggattaggacacggacacaccttttgggggctggcattcaccccacaataccagccgccagagcgagctttctaaaaggcgaggctgaacaggtcctgccctgcctaacaccctccggagtcccttcaccttcaggagaaaatgtgaggccttgacctcacatgctggtccttgtggagtcaccctatcaactgaccagcctcggatctcaccactttgcctcatggcagagaccttcggcaggtcccccaaaggttatggtctcctggctgaacgtctctgcacgtattctgcctggtgaaggaattaccactccacttccatcacccagcttgctcttgtctgtatgtgcgcgggtgtgcacgtgtgtgtgcatatgtgtgcgtgtgtggactgactcagggtccccagctccctgtgctgctgacacctgccacgccttgagcaccgtgtctgtctgcaagctgtgagcagccccaccctcttccccagcccaaggctgaaacctaggcaatgcccagagggcccacctcccctcagccccgtt

SEQ ID NO: 1563564 - DNA, 4001 bp, Homo sapiens
ttgcggtgtccctgggacagagctcagccctgcccctgtgtgccccagagacctgcgtggcccggaggaccacgggtgccacaggacctccccagccatctctgggagaatgtcaggggctgcactgccacttgcctgcctggatgcccaggtgacccctcgtgaccccaggtgtcctgtcctgaccggcggccgggctggagggacccactcgaactgtcccccacaacacccctgcttgtcgcctccccacacactccgcccctcctcctccccttcccccatcccctcaccccacgaaccccacacccctcccctcccctgcccccatccctggccccacacccggcccctgcctatctgccactcccccgaccctcccccctctgccaccacccctcccttgctcccctctccaccacctccattcccccaagcccccctcccctgccccacccctccccactgcacacatccacaagtccccgggacaatcccgggccctggggatcactcaggtgtctccagctccctccctgccctggcccatcccagcccaccctcagggcctcgccctgacccaggccccaggcaacgatgccagggccatttcctgctttgaaaacctggggcctcttagcacgtgcatggtggactccaaagccacaaaggggccaggggtctcgggctgcccatgtgccccccgcgcagagagcaaacagaccatctccttgggcgtgcaccttctttcgtggccccctgggcggccgtaacttgagcttccaactgagctttggcagccttcctgctgcgcttcctgcccacgggctccatggttggctgtcctgggaagttagaggcgatccctgaacctggttgagtgcaaagtcaaactaagtaagctaaggaaacaggatatgtgaaaggagagccaacgggatctcggattcaagaaagggtggggctggcccaccccgtgtatcctgtgggagcaggaggggtcggagaagatgccagtgtcccctcctatccttcgtggcccgtccagcccgtccctggggctggctgcagaactcacagctgcctcgcacacctgaatggcccctgcaggatccttgcggtgtccctgggacagagttcagccctgcccctgtgtgccccagagacctgcgtggcccggaggaccacgggtgtcacaggacctccccagccatctctgggggaatgtcaggggctgcactgccacttgcctgcctggatgcccaggtgacccctcgtgaccccaagtgtcctgtcctgacgggcggccgggctggagggacccactcgaactgtcccccacaacacccctgcttgtcgcctccccacacactccgcccctcctcctccccttcccccatcccctcaccccacgaaccccacacccctcccctcccctgcccccatccctggccccacacccggcccctgcctgtctgccacttccccgaccctccaccctctgccaccacccctcccttgctcccctctccaccccctccattcccccaagcccccctcccctgccccacccctacccactgcacacatgcacaagtcccggggacactcctgggccctggggatcactcaggtgtctccagctccctccctgccctggcccatcccagcccaccctcagggcctcgccctgacccaggccccaggcaacgatgccagggccatttcctgctttgaaaacctggggcctcttagcacgtgcatggtggactccaaagccaagaaggggccaggggtctcgggctgcccgtgtgcaggtcagccggccgctcagcgcttcacaccctggttgcgagagggcagcatgctcgacttcctgcctccctaccgcgagcgcttcacctgcgcttcacaccctggttgcgagagggccgcatgctcgacttcctgcctccccaccgcgagcgcttcacctgagggacccctgatgccgcttcctcacagaacctgcaggcactggcaccacgacgctctcttagaaaaatgggtcctcagttctcgcgagagcagctgccctggctatccacgctcctctctgattggtcagctaagtgcgcatgcgcatgcgggtgaaggaccttgggggccacgacccctgctgacacgccttccctctttccgtaagggaccacccatatttgctgtggactggggtgggtggtggttctttggggcctctgtccccagaagttttcagcgcctcctcctggggagggatgcaaggactcgggatggaagccaagtggacggggcctaggacctcgcccccgagctccttccagccacccctgcccctttggctagaatggccttcgccttgcaggtggagcccaggctccctcccatgccctgtgtgtttccaccatgtccagctgcaccctttttatcaatggattgtgcttttatgttttttgcttgcttgtttgtttgttttggagacggagtctctctctgtcgcccaggctggagtgcagtggcaagatcttggctcactgcaacctccacctctcgggttcaagcgattctcccacctcagcctcccaaggagctgggattacaggtgcgtgccaccattctcggctaatttttgtatttttagtagagacggggtttcgtcatgttggccaggctggtctcgaagtcctgacatcaaagtgatccacctgcctcagcctcccaaagtgctgggattacaggcatgagccactgagcccatacccaaagtcgtgtctttaaaggcatcaactgtatgatgtatagttgtttccaagaaatgatgactaaaaggtactgattgagaaacttttgtcatttctttcttcaaaaaaagtcaactagtttcctgctagttcttgccacttaagttagccatagaaatcccaggagtgaccatcaggttgtcaaaggcctttcttcttgttgctgtaaggttgacctgctgatagtaacagatacaccccactctcggttatttcaggatcaagtagatccattggccatggagtgatggtcttttcaagtcaggctattttgagaggtaataaaatattcgtgtactttaatttatttccttttgtacttgcttgttttaaaatacagttctgcacataaatatttttgacaagatgaacaatatagatctattttgtcacattacaaaacaaacaaattattaagataagtcaacaatgactgtaagtagaacattgtatttcgttattaattttcattagatttccaaaacatttttctgtataacatattcagatattttgaattcagcaatgcagtcagatgtttcatgtaagtggctgggtgcagtggctcatgcctgtaatctcagcaccttgggaggctgagacgggcagatcactggaggccaggagttcgagaccaccctggccaacatggtgaaaccccgtctctaccaaaattacaaaaaaaactgggtggcaccacgcctgtaatcccagatacttgggtggctgaggcgcgagaatcgtttgaacccaggaggcggaggttgcagtgagccaagatcgcaccatggccctccagcctgggtgacacaaggagactctgtctcaaaataaaataaaataaataaaataagataaaataaaacatataagtgttcttatgtgatgattatctgaattgtttcttttttctttgcttttattctacatgggtattacttcacttgttttaaagagttgtgtgttcataataaaggctcccttttctacatagttggtcttcccttcttccctcaacattttaaaaaaaattctacaaaatctacacaatcaacattcttcctttggatttaagctgaattattaatttcttcccaacattacagtttttcagcagctgggaaatggaaccaaatgatgtttaattctcccagcagtgatgtgaggaaacctgcacagaac

SEQ ID NO: 1563565 - DNA, 4001 bp, Homo sapiens
agagacctgcgtggcccggaggaccacgggtgccacaggacctccccagccatctctgggagaatgtcaggggctgcactgccacttgcctgcctggatgcccaggtgacccctcgtgaccccaggtgtcctgtcctgaccggcggccgggctggagggacccactcgaactgtcccccacaacacccctgcttgtcgcctccccacacactccgcccctcctcctccccttcccccatcccctcaccccacgaaccccacacccctcccctcccctgcccccatccctggccccacacccggcccctgcctatctgccactcccccgaccctcccccctctgccaccacccctcccttgctcccctctccaccacctccattcccccaagcccccctcccctgccccacccctccccactgcacacatccacaagtccccgggacaatcccgggccctggggatcactcaggtgtctccagctccctccctgccctggcccatcccagcccaccctcagggcctcgccctgacccaggccccaggcaacgatgccagggccatttcctgctttgaaaacctggggcctcttagcacgtgcatggtggactccaaagccacaaaggggccaggggtctcgggctgcccatgtgccccccgcgcagagagcaaacagaccatctccttgggcgtgcaccttctttcgtggccccctgggcggccgtaacttgagcttccaactgagctttggcagccttcctgctgcgcttcctgcccacgggctccatggttggctgtcctgggaagttagaggcgatccctgaacctggttgagtgcaaagtcaaactaagtaagctaaggaaacaggatatgtgaaaggagagccaacgggatctcggattcaagaaagggtggggctggcccaccccgtgtatcctgtgggagcaggaggggtcggagaagatgccagtgtcccctcctatccttcgtggcccgtccagcccgtccctggggctggctgcagaactcacagctgcctcgcacacctgaatggcccctgcaggatccttgcggtgtccctgggacagagttcagccctgcccctgtgtgccccagagacctgcgtggcccggaggaccacgggtgtcacaggacctccccagccatctctgggggaatgtcaggggctgcactgccacttgcctgcctggatgcccaggtgacccctcgtgaccccaagtgtcctgtcctgacgggcggccgggctggagggacccactcgaactgtcccccacaacacccctgcttgtcgcctccccacacactccgcccctcctcctccccttcccccatcccctcaccccacgaaccccacacccctcccctcccctgcccccatccctggccccacacccggcccctgcctgtctgccacttccccgaccctccaccctctgccaccacccctcccttgctcccctctccaccccctccattcccccaagcccccctcccctgccccacccctacccactgcacacatgcacaagtcccggggacactcctgggccctggggatcactcaggtgtctccagctccctccctgccctggcccatcccagcccaccctcagggcctcgccctgacccaggccccaggcaacgatgccagggccatttcctgctttgaaaacctggggcctcttagcacgtgcatggtggactccaaagccaagaaggggccaggggtctcgggctgcccgtgtgcaggtcagccggccgctcagcgcttcacaccctggttgcgagagggcagcatgctcgacttcctgcctccctaccgcgagcgcttcacctgcgcttcacaccctggttgcgagagggccgcatgctcgacttcctgcctccccaccgcgagcgcttcacctgagggacccctgatgccgcttcctcacagaacctgcaggcactggcaccacgacgctctcttagaaaaatgggtcctcagttctcgcgagagcagctgccctggctatccacgctcctctctgattggtcagctaagtgcgcatgcgcatgcgggtgaaggaccttgggggccacgacccctgctgacacgccttccctctttccgtaagggaccacccatatttgctgtggactggggtgggtggtggttctttggggcctctgtccccagaagttttcagcgcctcctcctggggagggatgcaaggactcgggatggaagccaagtggacggggcctaggacctcgcccccgagctccttccagccacccctgcccctttggctagaatggccttcgccttgcaggtggagcccaggctccctcccatgccctgtgtgtttccaccatgtccagctgcaccctttttatcaatggattgtgcttttatgttttttgcttgcttgtttgtttgttttggagacggagtctctctctgtcgcccaggctggagtgcagtggcaagatcttggctcactgcaacctccacctctcgggttcaagcgattctcccacctcagcctcccaaggagctgggattacaggtgcgtgccaccattctcggctaatttttgtatttttagtagagacggggtttcgtcatgttggccaggctggtctcgaagtcctgacatcaaagtgatccacctgcctcagcctcccaaagtgctgggattacaggcatgagccactgagcccatacccaaagtcgtgtctttaaaggcatcaactgtatgatgtatagttgtttccaagaaatgatgactaaaaggtactgattgagaaacttttgtcatttctttcttcaaaaaaagtcaactagtttcctgctagttcttgccacttaagttagccatagaaatcccaggagtgaccatcaggttgtcaaaggcctttcttcttgttgctgtaaggttgacctgctgatagtaacagatacaccccactctcggttatttcaggatcaagtagatccattggccatggagtgatggtcttttcaagtcaggctattttgagaggtaataaaatattcgtgtactttaatttatttccttttgtacttgcttgttttaaaatacagttctgcacataaatatttttgacaagatgaacaatatagatctattttgtcacattacaaaacaaacaaattattaagataagtcaacaatgactgtaagtagaacattgtatttcgttattaattttcattagatttccaaaacatttttctgtataacatattcagatattttgaattcagcaatgcagtcagatgtttcatgtaagtggctgggtgcagtggctcatgcctgtaatctcagcaccttgggaggctgagacgggcagatcactggaggccaggagttcgagaccaccctggccaacatggtgaaaccccgtctctaccaaaattacaaaaaaaactgggtggcaccacgcctgtaatcccagatacttgggtggctgaggcgcgagaatcgtttgaacccaggaggcggaggttgcagtgagccaagatcgcaccatggccctccagcctgggtgacacaaggagactctgtctcaaaataaaataaaataaataaaataagataaaataaaacatataagtgttcttatgtgatgattatctgaattgtttcttttttctttgcttttattctacatgggtattacttcacttgttttaaagagttgtgtgttcataataaaggctcccttttctacatagttggtcttcccttcttccctcaacattttaaaaaaaattctacaaaatctacacaatcaacattcttcctttggatttaagctgaattattaatttcttcccaacattacagtttttcagcagctgggaaatggaaccaaatgatgtttaattctcccagcagtgatgtgaggaaacctgcacagaacattgctgcccagggagctcccccaagcctgacatccagtgtggttt

SEQ ID NO: 1563566 - DNA, 4001 bp, Homo sapiens
acctgcagtatcttctggcttcttggtattagccctgtaaaaaaagttacatcaaaattttaacaaaatactacacaaaatgccatgtttgttgggaaaagaaatgtcttatgtgaaatgttctgcatagaatagaacagtgatgacatggtccaaagctgacttttcctaaaagaccctatccgacaggcaaaagtgacttaaacactttaccccgtgtgttcatctgtttcagcaaaaggttctctttccccatgctcatcagttacatcttcctcccttgtttctgtaaaacggtttctttcctcacattcatcacggactggatcctttcctgcattaaaatgtaaaagacaaaccttttttagaggaagatgctgctgtggacattttttgtggagaaatgtactagttgtagacttttttggggggggggggctctctgccaattaaagctttaaagcagagctatacatggaatcaccggttcctgaccattttatcgagggacttttggaagcccttcgggttcaggttccagtaaacaacgtactacagttcagaccccttggatgtcaggactgcacccatggagaagagctgctctgagagcatctgtaaccctgctatgagggggagccttccacggggaagcctaaggcccttgagcctgctttgaaaacctggcgcatcttagcacgtgcacaatggactccagagccacgaaggggcctggggcctcgggctgcccctgtgcccccagcgcagaaagcagacagaccgtcctcttgggcgtgcaccttcttctgggtccccttgggctgtatttacctgcatgcttcttcccccaggccgccataaattgagcctccaactgggccttggcagccctcctgcccacaggatccgtggctggttgtcctgggaagctagaggcgatccccgaacctggtgagcgcaaagacacactaaggaagctaaggaaacctggcatcggaaaggaaagccattgggatcacaggttcaagaagggtggggctggcccgccctgggtctcatgtgggagcaggaagggacggaaaagatgccagtgtcccctcctgtcctggcccgtccagcccgtccccggggctggctgcaaagctcacagctgcccctcacacctgaactccacggcctctgcgggatcctcgccgcccttttgggacagaactcagccctacctctgagtcacctagcgaccccatgtggctgggagggccgctgggtgacacaggatctccccagccacctctaggggaatgtcaggggctgcactgccactcgcccccctggacgcacaggggacccccggtgacccccggtgaccccaagtgtcctgtcctgtcgggcggccaggcaggagggccccactcagactgtcccccacaacacccccgcctcactcccacttctccccccctcggcccctccccccaacacatgcacaagcccccaggaccctcccgggccctagggatcacccaggcagctccagctccctccctgccctggcccaccccagcccaccctagcccaccctcagggcctcgccctgacccaggccccaggcgacgacgctggggccatttcctcacaggtcggcgggctgcccagcgcttcacaccctggttcccagagggcctcgtgcctgcgttcccgcctccccaccacgagtgcttcacctgagggacccctgatgtggcgccctcaaagaacctgcaggcagcggcaccactaggacctcttagaaaacgggtcctctcaggaagctgaggcaggagaattgcttgaacccaggaggcggaggttgcagtgagcccagatcacaccactgcactgcagcctaggcagcaagagccagactccgtcccaaaaaaaacaaaacaaaaaaacaaaaaaaaagaaaagtaaagaaaacgggtcctcagttctcgtgagagctgcaggcaggacttcctgcgctcctcgctgattggtcggctcagtgcacatgcgtgtgacgggctgtgtggggccaggccccctgctggcacgccctcacccttcccctaagtgacagcccgtggttgctgtggactggggtgggggtggccctttggggcctctgtccccacaatctttcagcttctcctcctggggagagacacaaggacttgggatggaggccaagtggacagggcctagaacctcgccctggggcttgttccagccacccctgcccctttggctagaatggccatcaccctgtgggtggagcccaggctccctcccatgccctgtgtgcttccaacatgcccagctgcgtcctttttaatcaatggattgtgcttttatcgtttgtgtttgttggtttttgagactgagtctcactctattgcccaggctggagtgcagtggcaagatctcagctcactgcaatctccccttcccaggttccagcgattctcctgcctcagcctcccgaggagctgggattacaggagcccaacaccacgccctgttgttgttgttgttgttgttgttgttgttgttgttgttgttattattattattgcatattcggtagagacagggtttcaccatgttgtccaggctggtctcgaactcctgacctcagttgatccgcatgccttggcctcccaaagtgctgggattacaggcgtgagccaccgtgcccagcccataaccttttttgtttcctcactacttttctttctcatcctcatgccccagacttgcccacaaaccttcatactccagacttatccagacatatgccacaaccttcacccacaaattaatgccttaatacttatcgttaactcagctttttcccacctccgatcccctgtaatagggagagagttgtttcggagttgggagtgaataaatattgcctaaagtttgtaaatcaagatacagagtttcattatactattgaaattataaaggcagtcatcaggaaaactaatccacagccttaaatgcctatataaccaaaaagagcacacacaaagcatacaaatcctgtagtaaaagttggaaaataaagaaaatactacagagaccataacataacataaaagaacagaattaaggccaagtgaatctgttgagcaagaaatatgaatgagataaactcgcattctaaaggaaatgacttccaacttggatcaaaataaaaacctaagtatatgctgtatgtaagaatggaattaaacaaaatgatacaaaaagtacatatcagaaaaatatgaagaaaaggaaaatatggatctgagaattgatatctcatgaatgtaaaataatgcaaaaaataaatgaataaactaaaggcagagtacactgaacaagagaagggcacaatctactctgacaatctcacatgaatcattttgtgcttaacacagcatcaatgtgcctaaacccaaaaccgtagaaaataaaagcaaaacaatcaatgaaaatgaacagtgatatgagagtttaagctccgtctgtccaggagagaccaaatacaaatgtattgtcttggatacaggcatagtatcttaaattgctctcttggcagtagagtgagcattttctttcactttcaaccaatgaaccctcaccacatcctatagtacttccttggccactactatcttctattctacctacagtttcccaaaagattaaaaaattagaaagacttcattctcagcaaactatcgcaaggacaaaaaaccaaacaccgcatgttctcactcatagctgggaattgaacaatgagaacacatggacacaggaaggggaacatcacactccgcggactgttgtggggtggggggagaggggagggatagcattaggaaatatacctaatgctaaatgacgagttaatgggtgcagcacaccaacatggcacatgtatacatatgtaacaaacctgcacgttgtgcacatgtaccctaaaa

SEQ ID NO: 1563567 - DNA, 4001 bp, Homo sapiens
tatatatgagaagaaggcatttaagacagtcttgtcatccactaattcatataacctactgtaagggttgtatggttgaaaacaattttcataaaccacaaatagctcgtaaaacatacctgcaatatcttctagctccttggtatcaaccctgtaacaaaaagttgcaacacaattttaacataatgctacacaaaaggccttgtttgttgggaagaaatgtcttgtgtgaaatgttctgcatagaacataacagtgatgacatgatccaaagctgacttttcctaaaagaccttatctgacaggcaaaagggacttaaacactttaccccgtgtgttcatctgtttcagcaaaagatcctctttccccatgctcatcagttacatctccctcctttgtctctgtaacaggttttctttcctcatgctcatgacttactggatcctttcctgcattaaaataaaaaagacaaaccttttttagaggaagacgctgttgtggacatttttcatagagaaacgtactatttgtagacttttttggctctccgccaattaaagctttaccgcagagctatacatggaatcgccggctcctaaccattttacggaggcatttttggaagcccttcgggttcaagtcccagtaaacaacgttcacaggtcagatcccttggatgtcaggaccgcatccatggagaagagctgctctgagagcatctgtaaccctgctatgagggggagcctcccacgggaagcctaaggcccttgagcctgctttgaaaacctggggcatctcagcacatgcacggtgagctccaaagccacgaaggggccgggggcctcgggctgcccatgtgcgccccgcccagaaagcagacagactgttgggcgtgcaccttcttctaggtccccttgggctgtgtttacctgcaagctccatttcctgggcggccataacttgaacctccaactggtccttggcagccatcctgctgcccttcctgcccacgggctccgtggctgactggcctgggaagctagaggcgacctctgaacctggtgagtgcaaagacacactaaggacactaaggaaacgaggcgtgttaaatgaaaatcatcaggatcgcaggttcaagggcgccccgggtctcccgtgggagcaggaggggacgcggagaagatgccatcatcccctcctgtcctggcccgtccagcgcttccccggggctggctgcagagctcgcagaattccgcggcctctgcgggattcttgcagtgcccttgggacagagcctggccctgcccctgggttccccagcgacccagtggagtcgggagggccgcggggtgacacaggatctccccagccatctccatgggaatgagccggtacgcacctgtttctgacaggggcagggactgcccattcgccagcctggacgcccaggggacccctggtgaccccaagtatcccgtcctgatgggcagccagacaagacggacccacgttgaccccccgacccccccccaaacgctgcacacatgcacaggcctccgggaccctcctgggtcctggggaccactcaggcagctccaactccctgccctgacccaggccccaggcgacaatgcctgggccatttcctcacagatcagcctggctgccccgcccttcacaccctcttccccaaagggcctctggcccgccttccccgcatccccaccgagggcgtctcacctgagggagccctgatgttgctccctcagaggacctgcagaggctggcaccgcgaagctcctccgagggcctgggtcctctgttctcacgagagcagcagccgccccggctgcccgcgctcctcgctgattggtcggcccagtgcgcatgcaggtggcgggcggcatggggccacgccccctgcaggcacaccctccccctcacggactgtccatggctgctgtggactcattgggtggctctctgaggcctctgtccccacgatattccagctcctcatcctggtgaaggaagcaaggactcgggagtggtgagtgccaggggaccctgccctaaggaatggaggccaagtgaacggggcctaggaccttgcccccaggctcgttccagccactcctgcccctttgggtggaatggccatcaccctgcgggtggagcccaggctccctcccatgtcctgtgtgcttccaacacgcccagctgcatcctttttatcaatggattgtgcttttatgttttatctaagaaaattgttgactcccagcaggggcaggtagttttctcctatcctactccattccctcacactgggcattgcatgattctgcagtggatatacaaagttaaagactttatgtctagatttctcatgatgtggtcatttcttttctttcatttttcttttttctttttttttttttttttgacagggtcttgctctgtcacccaggctgggctgcaatggtgtaatcactactcactgtagcctcaactgcccgcgctcaagggatcctcccaccacagcctcccaagtagctgggactacaggcatgtcccaccatgcccagctaattttattttatttatttatttatttttagagacagagtcttactctgtccccaggctggagtgcagtggcacgatctcggcttcctgcaacctctgcctccctggttcaagcaattctcctgcctcagcctcccaagtagctgggactataggcgcacgccgccacgcctggctgatttttttttttttttttttgtattttagtagagacagggtttcaccgtgttgcccaggctggtctcgaactcctgagctcagtcagtctgcccgcctcagcctcccaaagtgctaggattacaggcatgaaccaccgctcctggccaattttgtttattttttgcagagatgaggtctcactatgttgcccaggctggtctgcaactcctgggctcaagcgatccgcccgcctcagcctcctaaagtgctggggttacaggcttgagccatcgtgcccagcccgattatttccacagctgggttggaagccatctttccctgacaaggcagctcacctttatatctaagagttctctataacctaaagagaatccctaattactgacactaaataccaccagctgtccccatttccccacaatctacttggtacccaaattagccaatgagacatcttggggaattttaagccatgattgcttcaggtttctctctctttcgagcttaagatgtgtaacattaagaaagaagacaaatcttgcagagggctttgtgcaaccagtcttacagctttctatcccatctggatcaatgtaattttcatatgcttcatcaaagatttcagctgaaagtactataccaggttctgtctataattggaaacacatacacacatacaccaactactggtattcagctaagaattcaatgctggctcatttttctttaaaagaatgtcaaatcaaggaacaattctccatcacaaagtggaatttgatgtcaggtgaagacaaatggggattacagagctacttctttggcataacagcctagaaacaaactgaaaaggattctgcaattttaaataggcacaaagacattcttttcagaacaccaagtgtccaagttacaaaaccctgaagaaattcttttaaactttggatggagcaatttatctctttttcccaactggagtatttgtgagatgtctcccagaaagaaacaactcaatacacaaatcattaagcctttgtaaagggaggaagtctatttgaagcaactctgggttgcggaaacaggttttgtgaactaaccaaagcctttagggcaaacatggtcacttcaattttttttttttcccactagaggttatctacaaagaccacaggaaatgtttaagcaaatttaaaggagatttctcaagagttattagaataagtactttaattta

SEQ ID NO: 1563568 - DNA, 4001 bp, Homo sapiens
ctatacagaattgatctcacctttttcaacattatctaatatgcctgaaatgtgagtaaatgcgggagaatcgtgatcaactaaattagaggatttgggaagattacgctaaagaagatttttatgtcatattaaggacttataaatttctcatataagtaatgataacccactgaaagacttcaaaaacagaaatcacaggactgtacttttgagttatgaagatcctggtgacagtgttaaaggtgtgagtgagatcagactggaaaaagagctaacaattagaagaaaattatgagtacttaaataaaagggagagatgactctgaaggtaatttggcagtcaactgaaatgcatatacccagtagtttcatttgtagatataaacccagagacataatcccacatatgaatgaatacattgctctagaagctcactgtgctgatatttgcaatataaaaaaagtaaaaacctcaatgaacaccaataggggaatgagtatagatggactatcaaacaagagttaaaaggaatgaattagatctatctatctatatatgtgtgtgtgtgtgtgtgtatatatatatataatcatggttaaatttcaaaaataaaatgaattaaaaattaagttgcagacaaatgtacactgcagcatattatttatgtaaaacaaataaaacagcattatatatgttctatttacctacaatgactacagtccctgagtgctttctcaagaaatagtgccatgtactattttttttttttttcctgaagaaacagtgccaggtactgctctaagcactttggattaactcgtttcttcctcacaacatccttatgacataggcactgttactatcccattttatagatggagaaactgaggcaaggagtttcaggatcttctcaaaggcttgcagataagaagtgacagagccaggattcaaacccaggcagtatgatccaaaataaaaaaatgtaaaactgtaaacatttcatgccaaattctgaatgctgttgattctggacaaggaagtgtccaggataggtgagtagaggtagaaggagactttagttatatctgaaatatcttttaaggatgtagtcaaacaacgtttaaacaatgtgttcattttttcccataaaaaatgtaaatatatttaaaagtctaggacaaaagatgctaacatgccattctgtcatggatgactacggttgatggaaatatgggggactattcttacaacttgtttgtagttttcagtatctttcaactttaaaaaaggcaatattgtatgcgcaactattttctttcaattgtttttaactgacgaataaaatttgttccagtccctttaaatctaaatctttctcaaccttgacactattgacattttgggctggataactgttgtgaattttcatgtacactggaggatgtttggcagcttccctggtctctatccactagtagccagtgagcatctcttttgcccccggcccctagcagtggtgactaaaaatgtctccagaggttgccaaaggtcccctgggtggtaaaaccgccccccccacacacacccccccacccccccggctgaacacaactaccttaataagccgaaacacgctttttttaactttatataattatttgagattaaagatttcagagatattttgctcattaagcatctcacactccaagttggaaggatactgaagggatgaaaaaaacttcaagcgaatgtagcacttaaaatccaattatcattgcaaggaatgacagacccaggtctcgggatgcccgcttccttccctctctcccgcaatgcggggacaaggggaggaaatccagccccatcgccccctctgcgaagtcctgggaagggaagactcgccagccccatcctacctcaacgcagcggcaacataccggaggccccacgtcgatacggtatccatctgctccaaacctcccgccagcgcgctgcatcctgggaggccgggcggaggctgcgtcgaacgcagaggaggcggagcctagaagccagccaggagaggtggccaagggaggctgaggaggcggggccctggggagtgttgtgaaagcagagagcccgcgagctctctagggcggagctccgcgggggaagcgccggcgatctcgcggctggcgggggcgggaccgcagtgcgggggatgtcgcggggcgaggccagacgagaatcgaatgggacctaggctgagggcctggtcccgcctccagacccaggcgtccgcattggattgggcggtgcggcggcgcttctgtccgccttccggtgtcacgcgaccgcctccccctcccacccttctctgtctacctctgggcgggactgccgggtgatgagatactcggtcggcgacggtagaacgggcgacggcgacaaccgcaatcacatccacgacggtgatcatggcagaggtgaggagcctattgcaccgccgctggccccccggacccggaagccgcctctgaggcccggggaccgagcgcccgtgtgcaggtgggctgggttgagggtaagcgggttgatgcaagtagtatctaaggtcccatcgtgtctcccatccagaatcacgcccagaataaagccaagctcatctctgagacccggaggaggttcgaagctgagtatgtgacaggtgggtactctgttccaggtattaagaaaggtgtgcagtgagcatccccaactttgctggagtgtttgtgagtgtatttgtgggaggtgttagggaccctttcgaccctcacaggaatgatgctgggcacgtctcaaaggttttcctctccatgacaagccgtgtgcactgcttcaaatggtcaagtggtgtgtcccatgctccctttaaagggttaatgtaagttggaaatcggttaagtttttagcatgccctcgtgtttatggaacttgcaggatacttgttaggcccacaacacgggtgacattgtccagtccacggttccactgctggcctttcaccagcaacactagcgaaaatgtacctggaaactgccataatactattgatgtgtacttaattgggtatacaaattccttggatattttgtttgatttggctttcatacaacccagcatgctacccacaaaataggccctccaatgctggaacaagttcttatcccaaactgtatcttgcaaagtacctatgagtccagaattgatttattggttgaacattctgtgtccagatgtcacagatacttgagttgtcaggtacttaactgaatatttaatgcttgtacagtaattttgtaaaacatacggaataacttattgtaaatatggaattaaataaggatttatatgttgcctaccttaagattgattgtaatcctaaccctgccactacatagcttacttgtctattctgagcccgttttcatatctgtgaagtgcaaataataaagttagtaggattaaattttttaaaaaaacataaaccatctagcatgtcttaaaatatagtggattctcagtgaatattttgcctcagttgtcattttggttactgtgaaaggagttaagcttctacatcttgactagtactcagcagaggttccctgcaactttaaaccatcctagattatacatcagttgatgacatagaacaaatatggaaatcggtttcaaatacttgtcagtaaatcttttcatacctccttgccaattttcttcacaccccaaactttgttccagagagttgcaaaagcacttgattcacttttcacccagagttcccatttctaataatatagctggttccaataaagagatccttcttcaattgctttctacagaaatgtaactattatagctgttaatacatggtttataatattttaagaagtaactcagaattcgacctaatgagctagtaacaccccaatagtcatttatttatgcccaagggaggaagcagaat

SEQ ID NO: 1563569 - DNA, 4001 bp, Homo sapiens
tcagctcactgcaacctctgcctgctaggttcaagcaattctcatgcctcagcctcctgagtagctgggattacaggcatgtgccaccatgcccagctaatttttgtatttttagtagagacggggttttaccatgctggccagactgttctcgaactcctggcctcaagtgatccgtccgcctcctcctctcagagtgctgagattacaggcatgagccaccatgccagtccacttgactggatttcttaacagccagaaagcataggagcctcacctgacttattgtgtgtatacacgcgcacacacacacacacacgtaccacacacataattttaaatacaggaaagcgttatttcacacaatagatttatagagtaaagtatttatgtactccccatgcaatatttgtttcaggcattctgaattcccaaggttgaacccccagcataggaaaggatgaccctgacctttaattggaacttcctgtcctcatttgccagcttggagcacaggagcttcctcctcctcacaagtcaacgtctagccctgcctgacctggtcaggctagagcccctacaaccagtactcccaaccccaacctggccaccaagtgctgaggaccccatacagtaccattttcttgggtcgggtggcagtcatattccaaactcgtttggctgaagcagagccagcagctttttgttccaacttctgcttcttctgggaggcaccccgggaccgagatccaagctccatcatttctagagagaagaacagaagctccaggagcacccatagaagttgcaccagggtttcttgggcacaaaacacaccaaaaagaagacagagtctccagctttcttgggaatcactcagcacccattaaccactgtccatcagctgatcccaggtctcagtttgttcatctgttcaaaagttaaaccggaatttcctgagggctgagctcgagactaggttactctccagtaacctagagaccaatgaccaagaacaagattccagctatcaaggaactgaccatctgtttgtgtataagggggaatgacaggtgtaaaacagaaagcaatctatccttgcaaatgcagacagagagatgcaggctccataaatgatcaaaacagggtaacatagtggaaggaaagggctcctcctagaaaagtaggagacagcaattgaggtggggacctgaaggaaaaaaaggacccagccctgggaaattgagggaaagagcattccaggcagaggaaacagcaaatgcaaggtctttgggggaagaagcaggcttggagcatcgtaagaacaaacataaatgcaatgtgatctggatccctttgtgtgctatagaaatggtattttctgtctatatcatagcatgaaacgttttgaggaggctgatacaatcttatagatcatggaatttggattttcctccaaatggcaggaaaatgaattggaggattgggagagagaattgatctctggtctcataatttgagccctctgagtattttgcaacagagactgtggtggcttggataagggggagacagaggtactacacatgttgttcccatcctcctccctcccagggaaaaatgctcacatcatctatcccttttcccctagctcccttacatcaacccacaaatcctcgaagcccggccaacacacagatgtgcaaacacttccgtgcacacatgcaccttttccaacacacacatgcacaggtatagacacgtatctacacagttggctgtagcctaggggtattttaggggatcctcacctgctatcaccaggtgctcttggttttccccttggcgtccatgattcagttcttctgccagggacatttccatctccgccttggtgttgggagggcctcctgccatcacaaccagctgttctcttgtaagctatggctaaggatgcacagggtgccaggaacagaggagtcacactcagaaaatcacctcttccggaaacaggagctcaaggaagatatagtcagatctgggggtggagtgagactccctctctaggctgaggccttggacacagtactttctgtttctattgtatcttgctggctaggtcagtggccttctcctctgctactctgtaagcaacttaggagaagagatacaattccgtgcctttgcctgtgagaactgctctggctcatgaatctccatatttagcccatggggagaagggtggggtccaccctccatcatttctatgaagaaacagggattggcacagggtccgagagccaacagtggccacaacagagttaggtgctagcaatccaggccataccacaccttcagaagggattctctggagagcgtatcctacctcccccatccagagtccccagacacgggaggtagccttttcctgaagtaggtcagcctaggcaggagccataacaaagggagagaagggcaagagaggtgggacctgactgcagccactagaacccccaggggcctcaggccctgcaccttctaagtcccagttctccctcagcttccctactgattagaccactgtgatggtcaggtttatgtgtcacctggccaggttctagtccccagtgactccatcaaaccctagtctaggtgttgctgtggaggcattttgtagctgtggttggcatctacaaccagtggacttgaaataaagtagagacccatcctcgatgatgtgagtgggcctcacacaatcagctgagaggcctgaagagcaaagactgaggtttcccaaagtagaggtaattctaccccaggactgcaatgtcaactcttccttgagttgccagcctgcagggctgccttgcacatttcagacttgtcagccccacaatcgcataagccaatttcttaaaataaatttctatatacttgtgcatatgcagatatatacatacatacatgcatacatacatacatacatacatacatacatacatacatatatacatcctatcagttctgtttctctggaaaaccctgattgctacaactacctgtggtgaacccttcattctaggaaacaaccccagagcccctgggggaataggaggctatttgtaaaaggaatcaggacaggtttatataaggttccttttacaaatagcctcttcttcccccagagcccctgggccaggtgggaggaagaggaggaaggaaggaggaaaagaagaaggaagggaggaaggaaggaaggaaggaaggaaggaaggaaggaaggaaggaaggaagggagagaaagtggaaacgaaggggccaggagtagctgagatagggcggcatggtctgaggctgcctgccccctgcccccacctcacctgtccagcttgggaaccagagctgatataggccctgcctgcattcctgggggccccaaagaagcccttcccagatccagtggagcagctgtgatgaaattcgagctttctggagggccaccttgggagcagagaaactgctgagtgtgctcagctcagtgggattcaggagcctgggaagcccagccagattgagcaaatgaaaatataggtacgaagtacatttaaatttcagataaacaacagtataagtattctctcgtacactaacttttgggacatatttacactaaagaatgattcatggattgatttgacattgaaatttagctgcatatcctgtattccatctgacaatcttatctcactatgacttcaagattttaccttgggcaagtttctcgcttcttttggtgtcagtctcccccatggacaagcctccctacagggtggctggattgtgaggagcactcagaagtcagcaaagctagagcagtgtgggcactggcttgccacagggcctcgggctatggaggccagatttctgtctcgctatcaactggccctggtggggcttcttgggcacaggagcacagggtccaggtgcatgtggaggcactg

SEQ ID NO: 1563570 - DNA, 4001 bp, Homo sapiens
acaaccaacctcgtggacctgcagctctccagctcctgctacaactggcttctgcctctgttggcttttctgctgtctccctacctatcagcccctccagccttctcctctagcctgactcccaaggcccacctcttccacctttctctctcagcaccttctactccttccttcccttgttctcccgccacacacacctggcaaaatctcaaccttggatcaatccaccgtctttctttttttttttttttttttttttttccgctcatactccagggctgctgaatagtacaggagaaaatcacataagcagaaggcttggcattactttcatggtctccagcctcagtttggggaagcagaaagaccacagactttggacacaaacagatctggtttgaatcgtggctccatactagctgtgtgaccttgggcaagttgcttaacttctctgagcttcagtttccttccctacaaaatgggactaatggtatctacttcatgagggttcctgaagctgaaatgaaaatccatgtaaagcacccagtccagtgcctggtacaatgtaggcgcttggcaaatgtaaggctcctttttttcttctgttctccaaacgaaaccctggtttccccaaccaaatatccaaggattgctgccttgcaatcctccctctttttctcgcgagtgctccctctcccattagcctcagcagacagaggagaagggggttggagaggttgaggggcacaagggacagagagaggagatggggacagaggttgaaaggactggacataaggccaagggacgtggggaggaggaggggtttgagggaacccaaagggccgaggtaagcgagcctgttccgaggtggggcttagagggctcgagaacaagaacccgctcccagtaccaggcccgtggcccgggctcccatgctctctcagtcgctcactcaccaggccgaggctgcgagccctccaggtggtaagagaagcgcagggcccggtggtgctgtggactgggaccgcagggcaagacccggtggcctggagcagcgcccaggctggtgtccgagggtccgacaaactggggatccagtgggccgccaagagccgaacctgagcccctgcgcgccagcagtccgggttccgaggctccagggtccgagtcggcacaggccggcggagcggcgcccggcgggttcgtggccgggtgttcgggctccgaaggcccggcgccccccggggctcggtggccatgcatggtccgggcctgggcgcggggcccgagctccccgcttggctccagctcctggggcggaggcgcgggcggaggaggcccggcgcccggcggagcagcggcctcaggatcggggggcgggactgcgggctcagccccactgcagagactcaagcccccagcccgggcccgggccagcagccgtggcagcggtggcagtagcagcagcagcagccgcggccaccgccgctgccgtgccaggcatcgccggccccggccccggccccgcgcggggagtgggctcggcggggccgggggcccgctggggagcgctgtctatgcggctgcggttgggcgagggttggagggctacgctcggcggggactctccggtggacggcgagccacttccgtggccccggggcgagaagtcggtcggatccaagtgcggggtctcttctttctccccgaatgggaatagatctgggctctcctggctggttgggaagcgttcttcctcccgccgcagccgaggccgggggcggaggagaggggaggggagaggaggggagggaagagagaacggcggtggccgggggcgcgcgtgtgcgctgcgcttgggctgcggggctcgccttcagccagtagtcccagacgatgctccagccgcgggggcaggagaacggcctgggccgggctccaccgtcctccccagcttcagcctgggtctcggcggcggcgggcgggaaggagccctgggaaggggggtggggaggcgggagcctcgcagaggcagccgcagccacagcggcactgggacccagttaccggggccccgccccctcgcccgggatttgcgcctgaccacgccccctcgctcggggccgcctcacttctcgctgctaccgctctcaaggccctcctgccccttaaaaaattccccctcagcctgctttccccacaggcaagtctccgggctcaaccccctccccccatatctgcccttccatcccatctcaggtcttcccccctctgcttgccgttcactctcttttccaaaaccctttcttcatgttcctgagtgttcctagggcttggctcatagaggacctgtctctgattctccttcactttgctcagaccagatatcttggtcccttacttagtcactttcttaaataccctcagttccctgatttgtcgcatccgcctggcaacatcccagtcttgaatcggtccaactgtccgccttttccatgcctgcgcccaggcagctaaacattgctggggaaaactattcaacttcacagatttgtgccactataaacccatggttcccagcttctaccaggccctcagttttgacccacaaccctactagtcagctctccctctgttctccacagtgaccatttcaaaccttctcctttcccctcaaaccccaagtgctccatctgccctgtaaccctcagcaaataacctgacctgctgcagagagtaaacagagccaccgtagaggaagctcttgactttttgctacgaagcctaggaatttgtccttgctccttcccaacagcatctaaacatagacctcttccatctaaaaacaaataaacaattaccaagaattctgcctctccaaccacctccttctcttctcttctacaaacttctcaaaagagttgcctacacccaactgtcttcattttcccacctcccacttatctttcaacccactccaatctgcctccactacttgcttgaaactgctctctctcatcagggtctgccatgaaacatctcactaaatcccatagaatcttttctttttttttttttttgagacaagagtctcactctgtcgcccaggctggaatgcagcggcacgatctcggctcactacaatctccgcctcctgggttcaagcgattcttctgcctcagcctcccgagtagctacgcccagctatttttttgtatttttagtagagacggggtttcaccatactggccaggcttgtctcgaacttctaaccttgtaattcgccggcctctgtctcccaaagtgctgggattacaggcgtcagccaccgcgcccagcccccatagaatcttttcagaggttatcctacttggtttcttgatagcatttggcactgttgaccactccctcctccttaaaccacttccatgacactgcactttccttgtttttcttctacttccttagtaattctttttttactttccaggctcctctttgtccaacgctttatgctggtgctcttcagggctttggcctgagcgctcttgtcctctctctacatgtgatttttttttctttctttctttctgagacagagtcttgctctgtcgcctaggctggagtgcagtggcgcgatctaggctcactgcaacttccgcctaccgggttcaagctattcttctgcctcagcctcccaagtagctggcattacaggcatgcaccaccaagcccgaataatttttgtatttttagtagagacggggttttgccatattggccaggcaggtctccaactactgacctcaagtgatccacttgaggaaagagaagcctcggattacaggccgctcttttctttatctcatttgctcccctggcttcaatgatcatatctttgctgatgactcccaaattgatacctcaaaaccagatatttctcctgacccatgcattcaactggttattaggcagctctacctgaatatcccagagac

SEQ ID NO: 1563571 - DNA, 4001 bp, Homo sapiens
ccggtctccaaggctgctgtctccagtttacattctggagctaatcccggtcctgagaaaggcaacggctagaaccggcaaagggtgggggggcgtcccctgcctttgccttagttctccccagcctgagcaccgctttgctgcgcctccccaacccgccgatgggaggccctgggcagaggcgcgcactccagggggaccagtggtcgggtgccccgggcgcggtggctgaaccccagcaaacagaggaagaggactgccccctcccgcggaggcccactcacgctgggcactagtgacaaggggacatcagcctttgttctcctggggcttggcgaggctgcgctgccaaagcgcagcgcgggcggcgccagggcaccagggttgctcacctttgcacgcggcgtgtcgaagggtgcaaactcctgccttcccggagggttggggtggataaggagtttaggattaggaggtgtcgggtggcggggggggggaaggaggtggtgggaaaggaggggggaggggttctgcgtctcgaccaggctctttgtttgcattgggggcggggagagggggctgaaggtgggttcaagcttgggttctgacagcagggcagattcctgagtatgtcaccatgttgcacgcgcgcagcacacatatgcacactcgcgcacacgcacacacatgcactcatacagacaggcggccggctgtcagcagacagcgcggttcccggcgctccaggctgcagcagcttcgtctgcccgcagcgccaccaccgtgcgtccagaggggaagtggaggaggctggaggcactcgagggtcgacaattccgcgaggaaggagggaaagtggtgcaaacctagatccaccccctagcgacctctgcccccccttttctcccggggtcgcagaggtcatgggcagcttaggctccgggaaggaggcaaggagccgccggagggcggcgcgcacgcgagggggcgagggaaacgaaggaaaggaaagcaggcggactcggcgggcgggcttacccttagaagcatctttctcctctttgggcttggtcacctttccactcatagatcccagcttgcttgacaaggttcgctcagaagacggaagtcctcgccgagcgggtcggacttgggagagtgcttagggcggcaagtctcgaccacgagctcccctcggtgtggttcggggcggaatccgcttttccccaccgctgccgccgccgccgctgcctacgagagagtggggaggaaaggaaaggggtgaaggaggagccgccgtcgccgccgccgccgccgcgatcccgagcggccggccgcgggaggagccgctcgccgcgctcaagaagtgaagagacaaagcggcgcggcgcttcctccgcgccccgcgccctcagcttctgcccgcctgcggagagccacgctcgcaacccccggggcggccgagaggagcggccgggactccccggcttcactgccggcctccctgggctccgcgcgggccgctcgctgggagttgcctgggtgggctgcccgcgcactggcaggctgctttcccccgcctctcccaatccgctgcgggccgccaactcgatcaaaataaaaccccgaggaaggctttttaaaaaatcaaaacaaagataaaaatattcacttaaaaataacaagcctccctgaaagggaaatgtttgaacatgtgatgagcaacgtgtgagcctgttacaccgcagagtcgcgcagcttctcgcccgcggggaatggggaggagagggtcgcctcttttctttctttctatttaatccatttccaggttcctattattttgccaaaaagggggccggagttgctcgccggcggaggagtgggagacgatggcccttacctgctctctttctctctctccctacacccacaccccctcggagctcgcccgctccctcgctcgcgctctccttccaaagaactctccggtcctagagagccacgaatcaacaccgcggcgcattctatataaacggcaaggtgtgggcacgcggagggtgggggctggcgaaggcggggcctcacaaagccgcctgcccgctgtagtaaaaggagagctcggcaggggcgcgccgacgtcagccgccggttggcaaaaccccggcgagccccgcgtagtgcgggcgagcgtgtctgctgggcgtaccctggcccctccggggcagggagggcccgcgggtgccactgtagcgggctcccaccgttggccaaggagatggaaggccggcgctccccccaccccggcccctgtaactcctctactcctagcgcctgctttcccaggcccgtgctggtcgccacctacactttggggactcccctgttggcaactgctcgcaccgagcagtggaatctcagtccgggagtcgacgacttttcgcttctggctagctgctcaagttgagacagtccggctctcagtggggagagaagggctctctgggatctgggtgtcagtaggtcagagagtgaaactgaccgcggcggctgccacctcccacccccacccccacacgcaggcccctcctcctagggctggtcgctcttgttggtaaactggaagcaaagagtgcccaccgcccaggatggccaatcccaggcaaacgggtgaggtgggactgggggcgagtgctgaagaggaataagtaggattgaaacgttgcctgaggaatacttgtgacaaaacccagagaaggtccctgaagattagaactagaaggaaaactgctcaagaattgttctacagagggcagatgaggaaggaaagagagagagagagagagagagaaagagagagagagaaagagagaaagaaagaaagaaaggaagagagagagagaaagaaagaaagaaagaaagaaagaaagaaagaaagaaagaaagaaagaaaagagagaaggagggagggagggaaagaagagagaaagaaagaaagaaaaagaaagaaagaaagaaagaaagaaagagaaataaagaaaaagaaagagaaagaaggaaaagaaaaagggagagaaaaggaaggaagggagggagggaagggaagggaagggaagggaagggaagaaaatgaacgaactagggaaggagggtgagatagtagtcaggaaatagcccctggggcgtcctggaaaaccttttctgcgatggccttttttttgtgcatgcgagtccctggtagcctcgcgctctgttgagggactggggtggtgactagcaggacttggtcctcagaacagtccattaatcagaccttaggcttcatcctggccatgaaggcgcggtagcgactcccatgcagaaaattcgttttccctcgtcctactcagctccacccccttcttaattcggttttgttaatggcattaaaccaggcgaagaaatcatatagatggattagtcttactgcatcccaggcggtaactcaattacaagagcctgctgtggctttcaagaccaggagtgtgggctgcccctgctcccagtccaggtctaaaggtcggcaaccctctaaactcaatttgcagcctccatcctcagtctgagaggaactccaggcccatttttcttgtaaataatatctaataatctgaggcttgatgacacgatgtgattatccaagccaatgttagaccattagttcatatcagttgtctgggaaggaaaacatttctcttcaaatgatcgaattcaaaagggttggaggtttagatgggtttagaggaaaggtcgaggggaaggggagtcctaccccaaatctcagcattatgcagtatacccatgtgatgaacctgcacatgcacttcctgaatctaaaataaaagtcaacattttttaaataataacaatttataccccaaaacagtaaacatcaatttagcacctaacctgtgccaagcagcatgctaaatgcttttacatcattatcttattccatcttcacaaca

SEQ ID NO: 1563572 - DNA, 4001 bp, Homo sapiens
ttgcgtttcttcccacacctcaggctagagtatgtactcttgtgcagtggcgctgttcactgtgtaaaattgcacagcagcacacgtctctacacagaagccctgttccagcctcacccaccaaggtggtctgctcagagttctatagcattaatccaaccctgcactgtgttctcatttttaaaaatgaccatctcttgactagccagttttgttgaattgaataaaatcaaattcagtttttcaaaatacccccccaagaacttaggttagcaagaaaatcaggacctacaacatgtgtctttgccctggagctggtctatgatgttgtatctttctactctcatccctccttaccagctccccacccttagggtctgtacagaatcatttcaaactttatataggctgcaatctcagagcagtccaagctcgcagtcacaaaataaaatggtaccaagaactaattggaaatcttgttggtgaatgtctagttaaatacactggaccttctttaatgacatccacgagaaaggggactgaggctacatttttccagaaattgtttccttgaatctgtaattcagtggttctttatcctagctgcacatcagaatcacctggggagctttaataacatgcccatgtttgggccccacctccagagattctggtttaattggcctatgagtggggcttgggccttagtagtttagagttcccaaggtgaagcaagggtggcaaaccaaagtgtctatctgaagaagccaagagaaaaaacataaacgtatgcacaattaactgcaaagaccatgtttttctgagcttagaagaaagagctttagaagaaactaggactttaaagtgccaggccccttcatcaagcctggaattcaaatggattttctcctctcttaagaagaaggtttcaaaaaccttgggcgatgtggcagattgcactgtaccagcaacggccttataatcaacctatcctgctttcaaatcacagttccgctcccacccccaccaccacttaccaccagtgtgaccttgggcaagtcctgtatactccttgaggcttagtttcctcaaccataagatgagatgatagctagggttaagtgtaaatcctggcccagcatcctgggtttcacctgggagcttgttagaaatgcagacttgcaggactgctaactccagatcagcagaatcagaatctattttcacgaggttctgaagcgactgctatgcacattaaagttggagatgcacattgcacaatagctggcacacagtcacatagtcagtactaagtatgggtcaattctcttctcttctgaggccaagcattatttgggcatcagttaaatatatacacatggaaacacaactaaaggttggggaaagaacatcacctacaacatgaccttgtgcaagtcaatttcctatctcttacagatgaccaaactgaatctcgacgtttaattcctaacaaggtcactttaacaattaaacaagataatgtgggtgggagcatccagcatagtgcctaccccatgatagctattccctatgtattaagtactccctggtgggtgcaatggctcacacctgtaatccaagggctttgagaggctgatgcaggagtttgagaccagcctgggcaacatagtgagaccacatctctacaaaaaaaattttaatgtaaaaaatattagccagacatagtgacacacacctgtagtcatggctactcaggaggctgaggtgggaggcttgcttgagcccacgagttcgaggctgcagtgacctatgattgtgccaccctactcaaacctgggtgacaaagcaagactctgtctgtattagtccattttcatgctgctgataaagacataccccagactggaaaggaggtttaatggactcacagttccacttggttggggaggcctcacatcacggtggaaggcaaggaggagcaaatcacatgttacatggcatcagggaagagaaagaatgagaaccaagcaaaagggcttttcccctataaaaccatcagatcttctgagacttattcactaccacaagaacagtatgggggcactacccccatgattcaattatctcccaccgggtctctcccacaatatgtgggaattatgggaactataattcaagatgagatttgggtgggaacacagccaaaccgtatcactgtctctaaatctatctatctatctatctatctatctatctatctatctatctatctatcatctatctatctatcctccctaagtagtaactgaagctgaattcaagttaacgtgaaggtgtcttccactcccaccacgcacaaaaaattttcaaccacttataactgctggtccagagaaggcctcacacgaacttcactttagttttctaaccaaagtaggagagatgactcagtggagaaaaagatggctgtactgcttatggattatcaaattgactaatagtatttctttcaaaatgctgtctgaaatttcatgaaaatgttcaatatgtgactggcttcattgaaaaatgtttggtctcactcactttgctttaaatgtaaagtgcctctggccacagtgtcccaggaactgaattatctaggcagcctttaaagattatttacatatcgattccaggcattgtttttgcactaaattttgcctcttcctccatgcatacttatggaggtcactgccaacatttcaggcaaagtttctagaaaactcactgccctatgcatgttgttccagccagcggggcccagtgtgtgtgtgtgtgcgtgtgtgtgtgtgtttgcatgcacgtgtgtgtgaggctggacatatgtctttgacattagtaacaattagtagagaaactccagttaggctcacagagtgatgtcatagttactcatataaactttcttgcccgaaatcttctcagcctttgatcttaacacctttctcaggcaatattataggctaaattgctagagaaagcctattttcttctctcaatcttttcaatttttggagtattaaagctcagaggactgaggtttcctcaccaatatactatagagtgcattctcaggcattacactcctgtcttcctagaaaatgtgctcatcaacaccacacctcttcacatggcatgctggaagagccctgcactatgcatcatcactatccccttcacacttttatttggtgtttggaaacctaatctctgatccaaatttcatgggtcaagcgagaaatttggtcctgatggttgcccgaaatttccagggatgtgtccagagctccctgcctcacgaagaccccaccccaggctcagttgaccgctaggaattccttggttctagtgctagcggcaaaaaaaattatagtgcaaatgttgctggaaaattatatgattggaagaatgatcaatgccatcatgtgcacctccatctttccataaccaccccccaaaagtatctaagtagcaaactcattttaccttattagtcaggaaatacttttattttcaagcaggtagggtgctcttcttttccttcctgccaacgttctgtgatcatatatgcttctgtcacctattgatgcttttctccatgcccaggaacaatggtgaaaattcactcaagtacattaacaacccatcttgactgaccttttggcaaaaaccatgaagcagataccaataggtgggctgatctacagaaccatttctgaaatatgaagtatgtgtatgacattttggctttgtgctacctggctttccatatgatgtggctgtgccactgatgagagtagtagcaaaagcagggaggaagtacaggaagggatgtaggagaagctcttccaattgatcaagacatgagtccttggatcctcttgtttcatttaaagaatgcactggtaaaatcctctccctagttagtcacaagctgcactcaagctcatcaaaag

SEQ ID NO: 1563573 - DNA, 4001 bp, Homo sapiens
caattatgaataaccatagatcaatcaagtgtctcatttaccaataacagccatgttatccaaaattttcttttactgaatatagactcctgcgctgaaataatatttatgtgattattcgagccacataagcatgctttgcaaccacttaagcctttttgaaacaagcctaatttacagttaatgcattaaaaactttgtgcaaacagaaaacgttatgtctgcttttccatcccagggtgtagcacacataaatggagaaataacagatcggtgactcttattttttttgtaatatttatctagtaaaaggcagaaaagagtgtaaaagattcatttggttaagaatggcaaataaactgcatgctcgcctgaaggtctgccttgacgcaacctgacacctagagctgaatttccagtcgctggaatatcgcgctactcctaccactgaaaatgttcaaaagcaccacagtctgggtatgagcttaaatcccctcttcaacaccgcattttagtagcatgtaaccgattacactaagtctaaccaaatctctcagctctttgcaacaaggttctagaaatcccccctccccccgccccagcaaacatttcgaagctgcaccacaagtcaagtctgtcccaaaaagcttaaaagtcatcaaagaaacgcaatgcctagacagcagaagcccacatcccttggaggtggaagctggaggggaagggtctgaggcagagataaaagcaagagagggattccccaggctctcctggggacgggaggatggtgtctgcccagctctgcgcctgcaatttccacgccatacatatcacagccatgtctgggtcacgcctgcccagagcccaccgggcatgcacatatgtgacatgtccgaagctgagggcaagccacccagggcagagtatgcccccaggctctgcgcctgtcccagggcagttgcaatgcagcaagcgtgttactgttacggaggcaagaaagccagcgccttcccacgcacgcacacaggctaggtggcctcttctgcacaagatgggccaccaacaaactcacctatgctacatacctgctccccaccgcccccacctcactcgtaaagtatggggaaaagaaagcaaaagccctttccgacctggtcttcttctgcgcctcttcttggagccgaagagtttgacccgggaaaagacatttaacttgtttttgtcgcagctggtcttgcctttgctggggctgctgacacacttgcaggcgttggatttctcgcgctcgcgggcttgcctcttctgacggatgagcgagctggcgatagccgccgccatggccacgacgcccaccaccaccgcttcttttgctgcccctctctgggttcgcctcctcctccttctcctccgctgcttgtccgctgtctcgcgacttcgccgctttggtctccttagcctgcgtttgcccgggcttctccgcactcgggcttcagccaaggagggggctcagcatgccgtccgagctcctccggcggcggtccggctcccgcgcgggctgctggctgcctgggtcggagtcgacgccacagccccgggcccgggatcgcgggcgagactggcacgcggatgctgaactgcgcgactgcgtgtggtcggcccctgcgcccggcggacaccgtgcatgtccagctgctccggtccgaatttcgccggaccccctcgccctgttgcccttctgatgggggccagaggagggaggcgggcggagggagtgagcgcgggcgggagagaggccgggagctcgggcggccggacggaggagggacgaggcagcgcgcgggggagcgcgccctcgccctggcccctccgagtcttcgactagtccttgcaacttcttggcgtgataatcgggaaaagttggcccgtgccaggtttccgacagggatcaaacaggtaatggcctcgcatcttcgctgttgctgctgctctgggcgcggcacagtcgcagcacaggaattcagccgccgcaggcaccctccggaacagcgcgacagcctccttgcagccccctcccgcgacggcccctccctcccggggctgagcccgtaggctcggagccgcaggccgcccctcccacccccacccccacccccacccccccaagtccccggccgcccgttccggctaacacctgtaggggcttccgcactgccccagtcgtccaaatccttctcccctccttttcccgaaaggagcttcgggaggaaacagtgatggaggaggaactgagatgaggtagttgggctgacggagcgggggtttgctcggcattgggggatggagtggtgggggtgtttcctcagtgtttgagctgaccagattgtgctcgggctggagcccctcagaagttcgccagatccctgcctcaggcttggacgcaccaacaacccggagaaccctcacccacccgcgcagaggtattttgcttggcgacacttgtagccattcaggggaggaggccagagtccccagacgggttcagccccagcggtagcagcagaagcagacactgcagagctgcgcccgcacaccacgctgccacccagtggtttttgctgacttttcatttcaagccaatttgtagggtccaaaacctgtttttcctctgcgccccctcatctgtccgctcagatttgggattcaagcagagagcttgggtcgtgtaccgtaagcattacgtatttgggaaatgcagagtcgaacctctctatttaagctgtggcccatctctaatctcctaacttatttttttctgctcctccaaagtcaggcagcctccttccctccaattcaggaaccagtctggctttttgctggcctcagtctattaacaagttctgtcctctccctgtgttatattttattctggaggaaaagaaagaagaggttttgaggccagaaatgcagcaaagagaaatggcctgtctacatccctaccttcaaacagacacaattatttgactattttacttgatttctgaggccaactaggaagcaaaatagagcagctctactacctggcagccctacaccgtctttactggactcctacatggcacccccatcacctcttttcagaactaatgtagatgcaaaaccagatgctcagcttatcttcagactctagcccttttttccttgcctgactacccaacaaacaagctcggactcagcaacactgaaatgctttcaggcttcttagcccataagagctgaatcaccggacccttctgtagattccattgcttcacaggggaagctgttgctacccctccttccacttctctgcaatcttgaaatgtctcttgctccatcagaagcaccactgtgtgtctgcaaggcagactggggtaaaggttgcagtgggttgagactgatagttacaggagaatgatgccaaagggtctgacattttctacctactcttttgtgcttttggctttcccaaatgaaaagggaggacaaggtagacgagagttttaacacctcaagtctattcaagtatccacttctttaaaatttgattcatagggaaaaataaatccctgaggaatgactgattgatattgattctgaagagtaggaggctatttcctagttcaaaatgtttgtgattgttgtttaaattccagataccatgaagggaaatatcttacataaagaggggtcaggagaagctttgatcaagcccaaatatttggggtgggtgatgaacaggtacaaggtctctgcttattctctgcatgtttttaccttctgccaagcaccaaccccaagggccttttgttcctactctcatttctctcttgggatcctgacccagagcaggcatgcaaaagctaaagaaggatgaagttctgattcaggaaggggatagaccttagaagaagagatggtattgagaaaatcataagggctttcccacaccgtttttcctccac

SEQ ID NO: 1563574 - DNA, 4001 bp, Homo sapiens
tttgcattgcattgttctaccatgaactcagagcctatgctatatcagatattttaatatttctttcagaggagcaactgcagcattttcaatcactaccaatctgtcccacagcttgcattcatttctgcaaaggggctcagtttcccacaaacatacatttattaaaaatggacatgtctatttataacatttcatcaatcaacctataagtctattgtaagcataaagttagtttgtgcttgaatctaaccaaacagcttagatggcaatttgacagtctccaattcatagactcacatgtcaataaaataattgtttggtgagaatttcctgtgtcacagatcttactcagcaaataattagtgtgtgtgtttcactcaaatactttacaagcagagtgatgagtgtacttgtttcagccacatatactgtatcctgagtaaagaggcatatagtctgtagctcctgcctttaatgatgattataagctgtccaccacctggaaggtgaaaactctaacgggtttcttagagacatgaattgtggaaataatcagaaaattaaatgttgaactaatctcacaaattctgtaacgattttcatcactaatattgcccttgatgtactaatctttcaaataagctttttttctctctcaattttatggggaaaccaattaaaaacaatcagataaacaatgctcatgcaacatgacagatcaatccaaatctccatttggggatgctctaggagaactccaaatagctgaggatatcctgtgaagtactcagaagagaaagcctattaatcccagttaattacatgaataaacacatgctactcagcagtttcaggacagagagaaggattttgaggaaacagaaaatcaccatgaataattactcatctggacaaaatgttctagcaaaataaaacatttagcaaggttaagagttctctgggattctttcaggttcaacaataaagcaagtgcaaagggtttcaatgaaagtgtttgcttcatgaggttgctttattcagctaatatgaagattggcaaaaccatttttttattagttacatgtaaaaacttcccattaaaaatgtagctggaggagtgatttcactcctccaaaagaatccctgtcctgctcttttcaaagagacttgaaactggtcgctccggcaaccttctctcagcttgtttttctccgtgagctggaagctcttgggcgttggttccatcagctatctgcggcatctgccttgccgccatggaggaacagatactctcctagtttcgctgagacattatagagtgcctatcttctgtgatttccctgaagatacacctaataagtttgtcaaaattaaagtgtgattgtgtccaccttcccttagctaagtgtcatcttctctttctttcctttctttcactaagctaaaagaaaaatacattaaaagccaattataattacttattctcttttttctttagaaattaaaattaatgttttgtgctgtatgcatagaataaatgcaaatctagaagtaggaaatctctcttgaatcagttagtgccaccattttctaaatgtaaatagagttttaaatggtcagaaatacacattcagtttcctataacaattaatattttaaattcctcccagaaaaaaaaaaatgatgcatttttccaaaagaatccattcttaacgtcaaacatcccggagtaaagggaatcaagaacccctgtcccatccagaacgaaaaatatctcagcagaaagatccctggtataattttgttaatttctacaaaggcattaatgtccaggataaacattcaaatctatgtccatcaaaaacattgcagaaataaatcttacctgaatacgacttccttaacaaagccatgcttctttataagctggtcctacccagacaattgctgtctacatttggagcagacacagagagagaggagatcagagaaagtttaaggcatatctaaagtattctccaaggtaatggccagaaacatcaagcccatactctcagtatagagagatcattaatgggcattagtgacagaccattatggctctcccagatcattaatgattcatcatgtagcagtattgttctggcagtaatcagaccattgcttggactcagacataagctttgcctatactatttgcttaaacttattatttccaagcataaaattttattttgccttctagaattatgaaaaacggtctgtaacaggatccctcagcacattagagaagtttttggagctggctgccttatttggtagacttctcccacagtcaggaatctgaaagtctccccgatagtgtttgggatgttgaaatgtgtcttttattttgaaattgaattattgatgaatagaaaacgctacaagcaaaatagacatttgtaagaattatagttgctcaatcctctgtaacaattacacgtaaaatgttgaaattctaccagaacttttagttctgtgccacaaaattatattttcatatcaaagtcccttgttaaaaattcagaaaatctatgagcagcctatgaaaaggcttttagctaattataacaaagagcaagaaacagactattttagcattacaccatactcgttactgaagcactcaatagtgttaatataggaatcaaaattttaagaaaaagcaaaccctgaaacaaaattgccatgctttttatttttgctttatggaagacccactatttttgttaaaaattcaaatagaaatggaaatgtaagttattctgggatcaaatgagtctttccttttgaacagactggattctccttctgtgtggctctgggaaaactgccctcgagtcagagagaaaggaaatctgtctcaagttctgaatattgtcactatcaatgaatattgaagaattaccaacacccacgaggagctatatttattaagccccagtacccatattcagtgctatatggaaaggaagataatgtatatccaaaagcattccataaacttacatattttttcataagcttctctgcataatcaaaattgccttgtgctctctccctccacttttccatccaacactaagcgtgtaacagacaacagctgcaaatgttagcccctcccaaagggatccagcctcaacaaaattgctttagctctgaggatgggatttcagcagtaggcagaggatggagaaaatttgttctgccctgaaatcaaacaccgtcccctataccccaatagccatccacagcccagggacctgaacaacaggagcctttagaacccaaaaaggcaaaatagctgttctttggtagggctacctcctggacacatgacctatgcagcggcaaagggccatgctctgagaagggccctgcactgggtttaatgatttgctgtcaccattttgaaactaacaattttttgaacaaggatctctacattttcgttttgcactaacccctgcaaattctgtagccagtcctgtttcccagaaaaccattattttaactagtcaatcatgcttagaagcacagatgatcagattcagaatgtggccatggggtattccccattgttctctggttgggaagctgagcaagtgctcaggccaccaggtaaaaagctgcatatattcagatccctgtttgcaaaccaaaatggctaatggaagaatttaggcttcagcaaactctttacacaggagaggtgccaacttccttcaaacaaaaatagaaaagcttaatatggaggcagtctctcttggccaatgtgggagctcttaaaaaggcatttctcaagggacaaaattaagtcatcttaatatgagtggtcttatcaggtctaatcaagagactcagtctttcagctgtgccatagcttcttataatggccctgcagggggctgcactggtcagtgtagtggggaagggggtccccagggatgggagca

SEQ ID NO: 1563575 - DNA, 4001 bp, Homo sapiens
ttactgatttatgttgaccttgtaggttactgggctcagcttaggcacaaaatcagaaaaatatttggagctgctgggaggtgtgctcataatttttccactttcgctacccccaccccacatctctccatcatttcatgatctttttttttggttacatatcggcaatgagttactctggtatctttatgccatttcaggaagcctctgaggccagtgtgggagtcctattccttaagaagaggaacaaaaggggactgcaaaatcacaagcaatgaaagggaaaggagccaagttaacactccctctcctcccactccaccttatcacccttttgaggacctgctgcaagtttatacagacacctgcacccctccattacccctcccaacctactgtactctagctatgtttgagtgcatttttccaagataccatagacctcattagggtttctgcctgttcccagcaaggaagaccaaccctgcccctaagttgtttgctaggcttggccttaccccgcactggcccctatgttcccctttttgctgtgcactccagatgcagctctagcaaggcatggagaataggaggatggagaggtttggggggtttggggcagatgttggcaagaaggagggtgggaaaaagaagggaagggtgtcatgtctgagtgtaggcagaacatcttactggcttggggaaaaggtgtctttcttggattatagggtccttgggaggaagcagaggacattggaggatgcggaggggcaaaggtagctgtcacagaaccccccatgatgtcttagtatagaattggaaattgaaaataaaaatggcaaattaccgaggagcgaacacatttgcttagaaacctaatgatctttgtctcagatcaaggcttatattaattgtgtaattagttctatatgtgagacaggcagctgtgttgaacagtttgtatagtggcaggcaaacagacaatcctggatggaggttgaacgtttcctgctttgggcccaagagacaactgtttctgggactgggagtgggcccaggacggtttcctcactgaggcaaggagtccagaggtagtttccggcaaaagctgccccaggacttgtgcccttacacggtggacaccgcgaggttttcctagattcccaattcgtgccaggctgcctggattgtctcctaccctggacagagcgaccccaaggcaggcggaggccacagctgcctggtacccacgggccaaaagcgatttgtgtgccggccgaccgcctcacatgcccacggcccatgcaggatcctgttccaggaaatcagctgccacagccctgctgccttcgaggctcggcccgcgctgcagccacggtcccggcctcctaggcgagagctcccacccctgtctcagctccacctgctttcattcaaggcttagagtccagctcccagaactacccccttgctccctggggagatactgtggagcggcgaaaggagaggccccaccgcaaggcgcccccgcccccacctgaaagtgtccgagggtgcagggccccctgatgtcgagaggcccacgaccgcgccgtcgtgtctcgcctcgactggcccggacgacaccaagcccgggggcggtctgcgggccctacgcctgagcccggagctgtgggctccccagtgcgccgtccgcccgcctcccgttcccccgaccgcgtcctcaccgaagcggctgtggtcgtggcgggtcccgtgcaccgtgccgttggggaagatctccaggtggaagccggtgcggcagtagagctggcggcgccgcaggatcccctttaggtgggcgaagtctgtgggtgagccacgctgcagcttcccctcgatttggcccaggcgctcgttcaggaaacctggggagtcagctaagggcacgttccccagagacgaggagaagccgtgtagatcccagtccaaggaggcgaagacgccccccacctctgccatggctgggccgattgcggcgctggttgtgctgggcgcgcgcgggccgagccggggccacggggcgcgaactgcctctccccgcagcgggcgcgggcggttcggcggcgctccctcgctagctcgcttgctccgcgctctgccgagctgcagtcgacgtctgttcgcgtccaaggaacttctcagtggcggggagcgcggggcagcgtgctcctgaccttgctctcagtcaaagtgcctcttcccctccgcatccatctcccccggcctctcatagctggcttcgtccagctatcagatgcaaacggcactttatatacatacccactccccttacattgacatattggatatttaaatacaagccacacctcattggcatcccctcggagattggtgtgtgggttcttttttttttttttttcttgcatccatttggctctttttgggagaggggggtggagggagagagcgagcgagcttcactccctcttttattatgaaaaaatggcaggaaaaagctacacattgcagtgaggcataactgcttttggcaggttcttctgaaactgctgatgaaataacagagcccagtgcgtggaggccgctggcgcgcacggccactcaaggcctgttccgtgggggtctgtctgtctgctgcccgggggctgtccccacctcccacgcgtcctcgggctgctgtgctagcctttggaaagtgccatgagacgggagttggggggttcacatgctcctgatctcctcttgttccccagttggtcggaggctgcggaaagggcatctgacccgggacagggactccctggtttctttgttccacggcccccaagtcctaattcctacctgtataggttggcggggtaccgaggaagtgaaaaacctggaagccaatgcagttgcaaaatttggggttgggggtggtggtccttgcagattccaaggggagggccttacggggtctgagaggagcgggaaacccctcagaggaaagatgaatttttatttttttaaagaaagagacgttacagcttaggcttaggaaaaggagagggggagtaagaaatagaaagcgatctttttgaaaaatgatctccgctggctttctgggcgcgcttttaagaggctctcgagagcaagctcaatgagaggccattggaagcctggtgggggcttcccccctacctcgtttcttgttggaaacaggtgtttcctcgttctgtccagtgccttgctccgagatattctatcaggaagagcggcagttgggacaggaaccggcggcagccaggtcaacgggcagcgtccagaagtcctggggagcaggtgccagacctgccctgcacccctgcacctgtgccccgaacctgaatcctggggcacctattgggccctggcactcggcgtcccgatcgcctgtgaaagggtgttgttacttggttttcacccgcagccggcgatggctgccttcccaggctccctcaggagaaactgaacacagggagccccgcgccatcccctctctttgcagcgcctcctgctggcgacccctagtctcgtggcaactttgaactcagggtcaccatgagatgagaaaaccgattccgctcaattcacttagtgcaattcagggtcctactcctgggctcccacgtgcaccctgagctcactcccctggaaccgtagcaattctcgtttgggagtattgtggcttggtactgttgtgcctctgcagctcagacagaacctctgaagccaagcacaagatgcggcacataataggcacactcagaaataatctgaggtgctcccagtagcagcggacatagatgcaagtcatcttccaattgtaggggacacagaaatgcagaaagtgtcattcatattgaagtatttatggatgaaatcatacgctgtctgggatttgctattaaattattcaaagtaagaaggcagaaggagtggaggtatagatgcgattattg

SEQ ID NO: 1563576 - DNA, 4001 bp, Homo sapiens
ggcccactgagcagcagctggtgaagggaatcgatggctgtgtaatatggcaagtgacctgatccccctccacaccccaaacctggttttcgacttgaaaggccaaaggctaaagaaattgaatctacataattttgcagacagaaagtcttcaatgtcaagagtatacattgtttttgtccttgaaatgtcctctcagtatatggatagtcactaaaaatggatttggatccaattatcctagcttctattttgcccatactgagcccgtttcagggcaacactgattttctatgaggacttctctgtctcatggactgattcttctctgctttcatgaatctattaacctaatgcaatacaaaatgcaatttcctgaattcaaaaatcatctaaaaggtataaataattggtcccatttagccacagttattagagcctccagacttacatacacaagaacgacataagaatttggtgcaatttaaaacccaaggttgggtatgctataaactttctgtcactatttaaacttttaaactttctgtcactattctgtcacttaattagtaaacaaaatgagagttattctaccaggtaacatgcatttaaggttcatcaggacaactagcacagctgactagtttgcctacacccagagaatgtgtatcttggctgataaccacaatctcaagcatttggtaccatgtttgtgaaacagctcctgagggttggaaaaaaaaaaaaaccagacaacttttgaacacttgggaacagggaagacattacatattaattcattaaggtagggcattccattgcagcatatttaaaaccccaaaaagagaaatttcctaaagtatttccattgtttaaatattgacaggcaatgagttttaaaaaatgatttttcaaaaaaaaaaaaaaacatagataatgacatcccttaatctgaaagctgggagacaggatgaagtgccttctttatatctaaccgtctgactttaccagccccaagaaagggaaccgttacttaggcagagggccacagggccacagccaccctcctggcttcaaataactgggcttttggcccctcagcccctagttcatagatttcttgtcgatggccaaagggcttccttaattgtaaggttacaaaaccagaagaaaatgctcatgtcccaaggagtccaaaatgtgcccctttttctgctaaaaacaattaataacatacttagcatatcaaaaggaacatagctgttacttcgggaagatttaaaacattgtcagcaaaagggaagatgtgctaggtcattatggactttcttagttacaaatgttcctcctttcagctccacattcgatttaccttctccaaacaccttggatgtaaagcactgtcaagatgaagaattgtatcttataaaaaagaaagccaaaaattcctaaccagaaaaacctttcctcccacaatctcttatagtttcatgagatgtcctgaaaaaggtaaaaatatagtggtaacatgtttatatacttctttttaaaataaatcactcaaactgttcattgtacttgaacaatattttgtctttgaaatagcatgaaaggcaaaggcaaaacagagacaagctataatttatttactattcagacaagactaaaatcatttcatcaaaaaccatcttttagcccaatgacggattcactgccctaacaaaactgtgctcaatataagataaagagcatgaagttttacctgagtgtctatgggaagccatggctcagagaccaagttcaggagcagcacctagaccagtcttccctcaaccccagctgataaggctgtggctcatttgtgaacatacatttaaggggaagcggctaacacaaaaataaccgagagcagatgtcccacccctccccagagatcacaaccttaatcccactagaaaattcttaaccattttaggtgatccaagggagaagaataggacccagtaaaaataccaaacgctacatataaatacctgcggggctactcagcatccaaattagctccagagccagagaggccacatagaaagtcatccctgtaccggaataaaatttggactcggctctggcatagcttaacgctgagccaaccttattaatccactttatatgcctcaagagcttgcatttggccctgtaaataatacatttttgtgctgttaatgataaaagtaactctaagagatagacttatgttaccagtgtaactcaaggagattagacagtatgaatatagagattaaggggattatagatgttgtcactctatgtcctccttagtatgttccagagatcagcagattactgtacaggaaaggagagtgatcgtaatctccccacctccttaacggcagacagcacagaacaagatggggagactatgcctatccccatcacacacacaatgaagacattttgtctcacaaactcaacctcttgtttttcagcatcagggacaataaaaggaaaaacatgaatgaaaatgaagacatcaacctaaaatgttgtaatagctcaacaggccatcagatgtctgggggctggctattaggagcatgttctaggaaaagaaagcccccaagtccctccaggaccttcttccacattccttctctggccttacccttagccccctttccctcactcccacctcactggcctcctcactgtcccctgtgcccagagtcatggttgttcctttccctacttcaagtctgctggtattgcactgatttctctccttgctgtctgatctcctgctttgctccatgaaggcagggatttagtactggagctcactgcagtggccccagagcctagaacactgcccagctcccaggaggctctcaataactattccttgaaagaatgaactaaataactgaaaaatccatcaagcctccaaaacatagtcccacctgcaatcctgaaagtggttttggccactcaacttcaaggaaggcagctgaccttctcgctggtacagacacctttatagccactgtcttgtttaagtggttttggccctattcacacatctcccctaccaggttgagggccagggcagtgctttgcttgtcttcatgttcctatagcacacagtaggtgagcagtaaatgctccatgaataaatgaatgaatgagttccccaattcttacgatcttcaaatgtttaaggaaaagttattctaaaagacaactgacatcagtaactcccagttagctagaaaatgacacaataaaagccaggttgttacgagtaaatttattacatgttagaggaaaaaaataagcctgggaaaagaagagaagctacactgtgctctggctccacgcctttctagtctctttctcatccagcctgattaaattatggtgcggagattagccagttgtaacaacaccacacccctaaaataaactgaaacttttcacctagaggaaattctcttactttattagatgattaaccttaatgaaccctgaattttttattttagcaagttatatttttaggaagagcccatgtatgttgaaatgcctctcttgcagcgctgtgaacaataggcttggtgtgccaaatactttcctttaggaagtcaattcctgtttcaagctatgcatcaggaagtgtcttcttttaggcaagtatggtagttctttaggtttctgatcattttgaaaagtgacaacagaatatggatagacagctttatgaaagtatcaaaaaacaaatctgttttgcctaaaatacaagagaaaattcaaagacaagagaatcactttttgaccaccatgaattagtcaactatgaccagccaggatggactgggagcttgggcctgcaacaatagcatttattccagttacttccatttgcatcaaccaggtaactgtgccctcctaaaaacttcatgaagcatgaccactacctgctctga

SEQ ID NO: 1563577 - DNA, 4001 bp, Homo sapiens
aagatcttttaagaaaaaacaattacagtctactcccttttaccccaaatccaaacaactagatagttcaattaacaaaaaaaagttcagtaggcaaaagctggggaaagcagccaaaaagataaggcctcaagttcgagcaagcaggaatatttggttcaactcccataaggttataaaagccaatgttgctggcaccggacgggggagaaaggagaggcatggggaagaagggaactaggaggtggagagtgggaaaacagggttcagtcacaggagattaccttccatgccttcaacaaacttttttaatgctcaaactttagaggtgagggttaatttcttacatgaaaacgtgatttacaaattttcaaatgcgtatcagcaaaatctttaagaacatctagcaagagaatttgatccgacttctgttaattcctgaaatgtctttcatgtcctagagggcaacagattctcaaaaagccaggtaaaagatacgccatttacaccttctgtccagagagaaacttaaagcccacttcctatcaacatgcttctctctgtaaaagattttttaccactttctgcattctactcctcagagaaaaaaacattatgcttaaattttattataaaaatatgctattttttcaattgctatttgggggcacagaatgaataccatactaacattataatacaatagtgtaaataaatgcatttttgtcggtctttgtgactaaaaatctatttccccttaaacatttccagtttaacacttccaggaaaaaaaataattattttgttttagcggtcgattcatttaatatatattaaattacctccaatgcactggtattatacaggaggaattttatcaatttaaatcttacacaatttttcttagtttcactcaaaaatctagacttggctgaaaaaaatattttccttttctgaaaattaaatatgggaatggtagcctagaatttcaaaaaccatatatggttacagaatctatatgatagtcttagactatgtacttatcgtgaggtggtttgcacaaatcatggcctatctgaccaatttcctgttgcataaagattatatttgcccttaaaaatgttaaataagcatttttaaagactgaaggtaaagacttgatcggaaccttatgtaaccaaaaatgggaaaacactatagtctcaccacataaaaggcaaatgcctgcttaatacgtattcttcttaagcaaacatgaacatgagtttgtaaaggcaaagctaccatcccagaagctcttgcttcttcagtgtaaggatcgggagggcccggttcttggagatgagctgaggcaggaaaggctttacaaaattccaggggggcccataatttaaacttgtgctattctgcaaatgttcacatttgcaaggaacaccgtaacgtttacattaaaactgtcttaagatgacggaaaaaattattcctgctgttctataagcttgccatagacttgataacccagagaagaattacaagcaattacaagatgatggctccaattaggaaaactggatctattccaaacccaaatcaaagggggctcggataatcccgaagggataatttaaatgaatacaaggggacttccagcaaatacatacgcttattctactacttctactcttctcaaaaccaagcgaaatgctacaaggatgtatctcctgcccttcaggaaattcaaaatccaaacctggcatcccattaataagccttgtccttttcttttcctaagggatctccctagtatggggtttttattgtaaaaggcaatcaaaacaaacctgagaaactcgcacattcccaaatgcagaaaataatacagcgctcaacacgaacgacacaacagtcgcttagccttgatgattttttaacctttacctagtcctggacgctaagagcagagaggaaaggaagagaaacttcgaaagcagaaacctctgtcccagagcctagaacagacggcaccttgtaaggatttcacgtttttcgaggcgggagaggtcacgccctgcagttttgaaaacccaccttctaaggctcaacccccgtgatagaaccttcctcgtgcttctctagattccacgctggagctgaaataccccctccccacccccattcgccaaacccgcgccatcccccttggacagaagaaccacagcgggccctccccctccctccttattctgcaccccacccccatcctccaaccaccccacaagcatcccagtcaagaaaaccgaggcgggccccctcacgtctactcctcgtcgccacccccgccatcctcgttgagcgaagcaaggcaggtctcccatctcccccctccacgatccccgccatccttgatgggaaaaccaagggagtcgacccaccgcttcatcctcacccgctccccacagcccctgctagctatcctggctgaaagaaccaagaggtgtccccacctcgccccaccccccactgcccgccatccttggtgacaaaaccagggcccccccttcactccctcctcactccccaccatcccccgcacaggaaaacatggagagcccccatttcactcccgatcccccccacctccaccccactgcctcttagtccccatcgagccaaaaacccagggaaggccgaggcacgcaccaggggggacctcgcactcgcagtccctcgtcccgcaccccgcagcccgggacggcccctggcccccggcctcagcgaggccgccgaagccgcagtacccagccctggaaggccaggcagccgggaccgcagggaccagccccgagcggcggcggcggcggggcagaagggcagccgctcccccgggacccaggacgccggcgggcgggaggcacacacgcgcgcacaagcggaaagaaagcgggcttactgcgtggggatgctcgcccgcgcagctgtctcggcggcggcggccgctgcctgcaccgaggccgaggcgcggcggtggcggcggcggctgcggactgagccccctccgccgggcggtggatgtagggcgcgggaggggcgcgaggggaggggtgcgcgcctgggaggcggggagggaaagaggggaggaagcaggagcgcgggggcgggcgcggctagccaggggcggggcggggcgcgcgcggggccgggctctgcccactgcacggaggctgtgtgcggggcgcgcgcgcgggagacggccggacgggcgtggggagaggggcggcttgccacgcaccccgcgcgcccacgtgcccccgccactggagagggccgggcacgcggagagggtggctgcggggacgcggtggcaggctctttcccgaggaccggctcggatccgaagaccgggaggagggcgggccgggggcgcctcgggccccctccctcgcgcagcggtccttagaggcctgcgggagtcacgaatcactgcaggcggctggggctggggaggtgggagcaacaaagacagccaagtgagggtggcgtctcgcctcaccggggtcctcgctaacctgcgcactccctgaaaagcggccccgcttcggggcccacgccgtttcggcctccgacttcggaacccggtggcttgcagcggcgccgaaaggcccaccgacgacccctccccttagtagcaagccggagggagctaaataagccccatccataatcccagtgccaccatccagagcgttttaacgtcactcagaaagcaccgatggcaaagcggcgcgtggcgtctcattcactcagcattcagtttactgagccctcgccatgtgccaagctcagtgccgggctctggtgataacagcgttgtctgcagacagtacgcaccctgccctgggagcttgtaatctagtgggggagacagacaataaagaagtgagaaaataatcaaatttggataaagcctgtgcaggaaaagtacaaatagtgtgattaggaaa

SEQ ID NO: 1563578 - DNA, 4001 bp, Homo sapiens
agaaagtcttcaatgtcaagagtatacattgtttttgtccttgaaatgtcctctcagtatatggatagtcactaaaaatggatttggatccaattatcctagcttctattttgcccatactgagcccgtttcagggcaacactgattttctatgaggacttctctgtctcatggactgattcttctctgctttcatgaatctattaacctaatgcaatacaaaatgcaatttcctgaattcaaaaatcatctaaaaggtataaataattggtcccatttagccacagttattagagcctccagacttacatacacaagaacgacataagaatttggtgcaatttaaaacccaaggttgggtatgctataaactttctgtcactatttaaacttttaaactttctgtcactattctgtcacttaattagtaaacaaaatgagagttattctaccaggtaacatgcatttaaggttcatcaggacaactagcacagctgactagtttgcctacacccagagaatgtgtatcttggctgataaccacaatctcaagcatttggtaccatgtttgtgaaacagctcctgagggttggaaaaaaaaaaaaaccagacaacttttgaacacttgggaacagggaagacattacatattaattcattaaggtagggcattccattgcagcatatttaaaaccccaaaaagagaaatttcctaaagtatttccattgtttaaatattgacaggcaatgagttttaaaaaatgatttttcaaaaaaaaaaaaaaacatagataatgacatcccttaatctgaaagctgggagacaggatgaagtgccttctttatatctaaccgtctgactttaccagccccaagaaagggaaccgttacttaggcagagggccacagggccacagccaccctcctggcttcaaataactgggcttttggcccctcagcccctagttcatagatttcttgtcgatggccaaagggcttccttaattgtaaggttacaaaaccagaagaaaatgctcatgtcccaaggagtccaaaatgtgcccctttttctgctaaaaacaattaataacatacttagcatatcaaaaggaacatagctgttacttcgggaagatttaaaacattgtcagcaaaagggaagatgtgctaggtcattatggactttcttagttacaaatgttcctcctttcagctccacattcgatttaccttctccaaacaccttggatgtaaagcactgtcaagatgaagaattgtatcttataaaaaagaaagccaaaaattcctaaccagaaaaacctttcctcccacaatctcttatagtttcatgagatgtcctgaaaaaggtaaaaatatagtggtaacatgtttatatacttctttttaaaataaatcactcaaactgttcattgtacttgaacaatattttgtctttgaaatagcatgaaaggcaaaggcaaaacagagacaagctataatttatttactattcagacaagactaaaatcatttcatcaaaaaccatcttttagcccaatgacggattcactgccctaacaaaactgtgctcaatataagataaagagcatgaagttttacctgagtgtctatgggaagccatggctcagagaccaagttcaggagcagcacctagaccagtcttccctcaaccccagctgataaggctgtggctcatttgtgaacatacatttaaggggaagcggctaacacaaaaataaccgagagcagatgtcccacccctccccagagatcacaaccttaatcccactagaaaattcttaaccattttaggtgatccaagggagaagaataggacccagtaaaaataccaaacgctacatataaatacctgcggggctactcagcatccaaattagctccagagccagagaggccacatagaaagtcatccctgtaccggaataaaatttggactcggctctggcatagcttaacgctgagccaaccttattaatccactttatatgcctcaagagcttgcatttggccctgtaaataatacatttttgtgctgttaatgataaaagtaactctaagagatagacttatgttaccagtgtaactcaaggagattagacagtatgaatatagagattaaggggattatagatgttgtcactctatgtcctccttagtatgttccagagatcagcagattactgtacaggaaaggagagtgatcgtaatctccccacctccttaacggcagacagcacagaacaagatggggagactatgcctatccccatcacacacacaatgaagacattttgtctcacaaactcaacctcttgtttttcagcatcagggacaataaaaggaaaaacatgaatgaaaatgaagacatcaacctaaaatgttgtaatagctcaacaggccatcagatgtctgggggctggctattaggagcatgttctaggaaaagaaagcccccaagtccctccaggaccttcttccacattccttctctggccttacccttagccccctttccctcactcccacctcactggcctcctcactgtcccctgtgcccagagtcatggttgttcctttccctacttcaagtctgctggtattgcactgatttctctccttgctgtctgatctcctgctttgctccatgaaggcagggatttagtactggagctcactgcagtggccccagagcctagaacactgcccagctcccaggaggctctcaataactattccttgaaagaatgaactaaataactgaaaaatccatcaagcctccaaaacatagtcccacctgcaatcctgaaagtggttttggccactcaacttcaaggaaggcagctgaccttctcgctggtacagacacctttatagccactgtcttgtttaagtggttttggccctattcacacatctcccctaccaggttgagggccagggcagtgctttgcttgtcttcatgttcctatagcacacagtaggtgagcagtaaatgctccatgaataaatgaatgaatgagttccccaattcttacgatcttcaaatgtttaaggaaaagttattctaaaagacaactgacatcagtaactcccagttagctagaaaatgacacaataaaagccaggttgttacgagtaaatttattacatgttagaggaaaaaaataagcctgggaaaagaagagaagctacactgtgctctggctccacgcctttctagtctctttctcatccagcctgattaaattatggtgcggagattagccagttgtaacaacaccacacccctaaaataaactgaaacttttcacctagaggaaattctcttactttattagatgattaaccttaatgaaccctgaattttttattttagcaagttatatttttaggaagagcccatgtatgttgaaatgcctctcttgcagcgctgtgaacaataggcttggtgtgccaaatactttcctttaggaagtcaattcctgtttcaagctatgcatcaggaagtgtcttcttttaggcaagtatggtagttctttaggtttctgatcattttgaaaagtgacaacagaatatggatagacagctttatgaaagtatcaaaaaacaaatctgttttgcctaaaatacaagagaaaattcaaagacaagagaatcactttttgaccaccatgaattagtcaactatgaccagccaggatggactgggagcttgggcctgcaacaatagcatttattccagttacttccatttgcatcaaccaggtaactgtgccctcctaaaaacttcatgaagcatgaccactacctgctctgacatctggccctactgcagatgtcctcaagccacagaattagaccttccacaaaaccaagacagaaacagccccttgcatgatgagaaacaatttcttaggaagaatagttggtaactttgtcctgtcttggatcagtggctc

SEQ ID NO: 1563579 - DNA, 4001 bp, Homo sapiens
caaaaatgggaaaacactatagtctcaccacataaaaggcaaatgcctgcttaatacgtattcttcttaagcaaacatgaacatgagtttgtaaaggcaaagctaccatcccagaagctcttgcttcttcagtgtaaggatcgggagggcccggttcttggagatgagctgaggcaggaaaggctttacaaaattccaggggggcccataatttaaacttgtgctattctgcaaatgttcacatttgcaaggaacaccgtaacgtttacattaaaactgtcttaagatgacggaaaaaattattcctgctgttctataagcttgccatagacttgataacccagagaagaattacaagcaattacaagatgatggctccaattaggaaaactggatctattccaaacccaaatcaaagggggctcggataatcccgaagggataatttaaatgaatacaaggggacttccagcaaatacatacgcttattctactacttctactcttctcaaaaccaagcgaaatgctacaaggatgtatctcctgcccttcaggaaattcaaaatccaaacctggcatcccattaataagccttgtccttttcttttcctaagggatctccctagtatggggtttttattgtaaaaggcaatcaaaacaaacctgagaaactcgcacattcccaaatgcagaaaataatacagcgctcaacacgaacgacacaacagtcgcttagccttgatgattttttaacctttacctagtcctggacgctaagagcagagaggaaaggaagagaaacttcgaaagcagaaacctctgtcccagagcctagaacagacggcaccttgtaaggatttcacgtttttcgaggcgggagaggtcacgccctgcagttttgaaaacccaccttctaaggctcaacccccgtgatagaaccttcctcgtgcttctctagattccacgctggagctgaaataccccctccccacccccattcgccaaacccgcgccatcccccttggacagaagaaccacagcgggccctccccctccctccttattctgcaccccacccccatcctccaaccaccccacaagcatcccagtcaagaaaaccgaggcgggccccctcacgtctactcctcgtcgccacccccgccatcctcgttgagcgaagcaaggcaggtctcccatctcccccctccacgatccccgccatccttgatgggaaaaccaagggagtcgacccaccgcttcatcctcacccgctccccacagcccctgctagctatcctggctgaaagaaccaagaggtgtccccacctcgccccaccccccactgcccgccatccttggtgacaaaaccagggcccccccttcactccctcctcactccccaccatcccccgcacaggaaaacatggagagcccccatttcactcccgatcccccccacctccaccccactgcctcttagtccccatcgagccaaaaacccagggaaggccgaggcacgcaccaggggggacctcgcactcgcagtccctcgtcccgcaccccgcagcccgggacggcccctggcccccggcctcagcgaggccgccgaagccgcagtacccagccctggaaggccaggcagccgggaccgcagggaccagccccgagcggcggcggcggcggggcagaagggcagccgctcccccgggacccaggacgccggcgggcgggaggcacacacgcgcgcacaagcggaaagaaagcgggcttactgcgtggggatgctcgcccgcgcagctgtctcggcggcggcggccgctgcctgcaccgaggccgaggcgcggcggtggcggcggcggctgcggactgagccccctccgccgggcggtggatgtagggcgcgggaggggcgcgaggggaggggtgcgcgcctgggaggcggggagggaaagaggggaggaagcaggagcgcgggggcgggcgcggctagccaggggcggggcggggcgcgcgcggggccgggctctgcccactgcacggaggctgtgtgcggggcgcgcgcgcgggagacggccggacgggcgtggggagaggggcggcttgccacgcaccccgcgcgcccacgtgcccccgccactggagagggccgggcacgcggagagggtggctgcggggacgcggtggcaggctctttcccgaggaccggctcggatccgaagaccgggaggagggcgggccgggggcgcctcgggccccctccctcgcgcagcggtccttagaggcctgcgggagtcacgaatcactgcaggcggctggggctggggaggtgggagcaacaaagacagccaagtgagggtggcgtctcgcctcaccggggtcctcgctaacctgcgcactccctgaaaagcggccccgcttcggggcccacgccgtttcggcctccgacttcggaacccggtggcttgcagcggcgccgaaaggcccaccgacgacccctccccttagtagcaagccggagggagctaaataagccccatccataatcccagtgccaccatccagagcgttttaacgtcactcagaaagcaccgatggcaaagcggcgcgtggcgtctcattcactcagcattcagtttactgagccctcgccatgtgccaagctcagtgccgggctctggtgataacagcgttgtctgcagacagtacgcaccctgccctgggagcttgtaatctagtgggggagacagacaataaagaagtgagaaaataatcaaatttggataaagcctgtgcaggaaaagtacaaatagtgtgattaggaaaggaggaggtgacatttaagctgaaccctgaaagatatgaaagagccaggaaaaagctttccagaaaacaagtcagaaggagggaccaaatcttgatgctttggaactaaaaggtggtgatcatgattggcgccaggaaagctggggagagtaccagaaagtaaggctggacaggttggcagggaccagatcgtggattgcatactagtccatgggcaggtgcagtccatgggcaggccacttcattccaaaatcaatgggagggcattgaatgagtggcttaaccccaaggcgtgacacggtctgacttatatttcttttaactaaacttttgtcttttgggatgattgtagattcacatgcatttgtaagaaataatacagagagatctggggtcccccttgcccaatttcccccaatgcaagactacactataagataactagaatattgacattaatacaatctaccaatcttattttgatttcttcagttttacttctactgtgtgtgtgtgtacgcgcgtgcacgtctggtatgtgtgtgttctatacaattttatcacgtgtggcctctttccactaccatggtcaattataaaacagtttcatcattgcaaggatcttacctgttgtattgtaattataaaacagcaataactatctcctcagttccccaagtctttcaccattggcaaccactgatccgtcctccatttctgtaagtttgatattttgagaatgttttgtaaatgaatcatacaatattcattttgagattggcttttctcactcggttttgagtcccttgagattcatccaagttgttgggtgtttccatagcttgctcttttttattgctgagtagtattccagatctggtttacatttttaaaagaccaccttgactactatatggagaatggttcagaagagattaaaaatttaaatagggagattagttaggaggctttctcaatagttcctatcaaagctgatggtggtttagattagggtggtgctagtggaggaaagtggaaggatttgatggaacagggttgcagagggaattggagttgaagtagagacagcatagggtagacaactgttttgagactttccaatgtaaatgggaagaaaaatggagcagaactggaggagcgagtagggacaagcaaag

SEQ ID NO: 1563580 - DNA, 4001 bp, Homo sapiens
aaagatttgtattttttgaagataggtttctatcattttttttaagtttgaaaacaaccattataggtaaaggctatgaatgagagctatggcaggatttagacccagaaatgaagattccatctccagcagcagagggaagctgctgaaagcttgtatcaccgagcttgcttcaagcccgagggccttggaaggacttccgactaccaccataattgatgaaatggataaaattcaggtttagcatttctaaaagtttgtcctatgctttttactctttaaggtttaatacatttaggtatttgaagatatatattttaaaacctggggagaattctgtagcaagtagacataacaaaggcaattcttgtcacctgctgagcatgtaccctaactgaaatctaagtacctacactgaccatgtggctgcatgcaggggtgggcagggtgaaggtgaaggcaaaaacgcagcaaccttttgagggatgaaatggcaaagcctgacaggtatggtgctggcaaaggttacattccctcttgtgagcgcacagagaccggggcaccaaaaaggagggaccattactgtatcgtgcctggatgagccttctcttagattccttcattattttcaaaggtcaatgtccctctctcaaagagaaaattgaggaaccctgagtcatcacagagtataaacaagccactgtggctaaatgaagaggacagagaacgcttatccagtataagcattcttacactggcttcccacaggttgttctgaacttgagggcaaatcagaagaaaatctcctggaccctattaatgtcaccgagcagaagcactctttggccttctatcaccagattttgcaatgccagtcctgcaccttggctccttccacccagggagaaagattcctaatagctgatcaggtcagcctaaccttctcgtggctggcagcaggagtctcctctgtcccatcccagcatttgctccatgcagctttcctgctccctactgttcgtgcaacgacatgagcagatctttactttaaagcagacattcaaatagttctgttgtgcctggcaaattcccttttcatatgcccaagttgaaagcaaatgagattttcccttgaaaagacattgcccccgagagctaatatttagggtaagcagtgacattggttgagtcaattaaaatgaaccttctgaaacctcctggtacaaataaagccctttgtacaatgccgcccctaataccacaacttagaaggttggagatcagtgtaagaatttgtggcaattagtaaaacttacctcacgctggatgtgtggcagataggatgtattcggcaaaggctggatatggttgaaaacaacttccaaggtgcctaagttagggaaaaaaatgagaatcaagaggcaaagttacctttttagaagcaaagttctgaattctaaaaaaataaagtcaacttcctatgaaatggctcatggtaacacattctactttgtatttacaacccttagagttaaaggaaaactgccaagatgttctgcatacttctccaaatgtctgtttatcatataacatgagcactggcagtggatctggctccctcattatcaagccgtattagctcaaacactcagcattgttaggggagtgagctcatggcctatttcagttttaaattaacatttggcaatcacccgggtaatcaaaacaaatgactcagtcgtttagaatagatttattagttgagcctttttttttctctctctctcttttaacatctttagaatattttgccacaggagggctctgatccagccagaatgtagagcacaagtcactagaggaatatttagaggggttgccatggagacgaggtgccctgtgaccgctgaagttatctccaatcaacagcaggattaggatgcagactagcgggcaggctcatcccaggacgagggttctgcagcactaggaaacaggtgtgccttgtgccgttcccaaccctgacacaaatatggcccgctacgacatgctgccctcctcaagcccgtgcgacctccccacaggcccattcgcatcactgccttcctcccccaatccctcgacctttattcagaaaggactggctggggcaaaggagaaagggagtgtgatcactgtattatcctaaaagtgtgaaatcctagaattcacaccaaatgccgcttttagatcaactatgaaaatgtacatgagcgaatgaaatctgaggaaaagacagtgccttgggcgggggacccagtctgttttttcactactctgccccaacacccaggtcagtgcctgtaacacaggaagctctcaagaagtatagatggaaacagggcaaaaataaaccaaggattacaaccaggtgtgtaaccacccctcccaccctatgctcaaaccatttccaggctgatcgtcacacaggcagtggatataaatggaaaaactgttaatgtgctggtaaataaacagctgagactgttggttcactaggctaatgagttcatctctttagagatcctgacgacgattgtcaggatcgttgtcaggaagaaaaggctgaagataatgcttcccaactcaaaatggatgaatctgctgactatagggacagggttcttgtttgccaggccaaaagcctggaggaagacaaattttgtgcccatggtgaagcgctaacatttgaaagcaaatgttttaaagtgacttaattcaaaggaacatcttccagtcttcctcccacctgtacttaagtagagacagtatcttcatattctatcatatgaatctggattgtttcatgttaggttttctttgtccggtaaaatgttaagtatcttggtgtcaggaagaaatatttcttatttcatttctatctcctagtatttagcatggtatgtttacaccaaaggctttactccatctcatctcccaccaccacactccactcatatagaactcactgcttctagaagattccacaccctttcgtgcagctacaggaggaatgcagcagggcacagctcttcacagcaggggcaccagagtcagactgcctgagctcaaataccggctccgcctcatattagctgtccagcctctatgagcatcataatggccacctacctcatagaggtaaggacgtacgtccatgtaaagcatttagcagggcctcccccacacaaggtacccattgaatgttaaatacatacttactactattattacagcaggcaaaaagtcaaactgttatcaaacgtggataatgatttcacatgccaccacaaacgcctgataccaaatatacctctctttcgattcaatccaactgaagcgtcaaacctgaatctgtcacacactagtcttatcatatttcatctaattcacccttctggaattgatgtttcctagagatgggtacaattcataccgattctacttgacggaatccggttctctttttcaagaaccggaatcacttccttcctaagattcccaccttgccaatagcttccctgccatctctctgtctgttcctcacctctgcacattccagcttggaagggctacaggtggggaaaggacagggaaagtgtcttctagtaaccagactgggactctggctattctttccagaaaacattttcatattctatcatatgaatctggactggttcatgttaggttttgttagtcctgtaagatgttaaatatcttggtggcaggggcaaagaaatgtcttattttggctgggtgtggtggctggcacctgtaatcccagcactttgggaggctgcggtgggtggatcacgaggtcatgagatcaagaccatcctggccaacatgatgaaaccccgtctctaccaaaaaaatacaaaaattagccggcgtggtggcgtgtgtctgtagtcccaggtactcaggaggctgaggcaggagaattgcttgaacctgga

SEQ ID NO: 1563581 - DNA, 4001 bp, Homo sapiens
tgatgaagctgattgaatttgcagattgctatggaattactaagggcaaacaatgcatatgcatagtcaggtctcacctagctggcatttccagctgatgagaggatgtctttgtatctccttaaagaatctttatatctttctctctcccttctttatatctccttaaagaatctagcctcttctgtgggaaaataaaaataagagctgggaaagggcacagagctaaaatctctgctctttcaatagggttcacccttagaggagggtgacagagagtcacagcctcctacttgagccaaagcagttcagctttggttttctctattggggttagatctaaagatttgtattttttgaagataggtttctatcattttttttaagtttgaaaacaaccattataggtaaaggctatgaatgagagctatggcaggatttagacccagaaatgaagattccatctccagcagcagagggaagctgctgaaagcttgtatcaccgagcttgcttcaagcccgagggccttggaaggacttccgactaccaccataattgatgaaatggataaaattcaggtttagcatttctaaaagtttgtcctatgctttttactctttaaggtttaatacatttaggtatttgaagatatatattttaaaacctggggagaattctgtagcaagtagacataacaaaggcaattcttgtcacctgctgagcatgtaccctaactgaaatctaagtacctacactgaccatgtggctgcatgcaggggtgggcagggtgaaggtgaaggcaaaaacgcagcaaccttttgagggatgaaatggcaaagcctgacaggtatggtgctggcaaaggttacattccctcttgtgagcgcacagagaccggggcaccaaaaaggagggaccattactgtatcgtgcctggatgagccttctcttagattccttcattattttcaaaggtcaatgtccctctctcaaagagaaaattgaggaaccctgagtcatcacagagtataaacaagccactgtggctaaatgaagaggacagagaacgcttatccagtataagcattcttacactggcttcccacaggttgttctgaacttgagggcaaatcagaagaaaatctcctggaccctattaatgtcaccgagcagaagcactctttggccttctatcaccagattttgcaatgccagtcctgcaccttggctccttccacccagggagaaagattcctaatagctgatcaggtcagcctaaccttctcgtggctggcagcaggagtctcctctgtcccatcccagcatttgctccatgcagctttcctgctccctactgttcgtgcaacgacatgagcagatctttactttaaagcagacattcaaatagttctgttgtgcctggcaaattcccttttcatatgcccaagttgaaagcaaatgagattttcccttgaaaagacattgcccccgagagctaatatttagggtaagcagtgacattggttgagtcaattaaaatgaaccttctgaaacctcctggtacaaataaagccctttgtacaatgccgcccctaataccacaacttagaaggttggagatcagtgtaagaatttgtggcaattagtaaaacttacctcacgctggatgtgtggcagataggatgtattcggcaaaggctggatatggttgaaaacaacttccaaggtgcctaagttagggaaaaaaatgagaatcaagaggcaaagttacctttttagaagcaaagttctgaattctaaaaaaataaagtcaacttcctatgaaatggctcatggtaacacattctactttgtatttacaacccttagagttaaaggaaaactgccaagatgttctgcatacttctccaaatgtctgtttatcatataacatgagcactggcagtggatctggctccctcattatcaagccgtattagctcaaacactcagcattgttaggggagtgagctcatggcctatttcagttttaaattaacatttggcaatcacccgggtaatcaaaacaaatgactcagtcgtttagaatagatttattagttgagcctttttttttctctctctctcttttaacatctttagaatattttgccacaggagggctctgatccagccagaatgtagagcacaagtcactagaggaatatttagaggggttgccatggagacgaggtgccctgtgaccgctgaagttatctccaatcaacagcaggattaggatgcagactagcgggcaggctcatcccaggacgagggttctgcagcactaggaaacaggtgtgccttgtgccgttcccaaccctgacacaaatatggcccgctacgacatgctgccctcctcaagcccgtgcgacctccccacaggcccattcgcatcactgccttcctcccccaatccctcgacctttattcagaaaggactggctggggcaaaggagaaagggagtgtgatcactgtattatcctaaaagtgtgaaatcctagaattcacaccaaatgccgcttttagatcaactatgaaaatgtacatgagcgaatgaaatctgaggaaaagacagtgccttgggcgggggacccagtctgttttttcactactctgccccaacacccaggtcagtgcctgtaacacaggaagctctcaagaagtatagatggaaacagggcaaaaataaaccaaggattacaaccaggtgtgtaaccacccctcccaccctatgctcaaaccatttccaggctgatcgtcacacaggcagtggatataaatggaaaaactgttaatgtgctggtaaataaacagctgagactgttggttcactaggctaatgagttcatctctttagagatcctgacgacgattgtcaggatcgttgtcaggaagaaaaggctgaagataatgcttcccaactcaaaatggatgaatctgctgactatagggacagggttcttgtttgccaggccaaaagcctggaggaagacaaattttgtgcccatggtgaagcgctaacatttgaaagcaaatgttttaaagtgacttaattcaaaggaacatcttccagtcttcctcccacctgtacttaagtagagacagtatcttcatattctatcatatgaatctggattgtttcatgttaggttttctttgtccggtaaaatgttaagtatcttggtgtcaggaagaaatatttcttatttcatttctatctcctagtatttagcatggtatgtttacaccaaaggctttactccatctcatctcccaccaccacactccactcatatagaactcactgcttctagaagattccacaccctttcgtgcagctacaggaggaatgcagcagggcacagctcttcacagcaggggcaccagagtcagactgcctgagctcaaataccggctccgcctcatattagctgtccagcctctatgagcatcataatggccacctacctcatagaggtaaggacgtacgtccatgtaaagcatttagcagggcctcccccacacaaggtacccattgaatgttaaatacatacttactactattattacagcaggcaaaaagtcaaactgttatcaaacgtggataatgatttcacatgccaccacaaacgcctgataccaaatatacctctctttcgattcaatccaactgaagcgtcaaacctgaatctgtcacacactagtcttatcatatttcatctaattcacccttctggaattgatgtttcctagagatgggtacaattcataccgattctacttgacggaatccggttctctttttcaagaaccggaatcacttccttcctaagattcccaccttgccaatagcttccctgccatctctctgtctgttcctcacctctgcacattccagcttggaagggctacaggtggggaaaggacagggaaagtgtcttctagtaaccagactgg

SEQ ID NO: 1563582 - DNA, 4001 bp, Homo sapiens
taaagaatatgacttatgtccaacaattcagtctcctttattataccatcagataaagtgatgttttacaaggaaaatggaaatattttaaaactcgaggagcccagcacatctaaaggatttctgtttcatgaacttacgaaaaagctggacagtcggaaaagtcttacttgcttcaaacaagtcagaccgttttctcctgttacctatgcttacagtcagattcccatttacctacaatctggccttgagatccaatatcaaggctggtggcagtaaaatggagccaaacactgtgatttctcccatgtaaatttggaatttgagaagttagaaaagtgctggctgccagacaaggtgacttcccactcacctccagctcagtgttcaacatttttaaatatcagcccccaccctcgccaggccaccaacaccagccaggagcctttgaagacactttccccctatgcaatttgaatgtataacgtattttaaactacataccatatgtactgtatgtacgtctgtgcgtgatgtatcaaaagggtaaaactttttcatccctccacgaaccaattttcccctgctgggggcgatatcacccctgttgaaaatgcacgtcctaaacaacagctacaaaaactcaaactcacatttaattgtcttttcaaggccagaagttcctaaatcaataatgatttagcaccacttcagtcaaaacaattacatccgaatcattttcaaaatagaagcttaaaatatatataatccatgaaatgcataaaattgggctaagtattgttccagcagtcagcaacattctggttaattttttgcattactctctgttcgttaagctctatttgatgcttgctcacagaaccaaagatttgattagtgttgaattttacacctttcaagaagcgaaaaaaccaaacactctctgagaaaacatttttctggatggcagcaattggtaatttgcaaaagcagatagaaaatgttcatagaaagcactgcaattttcaatttaccaaacgaataaactaacctctgctgctcacaaagacctgaaaataaatggcccacaaagttatcagtcataaaaacaaatcaatgtttcattaaaaaaccactgtgccatctgcatatgcaaccgaggagaaacttctccatccaaaaagattccagactgctcatgttctaccataacttcaaaaaacaaccaacccccaccccagcattttcaaatactcatggccagaagtttaataagactaagaaacagaacagtcaccaagaaatgcaggatatatcctgtccagtccactactaggatggttctgcatttttatattgtttcaaaaatagtgagggcaaagaaagtcctctgtatgagccaataaaaagaacttcatcacattaaaaattgagctcacctaccttcactggtccatgttcattactggagccctgcaccagctggacgtacaacatcatgaaaacattcaccactacccactctctgtacattttgaatatttcaatatccactgattactaagcagttgacatcaggcagctagagaaaattgtttcaaaaggcattctccagaaggaaagtttgaaacctcaaaacttcacacagaaaaccaaataatcagttctgatcaaaatccaatgaaattatttcaattaggcaaggtacgctttttttgcacaatcttaggggtggggagagagagatgaaaaaaatcaaaatgttctccaaaaataatcagaaggtggacatgtcttctacctgaaattagaaagcactctaaatttacttcatgtccagaaaattaaaaaaatctctccaatgtatgccgcaggttctagttgctttgtaaggaggtggtgtggccaccaatgcttacagctacagaaagctggaacccaactctggattgaaacttttttgcacaaccttcatggaagcttgcagaagcatgtgtcttaaatctgacacagattttggcagaaaatgcagagaagtcttggctgtaatcctgttgcgtccctaccaatagcagggcagttttaagaactgactcaaatgttcagggctgccgttattttaaagcagataacctgtaacatgaaaccccagcacatagctttgacctttgtatctcagtgggattgcttaagaagggacctcagatgctcatgcatctgctgccaatgacacacagaaagcaatcaaatatgatttttaaaacctgcacatgcacaaaaataataaaaacatccatccatacatgcaaaaaaaggcaaacatacacaaaacgactttttaaacagaagcttagtaacttaggtatctcaaatgaaaaacactgatttttaaagaaacaatgattaggtttatttgcatgtgccaggaaatatcctacatttattgttacaaaaaccatgttatcacgttagtgtggaattctttagaagcaccggctaaataagctttagaaatggaatgccttcaatggctcaatctcagaaatggcaaaattctaggacacatcaagacctgctcttccgctttccactagttcccaatctttgatttccaggttttggccctttcaaacccattttttgcgtttctgaaatcaagaatagcttgagaaatctcttcattggtgttcatcacaaatggacctagggcagaaagagacattcagaaagttctgggtggcaatattttcctctaccactagaaatgatatatatttctgtagttcttaatttaaaacaaaatccaagcacatccgaagagtaaaagtttattttcacagtgttcaatccccaaggactgtaagatgagtttcttgactaggattgtatatgattattgattataaagacgaaacttcagataaatgcaatggcatctcacccattcagtataggtttctcaccagcaatggtgatcttttttattaaaaagagtcttagatttggttctattacaaccaattttgtagttatttttataacattagctgatgtcaagaattgaacccatctgatacaaagaactgacaaatcttatcatagctttggtgtctaagcagcatataaggctgtatacttatttgaggattctaagtcattttttgaaaatcagcagcacctattgacaataaacagaagattataaaaatttcaagtcgaagagcatcattttttaaaagttttctaggggttggcaaatgtttgctaggaagggctagatagtatgtattttagattttgtgggtcaaacagtgtctgtctcaactactcaactctttcatcaaagtgcaaaagcagccatagataatgcaaaagtgaataggtatggctgtgtcccaataaaacttcatttacaaaaacatgcagtgggcagatgtagcccatcgaccatagtttgctgacccttttgtctaattgctgggtctgaactcggattttgctaaaaatgtacaagaagtcctcccctaatctaccaggaggcaatgtgtgtttcttcccctttcttcatatattgtaggggcagagaggcactggactgtctcacccccatgatctgctagatgaacaaggccagcttttatatggcattgacagtgtctttagagcagttgacagacttgttcactcagtgtatgtcctcatccagcctgcagaagttcctgacattccttttatggaactgcctgctctaaggggctttctctgggagattctgattaatatacaactgtattgcttagagaaaataacatattcaaacttcttaaccattgttatcatatcaacatggatttggtgatcactataatttaaatcttcagaaggaagacacaggataatatgtcttgatgatgctgaaatctttggagaggatgtggggaatagaatacaagtagaaagaaaacacccaggcatctaaatccattcattcaattacctat

SEQ ID NO: 1563583 - DNA, 4001 bp, Homo sapiens
tactcctttaatcccagcactttgggaggccaaggcgagaggatcgcttgagctcaggagttcaagaccagcgtgggcaacatagcaaaacccccatctttacaaaaaattaatttaaaaaattaaatgaatacttccggtcttaaatgttctctctgaccatatgatttctgccccaaatcctcttgtgctaatgggaacaccactgcgtgggccacagtgatgatgtagaagatattctaaaaattccaggcatatagagtattgtagaggaaaacaagactaaaggtaactgacaaacatcaaggtgtctgagaattcaggttcagaatcttttgggaaaacctccagaggtagcaaggtgaggggagaggcaaaacccattagaagtagtaaacaagaaacttccagaaaagtccacagaagtaacaaggcctatactatgtgagtcccatactcagctttaacgttcaaccagtcataatggttcccaaggagaccctggtgtcctttcatttttgctaagcaaaagcacaaacgctccttcatttactacagaggaaaatgtctgttttttggaattctaagtctggagcagacaaatgtggcattcatatataaactgaggccagggatgaattgattttattttgggcaaaatccctggaatttggaatttggttaagaacttcacaccaagtagttctagtactttcaaaagcaactgagcctagctgttttattattttaagtgtcgaagtgctggttgcaagggagttggtgggcctggcctgtttccagaagtctcagattcagaactataacaacaaagggcctaggcctagggcttctcttgtgagaggcccaagttttctcagtacttagtgtggtttttcagctgctctgtccagctggagtgtgggcagttgagctaaaaggtggcttctcattgggcaatacgacctatcaaagttgagatctgcttgtctctggaaccttactgcatcctccaggaggttgaccattgaatctattgggtgaggggtgaagtaggaaggggctggggaactctctttgtgaagcaggctacaatttcattcaactgttctttttgcctcttgaagacagtagacaattaactttccatcattggtcagcaggttttctttgctcagtgctttgtcttcctccccaacctcccagaaatcaggcatacaaaaatcaaatgaatcactgctcttgctctgcttagaaaattgagctgacaagaatagttagtgcctataagcttcgtggggggtgggggcagggaggggtcgcaatgattattctgaagctctttcagtatgccatttacccaggttcttatgctctcccccagcaaggttaattgaaagctggtcaaacacagaacctaaatggcaaaaagtagcccttttgtgtgtgtgtgtgtgtgtgtgtgtgtgtgtgtgtgtgtgtgcattatgggccatagcaactggcaagactgccttttagattttggatagatccttttagtttatatgttcttggtttttggaacagagtcggacttcctttaaacaaaaccaaaccaaccacaaaccacgatctgaattgactggtggggggcaagatgcacttactttccattatccttgagcctttgatgatgctgttccttcagttaattacttcctgtaatgaattttatatgcaaatgaaatgagagttcttagaatgcagcatgagctgggcgcagatcctgcctatcgctgttgacagacacatggaggatctcaaggtgcacttgtgagttacctcggctagatctgagtgaacaaatggctgtcttgtttgttggtcaagcttggttcatttaaagcaacccagtcctggtcttttctagctaatgggggtgggtgggggggcgtctatatgtttattgaaacttatcaccctgatctccatgtagacaatcaaactgaaaaaggcattaagtttcaggacagagtcacagtcatattttgcaccacaaaagccatccaatcaacctcatgccgaaataagtgcaccctgcaaacctcttgtgagcgcaggggaaagctaaactgtggttgaggaggcatcagagtctttctgtgtttgcacacagggccatcagagcctccctaggaaagtgaataataagcaatggcaccctatgccccccaagtttggcagcctccaatctgctctcacactgcactcctcagtgacaggagccagggatggagcagccgggtcactgaattgaaaaagtggcacatgtgccctgacatctgaaaatttcttcttagttagtgcacaccactgggggaaaataagaagaaactcggtagtcagtcatgacaagcttataagtatgaaaacataaaaatgtctgaagatgattaagtgccagatgattttagctctagatgaagtagcctctctcctgctgtccagagtgtgagttaatataaaagaaatgtaggctctgttgttcccatggttctgtttaaagaccctttctcttcccccttctctactcaagtttagtaagtaaaccctgcttgttgagcccagggcttaggtactggggttatcggtggtttcatagtcttttgaaaattgtgcaataattctccgagccagtgggttagtggtcttcagaagttcagctgctgagggacgagaccttggagttgccttacttcccttcttctgtagcaaggccttgaaatcgtcatttctgccagcatctaggttggcactgctgcctgaccctgcagtggcggtagactcactgattggagactcagctgtgttctttattggtgagtgggaactcgttctgccacccacaaaggcctcaccaggttccttccagccgagcagcttccttttggacctagataagagaaagtttggtctgagtgagttaatgcagcagacatttaccagtgcttcacagacccccatgcctgtgacacaatccaggcggcagccctgcaagcagccgtattgacctgctttctctctctctcacctctaaatcctcagagtcccttgttgggccctcccgtccccatattcctttcaatgcccccagctggagtcacttgtcctgtgcctgtagcctcagtcctgcccaggttctgggaccaaggacgaatttcaggagtcaaggctagtagctcagtgactctgaatcaggacagcctggggactgatcctgttctggactggtggtctagctccaataataaactcttcccagttttcttgtcactgaacccctgccttgtaaccctgtccaataactggtccccatctggttcctcttttcctaagttcctgttttgatatgctgcctggtgccccacttcaactcttgatgggatttttttgatacaaggaattctgtgaagggttaaatgtctctgactatagacagagctaagagagagcagatggagccacaataggccaagtggttgctaggagacgaggggcctctcactcggcacctggtcctcctctcccctcccttcctccactttacccaacgatgtcagtgaatttgagatgcgaggccctggactgcgctcacatatgtgggtatctgaacttagcctccaggtgcaattctaatggctgcttaaaggtagcagtttttcttatttttaatttttttctttttcttttacaattaggatttcaatgtggaatagcaggttttctttaagtacaaaaagggaaggcaattgcaattagaattaaggaaattggtgcagacctgtgtatcacagtaaataaatcttcagttgtgcgtgaagccacaaacacgtcatcatcatcctctgcaatccattcagctgttttatcactgattaaacttttttcttcggtgcctggttccacagaactccctagacataaaaaaccaaaaggaatgactttgaccacagtagatagga

SEQ ID NO: 1563584 - DNA, 4001 bp, Homo sapiens
agcctgcctatggcttcctccccattgtgcactcccctccctctcagtcctcggtacctcccctctccagaatgtttcctcctctgagtgttttttttttttttctaggaaggcaggtatctgtccctcctgttcaattctagtaataattaatttatctgctaaagaccagtgagagatggaggccctgggttggccagcacgtcatgcccaaatatggttgactctcctgtagccctgggtgtctacatgacacgtggtggggctgtgatccgcccagcacattcacttcggggcagcctgtggccccactggtttttcccactagtagtggtgttagggggtgcaaatggcattttccagtactgaggccaacccctgtatattgtcccctctcctgaccactttgagacacacctgcaccaagtgcgcctgggcgtctgggagctggggtggaggtgggagggagggctgggaagggggaacccatacagacccctccctgcacgggccccattcaagacgggcttgaagttgtccttctggtccccctgccccactggaaagcaagttcccaggcacggaattccatcaataattgactctctctccactaagggccattgagctgggttgtctgggttcattccttaatcttcagagctcagggaaactgagtcagagtgaccagtggtcaattccagcagaaagagtgtcaggaggtgggtgccgtgtcttccagccctagcttttccctatttagaggaaacaaggaatgggcgtgtagagggttcttgtccctagaacatagtatcaaccgccagatgtcgcccgatcccaaagccaccagatcgggcagtcctgggaagccaaaatccagctctttcatattttcccttatttggagtagattcttggatgttaggcacaccccgcccaccacaccacccctggccctcagaccccaggccagaccctcccactgggaggtatagcccaagcccaggagctgttcagctgggatccctaaggagctgtttccaggcctgcgtagccagggggcgcaggagggaaggaagccgcagactggcaaggtgagaagagacctgtgctggcaagtccaggtgcggcaggtgaggtcgcccattcccaagctcccaccttgacggtgcactcggagcacttacaaatgggtctgccagtggattttaacctattttgcctggccccaggtggcacgggaatctggggacattgttggttatatcctggctggcagtgcgcatccaactcagagccaacctggcatagggcccagggcccaaccaaggaacctggcctggtctcatcctcaccatggcccccatggagtagagcagccccagaaccagctcccctgtgcccaaagcagctggtgccctgtggactcgagccagcaagggacacgctgtccccctcccagtgggcacactggctgagaagtgtccttccaggtggccactcgccctgagtccacacaagttcctggtgtcagggcccttctctctcaggcatgcagtggtccgttcatgggcaagtgcccagacaccctctctctctcggggaccccccatggcctcaggctcccacattcgtgggcacagacatggctcgtgggtcaactagggaagctattctctggacactcactcccagatgccaggggagcctccatcggctcacgcatcccagctgaacctggcccggacctgggcgcgagctggcgcctgcgttttccggcctctctgcccgccttctccaaccccgcccccggccgacgaggagcgcggcgaccctacggcgcgaagccgggccgcggagacctcacctgctgttcctgagagcgaccggtgaccgatgaccgcggggtggcgcccggatcgccttcgcgcccgcgcccgcgccaggcgcctcggggattctgtcggcgtccgctgcgcgcgacgcgcctccacgcgaatgggccgccgccgcccgccttcttgttggccgcacccccgccccgcgcccgccccgcgcccggcccggcccggcgagaaagccttaattggtaaaattgcccaggagcccgggacgggtgcgtggggggcgggggtgcgggggcacgccgtgagctccagcgacccgccgccgggcgacgccgccccccgagatgagctcaccgccggcgagggccgccaggccctgggggagggagggcttcgtgggggagtcgcctccagcgcccacagggactgcagggctcgtgtctaggcccaatcacaaggatcctgcgtgtctgagtctgggggagccaagcgcaccccaggtggaaaggccgaggcccaaggccaccttctccaaggagccacccacagtcacagcccctggtgtctgtcccaagccgggattgtttcctggggtgggggcaacaggtcgttgcaggtgttggctgggcgcctacgtcaggcagggccccgggacgggactgcagggctccgagccctgggatgaacctgactgccatggatcaggcgctgccaggtctggcctggggtgggcagcagaaacaggatcgctcagggggacgagaaagttaagtttgtttagtattaagaagattctgatcttaaagaaaacattggccgggcatggtggctcatgcctataatcctagcactgtgggaagctgaggcaggtggattaattgagcccgggagtttgagaccaacctgggcaacacagcaagacactatctctaccaaaaatataaaaattagctgggcgtggtgacgtgcaccggtagtctcagctgctcaggagacagatgggaggatcgtttaagcccgggagtttgaggctgcagtgagctataatttcaccactacactccagcctgggtcacacagtgaaaccctgtcactaaacataaaaaaaaaggccaggtgcggtggttcatgcctgtaatcccagcactttgggaggccgaagtgggtggatcacgaggtcaggagttcaagaacagcctggccaagatggtgaaaccccgtctctactaaaaatataaaaactagccgggcgcagtggcaggcgcctgtaatcccagctactcgggaggctgaggcgggaaaatcgcgtgaacccgggcggcagaggttgcagtgagccgagatcacgtcactgcactccaacctgggtgatagagactccgtctcaaaaaaaaaaaaaaaaaaaaaaaaaaaggccgggcgtggtggatcccagcactttgggaggctgaggcaggtggatcacgaggtcaggagtttgagaccagcctggtcaacacagtgaaacccggtctctactaaaaatacaaaaattagctgggcgtggtggcaggcgcctgtaatcccagctactcgggaggctgagacaggagaatcgcgtgaacctgggaggcggaggttgcagtgagctgagattgcgccactgcactccagcctgggtgatagagctagactgtgtcttggaaaaaaataataaatataaaaataaaaatacaaataaaaaaataacgttaacagctcagtgaacaatcatctacttgtcatagacactgaggaatgtttccatgttgatattttttcctcgtaactcaatcatgttgggattgtaagttatacagcatatactgcttgcaagccattccatccttaaggagcaactcagttttcttattcttgacttagaattggttgcatcccgatgtctcctctgcctgcacttcccaggaagaaccccctgaggccctcagattttcctgcacacgcccttcccagaccctctgatgactgcaaatcccaccctacccttgacgggaaactctctgaggctgtccaggtcatcacccccagggaccaggtactggtgggggaatgttccatgaattaattgctgtactcagggctcttggacaagtctcccctgatcgcagggtcctg

SEQ ID NO: 1563585 - DNA, 4001 bp, Homo sapiens
aagtttatatcacaggtcaatcaaaatcttgcctaaccattagccgttactcacacatatatatgtatatgtattatagttattagtgccagaaatctagtgaccaaaaccactaatctaggaccgtgaacgattctacgcaaactcaccagaagaaattatggatcaataaaatcaatgaaattaaaattttgactgcagagtcaactgaaacaatttcatattcatgagactgttaagaacataaacgcggggttaccttttgcctccttttacagcaaaaggctttatctttgtgctcaaagtatggaacagtttacatactttactcatttatgaaatatactgatctccaaatgtcttcataaaattggtaaacacagaataaagtcaattgtttattttcctatagccaaacgtgtcctgtctgaaacattcaagccattctacaatacatttaagaattgtgttggacactgctaatagctattttccagccttccttccacacgcaccttctattgccaaaatactgtagtaaggtgggatattattgaaagaggttatagacattcaaaaggaaatgagaatttatagatgaatttatacagcacctacataccaacaaacgcactactgctacatcaaatttgtaaatcttccttttaaaactgaaaggtgttagttgatctgcaatggtgtaactttaaaaagcacagtaaacccatgaatgcctatataaagcctcaacaattcagtccactgcaacaccacaaattcaaaggaaatgtggtcaagttcttaggggcacaaaaatattttcgctcagttaaaaaaaaaatgccctagtaataatatactctcagttaattacctgaagtttcatggcatatatttaggtctttggaaacttaaacacacacacacaatttttaagtagcagcgctgctaatggttttagacgctgaagcatgtgcattcctgaatttaccccgtttaacaaaaagggggacgcgaatattcacgatgatcaacttcttcaatgcactgctgggccatgttagggtcttcctgaaacttttggatctaaaatctcctccgaaatccacaaagagaagccactaaaaatcagttgccattgtgatttggtgccgactaccgcttcttactactctttcttcacagccctcgcccagaacagtggagctctccgaagtcccaatgctagaccggaaaagagaagccaaaggagacctgaagccctcttggcgctgcaggaggcggcccggctgaagcgccccccgctcctccacaactacccacacgacaggcccggatcccgctgggagatgatgtttaggaaagggggaataagccatcgccgtcacttagcgccgatttcggcccttcccgcccggctctagtacctgccgccggccctcgcccatccccagctcaccccggcggggctcggcgccgaaagagaaccctctcctcgctggtctctcatttcgataggcgctagggcctctcggagtcggagaggggcttccaacaggccccaagtccagtccttccctcccaacaacatcccgccgagcgtgccctggcacccaggcgcggtgctcgggaagagggccccgggcctgcctcccgccgacaccaagaagaaaagggagggaaggaagggcgaagatggggcctgccctagagccaagtaccttgtagaaagcgccattggagccccgcacttccaccaccagctcctccatcttctcttcagccctgctagcgccgggagcccgcccccgagaggtgggctgcgggcgctcgaggcccagccgccgccgccgccgccgccgccgccgcctccgccgccgccgccgccgccgccgccgccgcgctgccgcacgccccctggcagcggcgcctccgtcaccgccgccgcccgcgctcgccgtcggcccgccgcccgctcagaggcggccctccaccggaagtgaaaccgaaacggagctgagcgcctgactgaggccgaacccccggcccgctgcgggtgtaaacactgaaaccacgtcacgtgatcaacgctgttccctccccccgcgggctcagcccctcggccccgccctctctcttcaagtggcctgggagcgcgcgcatgcgcgctgctgggaaccggccggggtgccgggtcgaaagacagacgcgcgggccgggcgtgcgcgggcttggtggagggcgggaaggctgaagggcggtgacaggtcgcactgcctcgcgagggccagaacgcccatttctgcagaggtgcactcagtggcgtgggaaatcaaatgcatccggttatcccagttcggcctctctgggattccgcgggagggggtgtctggtctggtttggtttggtttggtttggtttggtttggtccggttcaaagtagcgcagtctgactgagcgggaggtggagtggaaggcgagaataggggtgaaggattagacagaagaagactttgaactaggaacagtggcaaccagggtgacccaggcttttgtgacccgtagaggcagaaggtgaggcgtctacgccctctctcaccagattttgggcggccctgtggagacaccctgtgccctttaagggacatggattgagtcgggatctcaaaatgtgagcctttcctcagacccagctttgacccacgtactcgcctttcctcaactcattttcatactttcacttgactatatattttttaaaaattgtgttaagcacttgaggttcatttctgcccctactgtatgtgcaccctgtgccagagggtggggtgaacacgtgtgtagcagtcatgcgtcctgtccacaggggccgatgcacctccttgcaaccctttacattccactgtgaaacaaacctcaactttttcttattcctgtttttacaccgtgcttatagctgccttaatccatgttcccttcgggatgctggtatccaactgagaagttgacggagcatctatcgtgtgccagacactgtgctaagtgctaacgagaaatcggtgagcaaaacagaaaagaaaaaaaaagaagaaacgactgccagcattgaacttagtacctagcaaagtaggtggacataaatcaaattgtcagacaagtaaatgagtagttgcagctgtgataaggggtatgaagaataggcgcttccatgatggcggaacatgacctagtctggggtggagaaggggagatgattccagctggaatatggcaggtgagagttaactaatagcactgagttggcagaggcaggatgacctgccccaggcaggtgccccagaatgagaggatgttgctgctggtggaactccagctttaaagcggtggatctagggccacattcctcaaggccatagcaaacaggaaagaccttttggactagggtctttggagtagtcacatgaggccaagaacccaatagggctgaaagagaatctcatcataggctgaatgggagcagagcattagctgcaactccaatgtattatagtaaaaggggacacattgattagaatgattatacccctccaagtgtaagctgttgttcaatttacccagggcttaaaaatatgtcaactcttcacaaccatttttactacaagccacactcaacctgtgttgttccctgaacctgtgatgcactttcatccgttcatgtctctacacatccttcctgggccccatagaggccctgcaccttaaggttttcagctggattcctattagctagttattttatctcaggtacagagagttaactttgctcctcaattttcagcacattgtcatatcagtccctacagggtccttgtttacattattttatagtgtttatattattttttcctcatctttctcgatccccactctcattcttctagacacaagctgcaatatgttcgatagagatccttgataatttaacacagataatgttttgt

SEQ ID NO: 1563586 - DNA, 4001 bp, Homo sapiens
tgtaaaacagtgtgggacttcctcaaaaagatcaatggagttcccatatgacccagcaattctactcctagagaattcaaaacatgtctacacaacaacttgtacacaaatgctcatagcagtattgttcataataggcccaaagtggaaacaacccaaattcggtaaatttcaaaaactagataaaaatatagtatatccctacaatggaatactagttagccataaaaaggaattaagtacccttatggactggggaattgggagtaactggttcatgggtatgggttttaatttggggtggttaaaatattttggaactacatggggtgatggttgcacaacatttacaggaacgaaatccctttaattgttcactataaaatagttaatttatgttatatgaatttcacttcaatttttttttcatttttttgagatggagcctcgctctgtcgcccaagctggagtgtagtggcgcgatcttggctcactgcaagctccgccttccgggtccatgccgttctccggcctcagcctcccaagtagctgggaatacaggcgcctgccaccacacctggctaatttttttgtatttttagtacagacggggtttcaccgtgttaaccaggatggtctcgatctcctgacctcgtgatccacccgcctccgcctcccaaagtgctgggattacaggcatgacccaccgcgcccggcctttttttttttttttttttttttgagacggagtctcgctctgtcgcccaggctggagtgcagtggtgcgatctcagctcactgcaacctccgcctcccgggttcaagcaattctcctgcctcagcctcccaagtagctgggactacaggtgaatgccaccacgcccagctaatttttttgtattttagtagagacggggtttcaccttgttgcccaggctagtcttgaactcctaagctcaggcaatccgcccgcctcggcctcccaaagtattgggattacaggcgtgagcactgcgcccagtccttttttttttttctttttagacggagtctcgctctctcaccaggctggagtgcagtggcaccatgccagctcactgcaacctccacctcccgaattcaagcgattctcctgcctcagcctcccgattaactgggattacaggcgtgcaccaccatgcccggctaatttttgtatttttagtagggatgagggtttcaccatgttggccaggctggtttggactcctgacctcaagtgatccacctgcttcagcctcctaaagtgctgggattacagatgtgagccaccgtgccttgtcctcaatttttaaaaaggggcgacaagggaggttagtctattttgtggcgggaagtgaggaagggaaggcttttgttaggggaagttggggagggaaagtcttttataagtgagtttaggcaggaaagacttcctgcggccaggcgagagagggcaggactttgtaaggactgctgaggatagggccataaaggcctttgggaggagagaggacaggaaggggcaggaaggcctatggttggtgccggtgtgttgccacaccccgcccccctctccctccccctccccctcccccagcatttccctgcctggcctgagccagcactcaccggagcacaggtagtaggacaggtagtagcacacgaacagcaggatccaaatggagagcatgagcatcccaaagggtttgctgacccgcatctttagagattcccgccatcctggctgaggcctgtcagccatggcggcctcgtatccaggatggctgctctcgggattcgactcagttgccgccaactcataagttgccagctctaagtgagccacacgcatggcacggtgacttctcctattcctccccttcgctttcctcctatgtgaagacatggctccgggtgccgcctcgctgagacgctgcctcacagcccaacggtccggcagtccgtggcccagaagcttccggggcagtccgtggcccagaagcttccggggcagtccgtggcccagaagcttccggggcagtccgtggcccagaagcttccggggcagtccgtgactcagaagccaatagggcagtggccctcgcgtggcatgtgccaactctcgcgagacctgaaactgattccttcacgatgacgtcttctgcttcattccacaggcccagacccttataaccacgtggccagtggttggtgcacccccacactcccactcaaagcctggcatataggtgcttgctaaatgcttgtggaacaagtgaacggggcttcaggcctgcaccagtggcatgactgcttgccatagatcaacaaaaaggaataactcggattctgactccaaccttagccgttaattcctcctcattcccagagtgcacactgtagtgtatggtcactacagttcgtcattacagcactcacgacagcagctgctagccaaatgtggctatttaaatgcaaatttcaattacttaaaattaaatgaaattaagaaaacagttcctcaatcacagtagccacattaacaagtgctcaatagtcgcatgtggcttatggctgccatcctggacactggcaatatggattttttttttctttgtttcttttttttttttttttttttttttttgagacggtgtcttgctgtctcccaggctggagtgcagtggcgcgatctcggctcactgcaagctccgcctcccaggttcacgccattctcctgcctcagcttctggaatagctgggattacaggcgcacaccaccacgcctggccagtttttgtatttttagtagagataaggtttcaccatgttggccaggctggtctcgaacccctgacctctggtgatgtgcccacctcggcctcccaaagtgctgggattacaggtgtgagtcaccgtgtctggctggagcattttcatcatggcaaaaagtcgttttgggcagtattggatttgaagagtgactagtgaatatcgtagatattcaatagattgttacactttagtagaagctttacgtgttagacaaaatgctatttgccttatgaaaccttaaaactgagttacaaataaataaaacaatacgataacatgagaacaaataatgtgtgacgaacactgaaaagtgactaaaatcatttacgttttactgctaaaattaccacccatgaactgggtggctctaagtaaatgccttcctcccactaggccttggtgcctcatgtgtaaaatggaagggttggacattgtttctagacccccttttggctctaaaatctgacccttgggcaaaatcccattatcttccttggtttgggcacaccagcaaaaggactgtgtaggtactgcttccataactgttagcttaccacattctagtttacaaaggatatgaaaaccaccccaactgcatttccatccttattcataattatattatacgtactttccgtttctactacttttattctattcttatttccagtgttcctaagcatcccacagaggaagggagaagcaaggcttcctattccaataattcttgaaacgtagcacactccacccatccctgccccatgcccaagagccatttataatgctgtttagtttatcaaagagtctaacaggaaaagaacccactttccttctatatttttttaaattctttttttggcttcagcttttccaaaacgaatttgatgagaggattcttatcacacaaaacatttattaatagcttctgaaactactgctttcaactgtgaggagctgtgaagtatctgagattttactcttctttcaagtaacaaggtaactagttgcagttttatagatgctggcagaagatgcaagactactgagtcagagacaaaggacaaaagctctcctgagacatacagaaactcaacaaatccatggaaaattgtctcccaacagcagccttgttcatgtcatagcac

SEQ ID NO: 1563587 - DNA, 4001 bp, Homo sapiens
cccacaatataactaacaacttgttatttcctctaccctggaaaatgaacctaagggaaaagaaaaacagctgtgtaggctgggtccaaggaggggagctttttatgagctgagactgtggcgtggcagtctacccagaaatagtgccaagggtctcagtcagctgtcctatcttctgttctgcccagcccctagggatagcacagatctgatccctcagtctcctatacctaggggaagttcctctgctcatccaaccttctgtacttggttatatgctgacctcaccacctagagaggtacaagccagcaatagggcttgaggctccccaattttgtgattacagccccatattttctcaggacaagtttttcagagtatcctttgagatattctctcacagtttcttcacagaaggccaagagaactcccaactttgtgctctaaagtcagagccctacctccttcttcatgactaatattccttaacagtaaaggatgacttccccccaaaacttggatagccccttacaagggagagtttcttggcagcacagggtaagctgagccaagtggcagctcacagccctttttcttcttagtgcatgagatcagctacctttccccatgaatattattgtttttaccctttgccactgcactccctcctcctgggtagagcagtgctagaacagtaccactacactgaggtactgggaggcaagcagggaatccaagtaatcccacaggaatgggagaaaaggtgttggggtgggaggtgggggaggagggaagggtaggttcatgtggggaatccacacagttcctgctgtacataggataaagacttctctgtgggaataagtgtttggggcagcccaagccaaagtgctgcgaatattgagcagtgagcagagaattcaattttctccagggcagggacagtgtcttattcatctgtgatccttcagcatcaagcaccgagtgtggcatatactatgtactaagtaaatgtttgtctaactggagattgaaggtggatctctgggcttcccaaagggggtgggggtgggaggtagtaaaaggggccccagagtagaagtaagggaggctagggggtccagggggtagatggtgttgggaagaaggtaagagggtcataattaccttccatcctgctgagctgttgctgtcacccttgtccttgaagtagggtacagtacggaccatccactcgtagatctgggcaagtgtcagtcgcttctccggggcgctttcaatggcctggctgatgagttctgcatatgactgatttccccaggcattccggcgggagcctcccttccgaggacctgttacagcccccaggattccgggctgggggcccccggccggctctgggagccgagagggcaacaggatcggctctgagcgcccctccgtgtgtaccttttcccccagatctggctccacctcgggcggctcggacggctggttagcgatctctggtcggggaaggggccaggtgcaggagcggggacggctctggggttcgaagtcgggatctaggtctatgatcgcggcagcctctgtggctgaattctcattccccggatccatacgtggagttggacctccccggctcagcgttcagtgaagcctgccacagtccctcacgatgcctcccctcaggggggaagcatcgagggccaggaggcacattcctgccagtcttcagaaagtcgcgaacttccccctagtcccaggacgctagtccctaagctgtcccttcacacagttctccgatccccttcccgactacagcctgtagcctcaaagctctttctgagatgccacctgtaacctctgccgagcgaagacactttttctgcaacctctcactcagcttcctgctcttttaaacctgaggcactgtatcccctcatatattgcgctcccatcaccgaacgtctccttagccgcagttccctcccccttttaagttgctgccccccggacactcctcccaaatttcctccacccggattgctgccctcccccacgccccgctcccccgcgtcacttgcccctcccctgactcccccttcccccgcctcttcccttctcgccactcttactagggtccgggtccccgcggctgcggcctcccttattcccgcaccgattcccctatcaaccccccccaccccccgccccccgggtttcccttttgttttgctccaagcagcagccccctcctgacgtctctgtttaccactcgccggggcagccatctgcgcacgcgcctcgaaagccagtcgggaaaccgagttctgcagtcgtgccaccctggtcactcttgaggactacatctcccgtcctgcttcgcggccaggagcccgatacggcggcaggagagcggcgtggcaggatataacgaggtggaactttaattattagaagtcgtcgcggactctttcttttcttaagaatcgtttttcgccctttccccctttccattgtctcccttgtgattcagagtcgtgtaggtgaccagattgagaggtgctagccctttccctccttcatttaggagacggcaaaagggaaaaaattattctcttaaagatgcaggagaccaagaagcaagaagcaaggaactgactagaaaataggatgtatgcacgttggagagttgggtggggggcttgtgtaacataaacaaatggttagcccacggtggtgttcctcctcacccccttcctcctccctccacccgccttcatccccccatatgcagttcccactgacagtgaggtctcacttaccaatcagtttcctccactggctcttctggctttcccttcaacaccgatattctccaggttcacatctccaacggcttcacttctcattcaacaggtccaaactcattatctgttcctgcacccgcacccctatcctctggctacccttatctctgaatttgacttatggtagtcctgatctacccagtctcccaagctccaagcagcagcttagaggtaattacccattacttcttcatctccgtaactttctacatccaaatcccagttcaagacctatttataactgcatttaaattgtaggatcagccgggtgcagtggctgacgcctgtaatatcagcactttgggaggtcgaggcaggcggatcacttgaggtcaggagtttgagaccagcctggccaacatggtgaaacccatctctgctaaaaatagaaaaattagcctggtgtggggcacgcacctgtagtcccagctacttgggaggctgaggtgggagagtcgcttgaacccaagaggtggaggttgcagtgagccaagatcatgccactgtgctccagcctgggtgacagaataacaccctgtcaaaaaaaaaaaaaggtgcagtatcatcttaattggatctccttccatcagtctttacctcactacagtttatattcagagctgccagcaaggttaccgttctaagaaacatgtctggtaattatggctaaaatttatggagcccttattatgtgccagtctctgtgcaaattgctttacgaacattagttcatttactcctcaatcatttactcctcaattcaaccccatgaggtaggtaccactattatccgcattttatagatgaagacactaacaatgctcagagattgacttgcccaacgaggcagaactgggattatataacttacatgcgatcgtataatttctttctttctttccttccttctttctttctttccttccttccttccttctttctttctccttccttctttctttctttctttctttctttctttctttctttctttttctttctttctttctttctttctttctccttccttccttccttccttccttccttccttccttccttccttccttccttctttccttcttttttgagacagggtcttgctctgtcactcagactggaatgca

SEQ ID NO: 1563588 - DNA, 4001 bp, Homo sapiens
ctctatagtaaatggaaaaaatgaagccataaaagagactagaagccaacataggtgaacatttatctcattttcaagtaggaaaggactttctaagcacaaaaccagagacagaagccacagaaaaaaagactaacctatttgactgtataaaaccatcataagcatcacaaaaaacaccataaacaaatagaaaaaaagcaaatgatgaattggggaaaatatttgctatatatgtaatggctgatgaaaggttaataaccattccaaataaagagctgtggcaaatcaataagggaaaaataagatgaacaccctattaggagtaaggacatgaccagacaaccaaaaaaaaaaaaaaaaaagcatgaatggccaatgaatagtaaaagtaatcacaagatgcaaatttcaacaatgtgataatgtgtttttcttacctgtcatgttgggaaataattaaaacataataatactcacctagggttagcttaagtagagggagcataaaataggacaaccttttggaaggagaattagcagagagggtcataaactttaaaaatgcacgccccctttgccccagcaactcccttttcaggaatccaaggaagcagtcagggatgtttatagaaaaaaacgagaaacaaccggaatgtccaacaatcggcacttggtcaaatcaatcaaagttcatgctgatgtgaggacagtcttgtccatcatgaaagatcatgtgttcaaacaatttttagtaagcttcaaaaacactactgttaattgaataaagcaggaacaaaaccaatatatagcatgattctaatttggttacagaaatactaatagctaacacttcgtgagcacttactttgtgccaaacgctgtgctaagcctgcagaatcgagctcaccccagccctgaacaacctgtttgcttcctgaatatggactctggtcacacacatgcagtcctggggtaggtccacacagctaaactacggttgacaatggtgtgaagtgctccctgcccccccgccccaagggtctcctctaaagcgatacaagcaaagttcagttaagtgctcagcttgccccggcaccttgcaatcctcctgctactagggtgaacagaactgatgctcactctcataaaatgtaaaggtcctcggcgacattactattattaaacgccagctgtgtacaaagctctaggctggatgctggctgggaaggcaggtgggggaaggcaagaaaagagagcgggagagatggaggaaaggagatcgatggagtgtggtcaagatggaggagacagagataggggagatggtcagaggccaggagagatgcggggaaagagagtctgagtgtagcgacagacagatggcgggagaaagagaggcagagaaacatgtaaaagagcaagacagggtgagcagagagacagagaaggatgagaggcatcaagagctaagagacaaagagatgagagagatgcagttgaaattttcagttgcacctggacagcatttcaagttgttcaaagctctgaaatccataaagactggcagctgacatattttaaaaatcctatccatctacgtatcaattgatgaattcatttatttttgcccctgcccatgcattaagtacttcacctttaagtcttctgccatttattctattatttttttaaagaccttacctggctggaatcacggtagctgggtacatcccactgtaccagagggcccctgacccccccgccgtgcctacctccctgccatctcctccaatggggcccacatctggtaggggagagcagggacactcaccttggtgaagtggactgacagaaaaggatcagcctggcttgtgggaaactgtcacgtatcaaaaacaactttgcttttataccgagaagaaaaaccacgctgtacggtgtggaagccgcagacctctctcttctaataatccaaatttttttcgatgagtgtgtgcgctgataatcacggggtggggaggggttctcatagttttttttttctctctctctgtgtttctccttttcttgattatgagacttaaacggaaattttgaaattttgggtttttttctttgccctttacgagtcatctgaaaatatgatttcttcccctcaccacagaggtgagaggtatcaatgagataatagggctcatgagaaaccacagtttttaaaacaaaagtgtatagagtttgaaaaaaaaaaaacaagggaaaagaactaaaataaatcacagggccaacccgaggcaggcagagacaccattctgtgagtgagaggatatttgagggtctctggggaaagaaagagaatctgaagctctatgtgtggatgggaaatgccagggaaagagacagaatagggctgggttcccagaggcctcgccctactccaggcctcagtttccctatagatggaattgatatggtccccattgcttgaactacccggcgaggggagttctgcaccccctgcaacacccctcccacagagggtgaggggcatgtaagttacttcatggaggagaaagcggagagcccactgtcatcccctaaaattcatggacttgaagagtcggagaatccctggctcccagaatctactgacagttactgaatgaggaaagagagaaaagtctcgcctcatcacgttttagggcttgagtgccctgacccagccactgtcccactgggaaggtccctagcaggtccccaatattaatgcatccatcctcacgatgaaccccagaggcccattgggaccctgaccctcttgtttcaggaacatcatggcctgatgcttctgaggccctcagcctttggggtcttttacttcaaaaagccccagtttccaaggatttaggattccaaatatccgccatcatctcagtagctgatgtttatcttgaattttccatgggtcagatacagtgctgaacatgtctcacaagtgatcatgttcaatcctcaccatggccccttgagctccatctcatcattattgtattcctgttatacagatgagggaaacggaggtataagtagtcaagcaacttgcccaagatcacagagctggcgagtgtgggtcccgctttctttggtgctgggctttgaaatccccaagctttcctgaacttgatgttctcaggttttaaattctaggatgtgatggcagggagatcctgggatttggagagtccttggagacttgaagcttgtgaggcttttaggttgtccaggaattggcggctgcatctcttgacctcagcaggcactctattcaaccactggtcagcatggtagaccagcccccaggggcttctcctgacaggccatggtgaagacttccagctcccagcaccctgcaaagcccagggttctagtcgtccaacaaccactccagccctctacaagactggcttcagacctggggaagagaaattggaaagggctttttatttacatggtacaaatctggtggccaagatccaccccttcacccctttgccccctttcctcccccaaccttctaagccctcgtaaaaaggagggcctctttcctcaactcagactcacccttctggaaaagcccagaatgggcctgatggcctggctttgtgaagacaagaaaaaaaaaaaaaaagaatagaaaaaaaaagaccttaaaaaaatcagccaacaacaattaaaaaaaaaaaaaaacacccaaccctccccaccattagttcaaaacaaaactttcgctggttgaggcttctgagttggtgggacacatctgagacccaaaaatggcttgggtgtgttggacagccaggggaggcaccaaggtgggatgaggtcccctgcttggaggcctgcagggaccctgtgaacagcaggtgtttaacagatgtcacggcatgtgggagggagcaagggagggggtgaggagcatgcatgtcaggaaggagtcctgg

SEQ ID NO: 1563589 - DNA, 4001 bp, Homo sapiens
agctttttatcctcagcatctaagatggaccttgacacattagcatatcctcaataaaatcttgagaactaaaaataatagaaaataaagctttatcatcaaaaggcttggggttaatacaggaatatttcacaggacgttaaacatacaaactaaaagtagctgtttagaattatttgtcaatattggaattggatgacaaagaaacaaggcttagaagtccagggccagaaatagaaaagtgaggttctgaaggataaaatgggttacttaaaaaggagatgtagctgatgaatggtagaaggggaaacttgattcttcatcacaagtcaaattctcttcacatggcactcgaggttctccatggctcggctccatcctgccttttatgctttatattccactgttcactttcatgtgtgaaaatactctctataaacaaaattcctttctttcacaaaacacacccttctttccttagtttctatgccattgtttctaggatttcttttcctttgctcaaaatttggaacaacagccactctcctcgtgcgactttccatgactctccacctggatttaagttctgtctcccctgtacccacctctaactttacttaacaccattattgtaacagtagctaaagacagacttggcaccaaccaggctgggtaagtttagagattaatgaatgtcaggggataagtaggcacagtaaggaaggcagtgttccaaaagggagcaatggcatttcaaagatcaaagagagaggtcaacaactctggctgactcatgcactcttggattctctccctttgagcaaaggctaagacacgagtctcctcccaaaagcggcggtgcccctccttagtgagcttccaaaggcaagagcgaggtcttgcattatcttcatccttaaggctgtctggcaccttctcaaagctgtccaggaagcagaggttgtaatgaatggtgctcttccagccatccggagctgtccagaaaaaggggaaatgctgtcgggtgaaattgtagatctcctgcacactgaggccacagtgggggttgtttcttaatgctagggcaataaggtggctacaattgagagggggcctttgccaggacttctcttggttgttgatttgccatagtttctggctctggtaacatttcatttcaggggactggagggagttgtcgtctggttcctcagcctcctcttctgtgagctcaaagtcactgggggaatggataccctgcttctgtaaaggagactgctcactggaggaagatggcagagactctaccactttgtcctctgagcagttagacccttcgtctttttgtgggggctgagggaaaggagaaatgtttgtcagatcctcttttccactgggctttggggcctcctggctgccaagggggcacaggatattggggtccacccacatccacagattgggttcacagggaggaccatctccatcaggactgggtctcctcttctgaggcatttctgggggcttcattactccgactctgtatttggcaaggatttgctcagctaaagagcactggtctgtggtacaaggcagaaataactcattcctcatgtcccagtccagcagccctgggacctggccatggagactataccaaaattcacagtcttttagttttaagtccatctttactggagagataggtggagagagacttctgaaagaacagatatctagcaggcacttaaagctgtcctttgggcatcatttttttatgcagtgtatctcatctagggagcttatcagtaggcctgctagaagcactgaagaaagaggcaccaatgtctcactgattagtggtcagacctggagaaacctcagctttctggaacaaggctcaaaacatggaagtaataaaaaagagcttttgagcagaaaaacatttttaggtggaattcttgagctttgattggaagcagaaagtcacttcaagaggaattataaactgaattatgtgcaaactatggtgacttgcataataggtgatcatctggcacatatttaaacccttgatgagttcatttaaggaagggacaaacatatgtatagatcacattatatttctgagtcttccttaatggttttaaaaatcatttcattcatcgagtgcctttggattttggttaagtgctttcacatagatgatctcaactgattttcatcacagccctgcaagataacatggtattattatcctcatgtcacagacatggcaactgagatatacagacatgagtaagtaggagagctagatccacagcccagatcttttattttcactatacgcattgcctcttgatcatactcaacatacgatatacaacaggcagtaatatgtgcaacctgagttttatagtaagatggtaactatcagaacatggcctctattattctcatactgatactagaatctaaccttgctgccgttttcaatccttttctgggaaacagctggctttcctctctccaggtcaccttcttaggaaatgagttctgaactatactctgaacagtaggaccaaaatttagccacagtatgcaaggtcctgaaagccccagaggttctatttccagtaagttcacacccaggacatttgtaagaaaaataaaatggcaaggtttcctttaattcagtttgcacaaaatccatgtgtaaagtatgcgatatcattaaaatcactacataggactatgttgcaaacatatccagcaaatgtcaatgggagctattggagaggcactttaatctccatattgtttccatactctggttctcttctactctaatctttcatacaagtggcctgagttgtctttctacagcataaatacaaaaaacaacacaacagttgtaccaactgttaattattacagaatgctgtaagcactctaactcaaatcttcaaaataatcctatgaagtaggtactcttattattcttcctttacagagtaaaaaacataaggcacaaaaaagcctaagtcacagagctagtaaaggccagagctgactttcaaacataggcaacctgactgcagaacacatgcttttactaactataccaatcttctctattttggtgttataacataaaatcttataacttaatgcaacataaaagtccctccaaaatctcacccctgcttacctttccagggtaacttaacaccctagctttcttgcttcatacttcacgtccaaaaagtactgaaatgctgggatcttcaccacacacccgtttttttctcatgtccctttgctcaaaaacattcgcttaaaatggcttactacccattgccttgacttagctaacctctactcatcttttaagacaacagaaagccttctctaataaaaacgctgcttccatctccccatagggaattaatggatctccttccagtggggcactgatcttggaaaagcaggagattaacttgaaatatttagcttattatgccaaccacggagagcctggaagcattttagtgctcagcagtcttttattccttaaatgggggctctagtgttacagaatttctcctccatcttcacctgggagagtgctccaatccttagatattggctagtaaaaccaagttatcactgtgtattgtttctttgggcctcatttagaaacattcaatatttacgtattgagcatccaccatgttccaagaagtatgtaatagatctggcagatgagtaagacacaacccaagaggatatcacagagtaatgcggaaagacagagaagtaaacaaaaggttaaaatacagtgtgatgagtattagatacttcaatagaagaacatagagaggaacaacttaacccagataataggaatcaaaagggatcccatggaagatattatttaagcttaaaagacatgttacccagaagcagagatatggagaacaggctagcacatgccaacc

SEQ ID NO: 1563590 - DNA, 4001 bp, Homo sapiens
aaattttaaagtgctatccacagatgactcactactgctatcatcatcatcaccaccattatcatcatcatcactatcatcatcatcatcatcatcatcaatctattattgttaagcagagaaggtactattggatgattgaatgctaacttaagcttctaactcctctggacaaagccactcacagtactgcagccaatgctattgcctctctgggtaacaccatggttgctacttacaaagcattcttccacagagcaaaagggatcacatgctttgacacctgaattgctgggtatcaaatctctcccattatctttccaaggaacacaatgtgttgcagctggaaagagacagtttgacttgaagccaaatcaagtcttctagttgctggaagtggctcttccgtaggtgaattttgtgaagatatggtactgtgttccttacccaccctccaccccatttaaatggatctgaattagactgcacattcaacaaactcttctgtcactttttgtcaaagatttctctttgagttccttgaaatatctattaaaaacttagcctaaagcaatatcttttgaatacccagctcactaattcaggtactgcagcactgtgagcatacaccaccagtctgcaaatggataaactactcaaaagatattttccaccccttaaatatagttccaagaaagaataggaaatgcctcatacctctaatggaagctatttgctacaaaaacaaatcattcaggtccgtggaactagaaatgccttttgcgcataaaactgaaaggaagagacagcaaaacagcagatgaagacatgaagtcatcactcacaaagcacatgattcaaataaaaataaaatactcattggaaaaatgggctacccacacacacaacatcatggctgagccacagcagttgtcagtttatgtataaaagaaaaaaaccaacattttgtatgaatttcagagaaaataaactatttgtctcttgttagtggctaatgtaaatatcagagcaaatagcatttttggttccaataaaaatgtagaacttttcaaaatgctcatacataaatcctgacatcaaaatgtacatatcttaagatgttggaacatgagcaccaaatgatgtgcttaatacatttgttctttcttgaagagatgaggtataattgtatgcaatcatcttgtagctaggaatttattaagaactctgaactataagtactaaatcaaactaaatagtctcttatcctatttttctctctcatacttgtcattccttcctgaagttctcattacaactacataattctaccccttataacccataggttttcttcagaaaaggaggatagcttcccccactcctttccctcagaacaacagttttctccccacaaatgctcatggggtgagacccacagacataatttcaatgaacaacaataccttattgggtaaaagaactagtttattgctgctttactttttgcaaatagttatcctgtctttaaaatttgctattgttgtcccttgagaaaagacaacttgttctaagagaaaggttaatggaaaaatatgaactacattgtgatgttaaatacagattatttttccaaagctaaaaatcacagtcctccttcattcagtcctaaagaagacataacattgctctctaatgggctgttcacaaatgacaattattgaatgaataataaaggaataatagcaatgtgatttccacttacatcaaccacaaaaatcttctgggaatcatccaaaaactgcacttttaaatgtagcattctcagcgaggccgttgggctgcaagcaggctcagagtgctgtgggtgctttctccaggaatttcactcccagctggatgtggtgcactcgggcccccccacccccagccaggcattcccactgtcagcggggcacacttccgtttgcttgaagtaatgcacacccaagggcatttgtgctgccaagtgcaggggatcaatagcatctgggcagtctcctgtttggtcaatatcaaatctaactggacttcctctagccttcttaaactcagctcctttcttcaaagaaaaatataaagaaagcaagcatttgtggtccctggggattttctttatttcacaagggcacaatttgaaaaccctagatcaagctttaataaactgagaatagccattctcaaaagtaaaaagattcaagttaatctcaaattgtactagaaatttcatggccaagctaggaagcatctatctatctatctatctatctatctatctatctatctatctatctatgcttatatatatctatatataattatatagatataatatatccatatataattatatagatataatatatccatatataattatatagatataatatatccatataattgctattatatagaaacatatataatataaaattatgcataattttaattatctgaattcacatgatttagaaataaaaactatataaaaaggtatatagaaaacttcacttccactcctgttccctcttttctgtgttcccaatacacccctattggtaaccaattttttttctttctattcccatagaatttatgtgcttacatctataaagaaatgaaacaaggaatacaactaaggtcgaaccccatctcagctgtaaataacattcatgtattcttggataaatgaactaattaggataaagaacgttctaataaaacagtcatcaaagaattacattaatatcattttcattatataacaataattacgatgacatttattctggactgagataacacttaaggcaagaactaagaaaacttacctccatttgtattttttgttgacaagaagataatgggtgaatgattaaaagatgccaagcacagtagattacattacgataggattcttggctgaaagtggtatgaaaatatagaagaagaaaagccaatttaaaatgttcaactactaaagaactagctcgtttatttttataaatgaataaagggtgtcaaattgttgtgatatttaaattgtaccggatatgtttaaaatagtgatgtaacagtttttattttaaaataccaatatttatatgacaccagcaaacacatactttgtcaagtatttaacttcccatgaaaaattttagatgtcaacttagatgggtgaggggacacatgatttttcaaaatacttttgggggtcacatgagcagaatactttgtggaccactgctttaaaacactatttctctaagtacggttgagggaccaacttacagaatcacctgggaagggtggctgactttttaaaaatgccgatacctgaaccccatccccaaattgggttgttaggtttggggtggaccccaaatagatcaattttcaacatgcactccaagtggctctcatgcaaaccatttaagaagcactacttaaaaaataaaaactagcattttacagtattatagccatggctgaagagggaaacaacctcacatacatacctggactgaggatagaattgaaataaaagctaaacaagagccggagctctcaaaatagcagcacccgtggaggaggctagaaataggaaaaggtcaccagggaaggaaggcacttttcctggaattcctagtacaatcaaagaatagaatgggaatggaagggcttaggcaggctaagcccactgtgggctttccactgtggttgcactttgggagaaaacagaagaaagtcctttcccatcttgaaccagcctgaggaaagcccgtgtttaggagggtcgaccgtcacaccaaaacaaaacatgccctaacagaagctgattgcaaagcaggtgacagagaacactttgggaagcactgctggaggctggcagaggggtagttgccatgaaaatgcccttgagagcctctgagaacactgttgggatggttgaggcacct

SEQ ID NO: 1563591 - DNA, 4001 bp, Homo sapiens
ttcgggaggtggaaggggatgctaggatgaggtcaagtctctggaaggcaaattcagaaacttgctccttccctctcacaccactaagataaatggtcacttttcaatagaaagtcactccgaagctggaatgtggctgattagtgtcctggacaggcacactcctaggacagggaccctctgagggtggccacaggctggcgcctctttcattttggctcctggtggcaggcaggagctcgtccttgaaggaagccagagaacatcttcctgcagctgccgtcttgcctcacccctagggctatttggaaaatgagccctttgcttcctgccacccggacttgttggcgctaaaaggacttcttgggatggcaccagctcatttccgacatgggcatcagccagggaaggctctgcagactgtggcgtggggagaaggaactccggcaaggaagacagacacaggtgtgctgcagaagcacttgggatactgtcctacgctcagtgctcccccttgatccctgccactgcagcctcccctttgcccttttttccttttttgaagcagaggacatctcagtttccactgggccttgaggtactaccacttctgaagaaaatgggcactcctggagccagaggaatcaataagcaaacagcgttttgtgacacaagtgctttgctttactcttttgactcatattaattaatcaacaagtatttatcaagtgcctactcagacagtccagcactctgggggacacaggagaagtgacaggtctctgccctcaaagagctttcagtctagctgggggagaaaagacaagtgggcatactgaacaagacaattacagtgctaactgagactggtagatgagatctacaactaagttccaacttgggtgttcagaagatggggcagagaagctggagaagactccatggaggaagtggggattgtactcactggccaagaaagggcagagttggggagagaggcaagaaccaaactctgtccataggtgcattccatcttcctgcaggtggcccagctatgtggttcataggtgcaggcatatctccaggtgtggctggagcacattcatccctgggttgtccctaactgagctggactaactgcccttaactgccttcaattctgcaagcagccctttcctcacaccactcccaggtatcttgggacaggggagaaacacctccattaacagaccagaaggccattttacaattcaaatggaagttgttccttccctcctggggtttgcctttttcagtgtctgcagctcagtccctctgaaatttgctaagtgcctggagacttgggagtgacactgaaggcaagcagtgatggatgacaggagctcagctgtccatgggtcacatgactatcctcctgggggaaacaggcaatttgactttgaaagatgtttggcttctggtcccttcaaatagggcatccctgaacaaaattgtgaagcagccaatgcttatcccccaccccccgccaccccacgaggtttgtttctgaggcctgctatttgcttctgttatttgccccaaagtatgtagtgccttcattctctccccttcttaccaaagtccccaaaggcattccctcaccttgtgccaggcttgccctctctatttagtgacctgggtaaaggcctagcctttctcttctgcctaatgataacaacactttatattcgtgtggttcttttcatttttacactcattacttcatttgagaaaagatgctttcacatccattatctcctctgtcctgccaaatacgctaggtgactgttcctcctccatcccagccttctaggtaggagatgaagaggcacagacccacagtggctaagcacattggtggcccagctggggccacatctctatgctaggacccacaattgcagcaccccctacctgctcccactcacggtcctggaccctctggctatccagagtctccattgcaagctgccccaaccctacagtcagcagcactctacgtcctagcccagcctgtatgctcagcccacatcataattaacctgtctctgagcctgttcactccgtgttgttgggagaatgaaatgagatcatggttacagaagcacttaggaaggttaagcatatcacacaaatgtagaggtggcgatgttattgatagcattattcggggtggctggaggagcagagaaggggagccaaatataaacttcacccgcttcacacagccgaagccctacccccaactccttgcctctaagagacagccccgcaacgtactctgtccgctcattctcccagcagctctttccctgacccaactacgagacaacctggctccctctagatgccctgattcctccgtgggctaaactgatccctccatcactgtccaaagagggactggtagctcgagctcatgctaacaactgttgctaggcagatgtggctaaaggacaaatgaaccgagaagaatatggaatgattctaagctgatgctctccctacttgtgctctcatgcaggaagatggaaatgtaacagctaaatttccaggcatccacttttagttctccagccctctttgcctttggctcctttttctttacatttggttggctccttggggagtcttgtcactcccctcaagactggcaggatttggaaccatgtggggccaattagccctctgattccggtaacagaagcctgactctactggaagctctagagatccagcatggcaggctagcagctgggcccccatgagatgcaacattcccctggtggcagagatggcagcccatccccagcgctgtgaagtagctgctctgtgtgcccttttgtaaggagcttgggcacaaacctttcttcctgtaaaggagtacttgcttgttattttggctagctgctccttattctagtagtgttgctcaaactttaaagtacatacaaatcacttgggagtattgctaaaatgattctgatgcagtaggtctggagcaaagtctgagactctgacaattccagggtcgtgcccaagctgctggtccacagaccacactttgaaaagccaggactgaaaagagtgctatttttagacaatggaagagctacagtcaggtgggaaaactgaggtgcttttattccactgggttatggcattgaaggcctgggttaaaacataaatgttatcttttgtggacacataaattcatgcaaacaaaggacttgctggttgaatcagatttaccccaggagagaacagggagggctctaaactgacatgaaataagacagatatggttgcactgaggaaaagtagagagaagatctgaaagactgggcactgtttaagtccagctgaagagtttggtcagcaaaaggacagcctgagaacactggcatctgggaggaaagtgaggaaaatgctgaaaaaagggacagtgccgaaaacaataatatcagctgccatttattgaggacttactatgctccaggtgctgtccataaattatgtcaccccattttcactataacctcatgagctaggtggtattatgtccattttacagataaggaaactgagatttgggaagagagattaagtaatttgctgaaggatatacaactatatatattgtgtggcaccaaaatgtgaacccaggtctgcctaactccagggccaatcatcttccacaatttgtgccaagaacctgtgcataaagtaggggttttgttgttgttgttgttgttttgtttttgaggcagcgtctcactctcattgtccagtggaaccatcacagctcaaggcagcctcgacttcctgggctcagatgatcctcccacctcagcctccccaggagctgggactacgggtgcatgccaccatgcctggctaatttttgtgtgtgtttttttttttttgtatttttagtagagacagggttttgccatattggc

SEQ ID NO: 1563592 - DNA, 4001 bp, Homo sapiens
cctaggcagaagcatgcaggaagttaatagaatagtggtgtgaagcaatggccctctatgagatcagcttgaaagcaaacaattggccacaccacaatcatccactgcttaacacatcagtcttctgatctgcaggacaacacctcttcctgagctgctctaagacacaggtatttacccatcaactgcgtatctccagtctacttagagtaagctgcactgggcctttctgcctggggaaatctgctagtggcatgaagactgacccatgttagtagaaagggaaggtggagatgggcaggcagaacaaagacctgtagatgtcggagagaatggcaacatccaaacagaacctttctgaagtggtctaatgtaatttaataaagcaaagtcaacatacgtttctacctctgactattggaagctgctcatccctgcctgatgcaatcaacacatctcactctgacactcaggactgaaggaaaacctgggattattctgtccatattgcaagtaagtttttaagctacatcctggaaaaacccaactgtctacctcctacgtcctggtggtagctgctataaagagctccaggggcagagaaggttgggcatggttttctaagaccactcctattgggctcttcccaattaatgccacatagcaagcagcacaaaccttactctgtggctcaaacgaagactttggaagcataagcagggcagaagacctggaggagtgctctggccaggcaacacctaggcggcccaagcgtggaaatgttcctcttttatcagtactacccaaaaatgtctgaatcgatgatttagttttagctactgttttaacaacatggccacttagaagaaaatttctaaatctttcgaggcttaagaatatagttaccccccccccaaaaaaaaaaaggctgaaagtctttctcttctatctacatgacttcgccatctaggttaccgttgggagcacctggtcaatctaggagctgactttgtggaggtgtggaggtgtaatttaggagttgggggaaggcggcacttttggtctttgcagcttggaaggcaggcacccaagctccaagcacttctgggtttccctagcagtagcaattacaaccatcttctcttagccctgaattatacatgggaccccaaacaccgctggggcttttccttagggaaaacaaactgtcgtgaatgtcggtgtgttggtgagggcatgtatgtacctctctgtgtgtggtctacacccgccgctacacaagcctcagcagccagtgagaaataagttgaacgtggaagcccccggccacttcgtttgtcttaagccccgtcgcgctttccagcttttgcctctacccagcctcccgaaaaataaggcaccaagttgcccgcggcagcggccctgggtgcaaacggaacccgcgcagcccctacctcgaaagctttgcaatcttcacaaagctgaagacatccatgcaggcagctggggacccccgagcgcgacaactccgtcgccccttctcacgccagcaacagcagcctccgcagccccatggccaagacctcagtgcgcccggggctcgagtcgcggcgacagcgggtggcggcggcggccggagagaacctgcacctggaggcggcggctgctacccccctccggccgcgagctgcgtgtgcatccccgagcaggaccattgataggcacccgaggcaggaaaactcaatggagagggagccaggcagggcgcaagaggcgggggcggggagcgcggcccgggtctcgcgccccgccccgtgcgctctagccccggggactgccgggcgtccagagaaagcgaggcctgggcgagaggcgctgctctggcttcccggccctcggaccctcgtgccccacgcaccgaggagcgcagacggagccgggagacggcaggcgagctgggcacacgcgcacgcacccctcgcagcactgcagctgcctccctgcctccttctccaagccgagtccctgctcctctccccacccccacccgcccggggggagggggcactctcctgtcacccactgcgtgtgcctctagatctgaaggatctggtctaacagtctatggcacactggagaactgtgaacgctacccctccctccccaagccgaaggagagccgtgcaaccgcaggttgctcaaagcctcggtttgctccgtaaacaaaactagcgttcggaaggagcagggatgattgaggttgggtcgtttgtcaaggggaagggaagggagatgccaggcgcagcgggctcgattcggggagctcagagttcccactgcttctcccgaatcgctggggcgagacgtgaccactgggctggctgggaaggtgtgtctttggacagcagcaccgcgggagtgtctgccaaataagaaccggaggcatttgcgggtagggggatgaacacagctgctccctcctcgaggagcatagagcggagggtcccaggagcccgtgatgcggaggctaattctaaccgggctcagaatctaaggaaagagaaggattagaatggggtctgccacgcagagcgagctgcttttgcacactgagccttgggtgaagggaacagggaagaaaaaaacaaaacaaaacaaaaccttgccggagaagcaaaaacacagaaacataaacactcaccttaggcagagtaaactccaagttgcagccatctagaactcctcctagccttctcttttacataattaccttggataatcagccctgttcattaactcagttctacctcctgggaggctcaggcttcattgggcccctttttcttcttcctcttgaagtctcaaggcctcttctccacaatcctttaaaatttccccccagactgtgaaggtcagctggccgcactaagtgtgtgctctcccaccggcagcgttcacctggcggcagggccaccgcaaagaacagagagcacccccagaaatgttggaagatccagccagtgttccagtctagctctccgaggggattaagaaagaaataggtttaaagttcccacacttctgctcctctcctggtctgttgttatatttaaagtcttcagtattcaagcctagtactaaagcgttttttttaagcatttatttcaaaaactgaacataaaataaatagcaatctgcaaaatctaaatgacttaaaactcaggcataaaattacatgtttttgaatacatagttatcagttttcctgcagcttctattaaacaggctagtttaattgcatgaacgcagttactactcaaggatcggaaggggcgagagggaccttggcttttgaactctattgtttgtaaaataattatagtttgggtctgcactgtgctttataatttttaaagcttttttttgcattggagtctcatcgcaaccttttcatataaggcaatatatttagaaatcttttatttttatgccataatctattctcaacataccagacaaaaagatgttttgtgtgtgtgtatgtgtgtgtgtgtgtgtgtgtgtgtgtgtgtgtgttttaacgtagatcacataaggctacttgtctgatctaaaatatgtaaaagctccccattgtccgtcaagctaaagttgcgctcctgcaagggccaacaggaccctagatcccgtatcctttgatctttcttacctcaactattactgcccacttccctctcccgtttttctctgtccctcctcatcccctaccccgagcccctcctctctcacacacatacactcactgggctccagcaattctggacttcttgctatccttcaaactctacaggtaatcttcccaccttaggctctttgcaatggttgttccctcagcctggaatgctctttcctgggatatctgcatggccggcttctccaccctgtcaaatgtatgcaccaataccacttccaaaatgccccctctagaaagccaatttaaa

SEQ ID NO: 1563593 - DNA, 4001 bp, Homo sapiens
cttctactcattctttaatccactgtgatctgacttttattttcaattaagttcaacttatcatttttaatttcctgtttatatatatactagggcttaatgagagaaaaaattcctgcatttcctgcactccagtgttctacagcctattaaaagatccaggcatatgaagaaacaattgccatacagagtggcaagtgccattaacaagaaatgtagtataaatggaggtaagacaaaggagaaggtgatcagctgtgtttgagggtggctcttaggttggctggtcaagtcaagtcactgccttgacatttgggggcatttattctactttatatttattctactttatattcaatatcacaaatttgaccttcagctttgaccttatgtttttcagtccttcttttgagctgtttttttaaccagctttaatggaagaaatggtacaattgaagggcaatatgcaggaagtcaccccgtatctgtggggaaggcagcctaaggctcagcctattatccgtgtcactcagggtgagcttgccaaagaggtactctgccatactgtcccccagagcccccagcttgctgcccagaagcaagaatacttagcacttgcatgttttaaaaagataacttttcatgtcaagttaaagactgtattatttttatccctgcccaatctcattcccttccttcccttcttctccagaggcaaacgctaggatgaattccataccatgttttacaccgtaccatgcatacggacccacagataccatggcccaacacagcacaccccacccgaacccacccaccccacacatctcaccccaccgtaccccacctcaccccaccccatcccacacgccctcagagtttataaggggaagactaatgtattttccaggggcccataaaatacctttcccctccacccccgcagatcctgagctgcatgcagatggggcagagctgaatggaaagactgctgaatacctactttaaatctgcatggggatgtgccctgattcctaaaaggtgagagtgctgcagacacacatcggctggacacctttattgctttgagaacagataactttattgttaacaatggtcaaactgagaggagaaaaatgaagagaatgttctgaaaaggcaacatggacgtcccgcctggtggcgcgagcaggggaaggcaccccatggctgaggggcctgtctgggctcaggtgtgtttctggctgcggcccagggtgagcttgttaaagaggtactctgccaggcctgcttccggggaccccatcttgcgcaggttgctcaggtagccacccagctctttgatggtcttggcctgctggttcaggaagtggttctccaggaagtcgcaaagctgggggtcgccgttctccttggccagctggtgcagctccaggaggctctggttgatgttcttctccaggtggaaggcgcactccatggccttgagcccgctctcccagccttggccctctggcttcccgacgtcatgaaggcagatgcggccaccgcgcaggttgtgcagcctcatcagctcctgggcgtgctcccttttctcctgcaactggcacaggaagtagcagtcaaagtgctccagggccgcgtcgtcctggtcgaagtagaaggccatggacaggtacacataggatgcgtggagctccaggctgatgtgggtgttgatggcagcctcacagctggggtggtggtaccgttgcacctgcgacagcgggcccagggcgggcagcgcgggcgctgggaggaggggaaaagcagtgggtttgccaggggcccggagcgggtagcggcatcggcgtgggcagtggcggcagcggtggggtcctcggagcaccaccatggtggacgacagcggcggctggtggagggcggggtcctccgggcccggcggtagtgtggtcgctgattctgtgaagggaccagaagtgggcggtggagaccgttatggggggaggggcgcacgaggtcgggcgggtgtgggctggtgcggagccatgcgggacttccgacaggtgggggtgggggagcacgctgagttccatcggcagcccggggaactgggcgctatcagacctctgcgctacgtcaattctgcagtaacttttctagtgtgcaaggacttttgcctgtcccctgattgttcccctctatgacagcttgttctcattttataaacctcttgtctttcttaaactctgagagtatgttctggtaacgttttcttctgtttcctgtattatatcctttttttccctcctctagaattagttctatttgtgcatcttcctcactttccttaaatatctggaaaacgtttgtctattcatgattggaatcaaggactgggttagcctcagtgataagcatggatcgaatgcacagctgtgagtctgggtgaccagtaggattctcccatgaacaggagggtggagtgtgttaattagggagtgctcatctcctttggagataaaggtatagagctcccaggcagagtaggaactattctaaatgcccaaagcatggcatttctctggcactggaaaactttagtggatctgtcttctaggtagatgtcaacttccctttaaatgctcacccatgtctgctgcaccctgaagcttaattctttctgcaggagagatgactccacatgataaggaatgtgatttcagatatgttttcaggatcaaagcttaaacaccagagtaaagactctgtttttaaaatttatctcgaaaagccctctatgttcacagttttaggtactcaataactaatccctgtgtcttccctgctgaatttgaaaccaattagtagacacaggactcagctcactgaagagcaagcttacgtctgtagcaaaatgaacttgctagtacttttcaaatcttccaattagagaaactcactgtggcagaatgacttcatcaaaacttatttgttttcatcttgatccacaggtaaccatacgttttgagctacccttgtgatttgatggggtcttgtactgatttctggctattggaatatgaaaataactggtgtatggccaaataaggcctagtttataggacacaccctgtgcaatccatgtctcaagtgaagaagaggaacagaccctacaatatgacatatccactttggagaaggagcctggaactttggataacatatggacaatgtcccctcatcactgtcaccaccaacctgcactggaccttgataaaaacagaaaaataaaaatttactttaaaagctaaaaagatttggaacatttgttacaggagatagcctctcctgactaatcaaattagctagtcaaagaaggtactggataaccacaggctgttatccagtcctgtagggtcctatagacttatggcaatggagtgcattccagaacacaccctgtcagtgggaaggcagatgaggaaaaggagaggtttagatagctctgggtcatcacactttcttccttttgcttactacactatacacacacacacacacacacacgcatatctcaatcactctcctttttttccttctggagagtgaaatgtaaaatccctcattggccagtgtggcaggttacctctgtaatctcagcactttgggaggccaaggcaggcagattgctggaacccaggagttcaagtccagcctgggcaacatggcaaaatccactctctacaaaaaaaaaaaaaaaaagaaagaaaaaaaaccacaaaaaattaggcatggtggcacacacctatagtcccagctactcaggaaactgaggtggaagaattgcctgagcccaagaagtcgaggctgcagtgagccgtgatcccaccactgcattccagcctgggcgacaggagtgagagacttggtctccaaaaggaaaagaaaaaagaaaaatccctcatggactcttgaggatcaaggaaaaatgttttcct

SEQ ID NO: 1563594 - DNA, 4001 bp, Homo sapiens
ttacctgctgtgcttgaagagaagccactgacagtgaagacatgtggtggatggatggtgcactctggggatttccagccctaaggccttcttaggtattcagtgccaactcaggcaacagtgtgactgtctgcttcagggagagtacctgaacagaggggttcaagtgtacaggtgttggctgccttcctgtgaggtgccctactacctcatatagtctgttacttattctgaaggcttctttcataagagaaggattttggctgaggtttagaagctgtccccaccctaggctggaaggcacacctgtaattaggagagagactccagtgatcagggctgtctttaagagtgttgggggatttccctcccttccagggctggttatttggctagattcccagtctacccacacaatcttctttaacccgttgatatacttgcagggtaacagaaagaaaaaggaacatggcatcagaagatcgaggttcatgtccagattccacaacttcttgcctgtatggcctccctttttgtcactaataaagtcatgatacttgtccttccttcttcctgagattcttgtaaaaacaaagtacaacaatgtaaataaaaggacttggacttgcaaagtgccattttagtttgtcagccccttggctatggggaagccagcttaaggctcccactacaactgtcacccaaagtgagcttgccaaagaagtaccctgctgtgctgtcacccagagcccccacttgctactcagaatccacaaacattaacattggcatattttaataaactacaagttttcatgtaaagttgaagaccctttgtttattttaatccttgcccaatcccatttccttcacttcttccccagaggcaaccactatgatgaattccagaccacgttttacactttaccgtgcccatgcacccacagccaccagggcccaagagtgaccaccccaccccatcccaccccacataccctggtagtttacaaagggaagactaatgtgttttccaggggcccataaaataccattccactccacccctgcaaatcctgagctgcatgcagatggggcaggggtgggtggagagactgctggatacctactttaaacctgcatggggatttgccctgattcctaaaaggtgagagttgcaggtgtatcaaatggacacctttattgctttgagaaccagataacttttttgctaacaatggtaaaactgaaagataaaactgaagagaacgttctgaaagggcaacatgcacgccccgcctagtggcctgacccagggaagggaccccgtggctgtggggcccatctgggctcaagtctctttgacgcggccgcccagggtgagcttgtcgaacaggtactcagccaggccggcttccggggaacaaatcttgcgcaggttgctcacgtagccacccagctctttgatggtcttgacttgctcgtgcaggtagtggctctccaggaagtggcacagctgggggtcgcccttctccacggccagctggtacagatccagcaggctctggttgacgttcttctccaggtggaaggcggactccatggccacgagcccgctctcccagccttggcactctggcttcctgatatcgtgaaggcagatgtggccaccgcgcaggttctgcagcctcatcagcttctgggcatgctccattttgtcgtccgacaggcgcaggaagtagcggaagaagttctccagggccacgtcgtcccggttgaagtagaaggccatagacaggtacaggtaggaggtgtagagctccagcgtgatgtggctgttgatggcggcgtcgcagttggtgtcgtacttctggcgcacctgcgacggctgggcggtggccatggcgggcagcgcaagtgcaggcgagcacacgggcgaagtcggtgcggtagcgagggcagcagctgaggtgacaagaatggcggatagtgaaaggcgggtgtgcgatgaaaccggaagtgggcagtggaagtgggcagtggcgaccgttagggaggagcgcgctctgtcggtggggggaggggcggcgggggacagagttgcggggcaagggggtgggggcacaagcgctgacttccgtcggaaatcccggccacttggcgctgaatgtttcaagaccatcttttaaaaataactgctctaggccgggcacggtagctcacgcgtgtaatcccagcactttgggaggccggggcgggcggatcacgaggtcaggacatggagaccaacctgaccaacatggtgaaaccccgtctctactaaaaatacaaaaaaaattagccaggcatgctggcgcgcgcacctgtagtcccagctactcgggaggctgaggcaggagaattgcttgaacccaagaggcggaggttgcagtgagctgggattgtgccgttacacgccagcctgggcaacagagcaagacttgtgtcaaacaacaacaacaaactgcactattgagatacaattcctctgccataaaattcaccctctgaaacatttccatggtttttagtatattcatgaagttgtgtaactatcaccccatcaccaaaaatctaatttcagaacgttttccttattccaaaatgaaatcccctacccatgagtagttactgcccatctcgccttcctcactggcccgacaaccacaaatgaaatctctgtttctagagatttgcttactctggacatttcaaataaatcatactatatgcggcctttatatggcctctttcatttagcataatgtctttaacttttgtcttttttatggctgaattatatttcattgtatggatataccacattttatttactcattcatcagtcgatgggcatttgagttgtttccattttgtgactattatgactaatgcagctatgaggatttttataatagacatatgttttcaactcccttgggtatatacctgggactagaattgctgggtcatatgttaagactctgtttaacattttgaggaactgctagactgttttccaaagtcccctcatcattttacatgcccactaacaatgtatgaaggttccaacactgtcattgtctttgttgtttttctagtggatgtaaagtggtatctcactgtggttttgatttgcatttccataatggctattgatgttgagcatcttttcatagtcatttgtatcttctttggagaaaactctattcaagtcttttgtccattttaaaattgggttatttgtacttttattgctgagttttaagagttctatatatattatgtgtgccagtcctttttcagatatatgatttgcaaatattttctctcattctgttttttttttcactttcttaatggtgtcctttgaagcacaaagttcttaattatgttcaatttttctgtttttctcttgtcacttgtgcttttagtgtcctatctaagaaaccattgcctaattcaaggtcataaacatttatgtccaggttttctttgaataattttacagttttagcttttacatttaagtttctaactcattttgagttaatttttgtatatgatatgaggtcattgtccaatttcattcctttgtgtgtggatatccagttgtcctagcaccatttgttgagaagaccattctttctccactagatggtcttggcacacttgtcaaaaatcaattgaccatagatgtatgggtttatttcgggactcccaattctgttctgtcaatctatgtgtctaaactgatgctggcacaacactggcttgattactatagctttgtagtaagttttgaaattgggaagtatagtcatccaactctgctcttctgcagagattgctttggctattctgggtcccttgaatttcctatgaattttaggatatgcttgtcaatttcgtttttttttttttttttttttttaaaaaccagcctactgggattttgttaggga

SEQ ID NO: 1563595 - DNA, 4001 bp, Homo sapiens
gccgacagtccactgatgccggccagtatcagtaaccagatgaatgggctaccacctacctctgtagggcggagagaaccacacaaactaaactgggctcatctgacccacatgacagctcacacagaagatgggctgactgaagccctggcactgaccccactgaccttatagggcctgaaggacccaatcactgaactctcaggctccactgcttatcacacagaccctcctcgcccccatcacttaccccacagttcccacaaaagaccccataaacccaacattcatcccatagatggcccacttgtgaacctgtccacctcccatcactgtcacccacactccacacattaaaccctgcaactgccactatcaacccttctctgctcatgtcatgcccattaaaatctcactgactgtatccccagttgtccccattgcccctagattcatatagtcctattagcccccattaatcccttgttttccacctttatcctaatactacttcattgtacctcccactccctatatctctctcgtttcaccccattcgccattaatcccttagatgattaggcccctttattactacatccttatgaacctctaacaatgcctggagaatcatggtctattagctccccattaagcattcaattactgatttatcagcccccattaactcagttttctccaatagacccttcatagatcacagcactagcctcctgccctgtaactctttcattaacaaacacgttaactgatcacacatcagttccccattctcccctcactgtccaccctgctctccatggatccatcactggatgatcacactccaacagtttactattcacctactatgtatcaacagaagttaacccccccaaccctagtttactattgccctctctttactcactctgtcccctaattcctcgacggtcatgccaccatagcccaactactgactctgactacaacaccatcagcctctcattatcttttctttcaccaaggccccttgatcatgacctccatccatctattattccccccacaacctcaccatcatccttgccattacgatgccccatcactttccattaacccgttgaatatcatacctccatcaatacctgggggatcattttcccatccatcactcgttatattctagttgcttactctgccatcccctcattaatcaatcaatgaacaacagttcgactaaaatattcttattagcccccattgattccccagtaacaccccaccctcacgctccacccaacctcccaaaacagccttctgaccacactccccgtccctcctcatcaatacctcaaagatgatagctccatcgggaccaccgggtacccctccaggcggctccgaccgctgcgtcccatgtccccacctcgaatccaccccgtctactggtccccttctgcagacaaaccttgggtctagaacccacccggtgccagccgcccgaaccatacacagctacggcgcccagggcggacctccctcctttccccgcaggcgggacagtgcaggcgtgcctcaatagcctccgcccgcattcctgtcctccgcgccccagggcccaccttagttttcggagcagggtggtccgcgagcagcctgtgcctcggcgagagcgcaaacgggcgacaagtcctagggcttcagtttgtgttcgtagtccacccgaatgcccgggggggcaagcctatgggctgtcgcagcgtggcaaactcggcatcgtggatcgcccaggttccggcgggccgggacctgatgtgaacgtacaacgtgagccccgtcatctattgtcgacgtatccggggctcgcgaactgcgtttcccggcatgcaacgggcacggccaaagcggctgaatccacgcactgcgtggctgcagcgacgcgacgcgcaagttgccagcgattctttgttctttttcttccgaggccaagatcgatttgctcccccgcccctcccttcttggaccgtgcttgttattgagcctgtaaactacatttcccaagatgccacgcgcaagatggcgcccattcatttttcgcgtgccgggaagcgaaattaccactcggggcataaacgtgacagtaaggaaaatgcgttcttgaagtgcgcgagcgcgcggaggctgctcggctgcaatttcagatcgcactacagctaatgcatggcgctgcctgagttttactgcctcagaacttcagtttccctgtctggaaagtggggataatcaatagtatagacttaacagcattattgggagggttaaataggtgtagcttagccactctctgggcttttgtaattctgtgatcttcaaatattttaaattccatcccagacacaaaaaaagactatacatcctgacccagtggacaaacggaaaaataatgaaaacgtttatcatagtgtttaccatgtgctaggctctaaatgccctcagtggtgtgctggtaaatggttaaccactggctggggcgggggtggtggcggggaggggtggggggaagggaggctggtttctagcatttaccaatttccatggcttaggtacaatcttcttgttagatttcaaggtaccgacctgtggtcactgaacagggagtttaaaagagatgcagtagtgcactatcatgtattatttttaccatacagataaaatgggggtaaatgacctcaagagcatagagaatagtggaatgtggtaaaattaggaagttaccagttttgagtaagtttatatcatttcatttttaaccatagctgtttaactttagggggctgaggtggaaggatcgcttgagtccaggacttcaagaccagcctgggcaatatggtgagatccccgtctctacaaataataaaaatagccgggcgtggtggtgtgtgcgagtagttccagctacttgggaggctgaggtgggaggattgcatgagcctgggaggtcaaggctgcagtgagccttgatcttgccactgcactccactgtgggtgacagagtgagaccctgtctcaacaaacaaacaaaaccagttgttaaaccagctgtttaacaaccagtttgcaaaatttctgaaaattgaacagctcctcccaacctgtataagttggctccagcatgtccttccctttgttcattcattttaatcctggcaacatgcatatgagtattagccaggggcggcggcatgtgcctttagtcccagctactccagaggctgaggtgggaggatccctggagcccaggggtttgaatctagtctgggcaacatagcgagaacccatgtctctttaaaaaataaaagggctggatgcagtggctcacgcctataatcccagaactttgggagggcgaggcggggggatcacttgaggtcaggagttggagaccagcctggccaacatagtgcaaccccgtctctactaaaaatacaaaaattagctgggcgtggtgatgcgcacctctagtcccagctactcaggaggccaaggtgggaggatcacttgaacctgggaggtggaggttgcagtgagccgacatcgtgctactgcactccagcttgggcgacagagtgagaccctgtctcaagaaaaaaaaaaaaaacagaatgattgattccttagcacacgagcttcaccaggcagggattcctgttctgtcatgttcactgctgcctcccagtgcctggaacaggggtggcgcacagttggtgttcaataaatgttggttgaattcatccttttgttgcttcgttccttaattttttccccagtggtgcgtcctgcatttctatggagccctgggtggaggcgtagagactctgagaaccagggaagaagccagagctttgtcagcagaactcaagggcattgtgggactgtgggaacatgactcccctgcagaggcgagcgagtgtgagaaaggaagggttcgagccaccagg

SEQ ID NO: 1563596 - DNA, 4001 bp, Homo sapiens
acttctatcataaaatggcatttgcaaaaaaaaaggcatagaagagtgggtcattattccaaggtgcatgtaaaacacaaatcaaaaaactcatcgttatacttatcaagtggaaacaggtaaatatttcaattaaatctatgtaagatgaatttaaataagaatctaagaaaaaacgcttatgcacaagttaagtaccctcactaactccaaaatttctctacagtcacgaacattttcaaaacagtcaaatttgtttctgccccttgttatctggctagtttttttattataagaacagaattagatccacagtagccattgtgttatcacgtggtctgaaatgttaactggtcaggctgatggttattaactacttcttaatggactccacaatattatcaagtaagcaatcagacctttaaacacagaattaacgttctacagctctttttcaaagagttatcataatctgaacgagcccacaaaaaacagaatcatctgtatcatcaccaataattcatactgagcattttacactgctctgtacagggctgacaatactagaggccagttctaccgtgggagtttcttaggttttttcagcagttagcactgaatgaaatgtaaaaatttacatataattaactcatatatttcttcctatctactatcactgaatcagatccacgacatttgctgaacatgagaatggggaaattatataaagaatcaaaagaaggatgaggagggagaagaggaacagtggtgggcatgggggaggggatcgccaaaactcaacagggagcctgggaatgtagattacatcaattttaactcagagaaaagcctcttctggaattaacagtgtagacctactgcctgtgcacggtgattcttgcccatgtatgaaaggacagcagtgtcaggcccccaaatgaaatttaatgaaaaagacgttgttctcaccagccagtaacgccacccattacaatctgggtagctactgagtatttttctaccataggtcccgaactgtggccaaacactcgattccaccactggtgtcttcttgcatactcagttaaatccaacacttcataagagtcgtcatcactttcatagtcttcaaaatagcaaaatgcaaaaaataaatgtagagtcaatcaaaagtcagaaatgttctatacatctttttaaaaatctgttacaactcattagttctggcctacagctaaaaatgcccacatagaaactactgactttatttaactcaattcttgagaccagggcctcaagagtaaaggaccctgcaacaatgacccccatctgctttcccaaaggcccggggaccagcctggggtcacgaagccagggccaactcagaatgacacagtagtgaggggtcacccccacctccaaaccttagtagggtcaaggtcagagcagggtccattttcatcagtgggaggaatgggggtggggaggggtcctcctgagagaactagtctggagctcagcgaaatcacttgagtccagacgtttaaaaaaagaaaataatacatttgaagatgggagatgaagggccggaggtgaaggtaaggcaggaggcaggtagggctgtgctgggggtgggggtggctctccgcttgagttccgcagagaggggaggaaaaagtctagctcggagggggtgctcgaaggggctgccttaaaaaaaaaatggagctcgaagaatcctagggcaggggaaggaagaggtgccataggagcaaggtcgagagctgtgagccgcgtcccagataccacttcgggccctggccgctcaccttggggaggggggttccgggtcgccatgataccgccagcggccaattctggagtggtccccacccgccctcctctccctggcactttaagggccgctctaggccaggatggaagtctatggtctcttttttcctccttctcctactccaggcgcgtagtcctgtctccgcccccttctctcagcgcaggaccttctgccttctgcgcaggcgcgaaactccggaatgtggggagggccgggcggatcatagccccgcgagagcgtaggggacttgtagtccgttgccttccgcaactaggaagggggagggaccgcccctcctagaatttccgtaacttgaatttgattattttgttttaaaagagccttaagggctgaaggaatggggtgaagggcgccacatggtggtacaaagggagaaccagctgggtattgacaaagactctctccttgaccaaactttagtcaggaggctcctctgagctgtttttgactgggtctcctccttgggtcgtctttgacctgcctagtccatttgtggtaagaatgcagttaagtcagtttagtaagaactcccccacccttaatatcgaatcaccctcaatatccgatcgaattcctcaaccccactcttgatatctgatcactctgccaccagcaaaaatcctgttaaattggctttagcaagaatacccctacccttcatgtctactcttggtaatcttccacccattgatccattcactctgatcatttactataaattccctgctgtattcagagttgagacccatcactcacccctattgccatagtctttgttttatgagaaaaggtattgctctgtcaccaggctggagtgcagtggcgctatcatggctcactgcagcctcaaactcctgggcccaagagatcggcccacctcagcctccagagtacccaggactccaggcgtgcatcaccactcccggctaatttatttttattttttgtggagagtaggtctccctgtgttgcccaggctgctcttaaacttctgggctcaagcagtcttcctgcctctgcctcccaaagtgctgggattacagatgtgagccaccatgccaggctgtattgcaatagttgtgatacctattgcagtagtcatgaacaaagtcttccttaccattttaagaagtgtcccataatttttttgtcaggcccatcacttgcatactgtcagaataattttttaacagtattttgaacattaccagaattcaaatgcttgaggaaaaaggcttgtaaaagataagagaaaccctgtttcaagccatacttttctaagggcgcaagcgctcacaaagggaccacaagttttctaatgccctgctgctagaagttggaatctgtttacctgctctctctcttgagttcctgccaggaatccaaaggaggtaaagaaaggcctagaaacctcgtaattcctgacctggcaagaggacataattttttagtgtcattcttttgtttgtttgtttgagatggaatctcgctctgttgcccaggctggagtgcaatggcacaatctcggctcactgcaacctccacctcccgaattcaagtgattctcctgcctcagcctcccaacatcccaaggagctgggattacaggcacgtgccaccacgcccggctaatttttgtatttttagtagagagggggtttcaccatgttgcccaggctggtctcgaactcctgatctcagtgatccacccacctgggcctcccaaagtgctgggatcacaggggtgagccaccgtacccggccagcatcattcttattatttaaatctgacagaggaacaaggtcaaggtcttcacccagaaaccccatgggattctatgaatacaaagccatattgatcaccaagcagctaacccaagtccacataaaccaacccagaaacttgtcttgaacttgcgttgcacccgcatctgctgtacaattaaacaaaagtcctctcagtattcattttaatggaaaaacaaggaattctggcataaattgcattactttaaaaattggcttgcatagatgcacttggcttttcaaatcctggcactttattatttctttttacaatatgcccatttattaatattcttatttattaattacttttaatagc

SEQ ID NO: 1563597 - DNA, 4001 bp, Homo sapiens
ggatacccaaatatagcaatggaagagaatccagaatccagaaatagatccacacatatagtcatttgatttttaataacttagcaccaaggtaactcaatgaaggaaacaacaaatgatgttagaactactatatatttgtgtttcaaaaaaaactactctcaacctctaccttaaaccatacacaaaatataattcaagaattcattcaggatacatcacagacgcccatttagcagaacaaaatatggatgtctgagtacctgggtactccatggcctctcaagtagttaaataatttatttttctaatgtaacaacaaaacattacagttttaacgtaatttgaccaagccccttagatcaacaggtggctccactggggctgcagtgagctatgattgtgccactgtgctgtagcctgaatgacagatctagtccctaaaaaagggagtaggggggaaggtagattaaatgcgagatatttggtcagtcattggtcaaacactgctaagcactatgacagacaaaagtcagccaatagcttcgtttatgagcccacaaaatcaatgatcacagttattatgtgatcatcactgtgataacaattgaaactcatcttaacctcaaaatttctcacaacaatttcctaggtgcaaatacctgatcaacctataagagcagtctgctcttataaaagtctataagagcagtctgctcttataaaagtctataagagcagtctgctctgcaggaaaatacataattatcacattgcacattccaccttcccagagtcatctaaaatttagcggcgtgctggtgaaatgcttaacagtcggctttaggcaagggctgatttgtagtgtagccaatttccattgcgtattcattcatcgtgagcatgacattactgaattgtgaaactactgaacccagagatgggaagagacgcacagtagagcaccatagtatagtatctcctccacaaagatacaatagatgtataaataacctcaaaagtaaagtaacaataaaacatggtaaataataaaagtgatgagtttttagtattttcactgcctttgtttttaacataatttacgtaattttacgtttatatgattgagttttcaatgatggctctgtttagcaatgggatcccgtgagtcagtactaaattaaatacaacctaaacattcaaaatagggtaagacgcataacttaaagacgtgctccactgcgaattacacggaatctttgactatgccgactaaacagaaggctattcctaagtaccatcccatatgtgctagtttttcaaaaccaacaataaagcagttggggaggtgccttgtacacagaatgacgccacgaggcatttgagatgaacgtccaaagggacaaagaagccagaccgcttccgagaacggggacagaatgtcttcgggcttctgcgccgggggcggcgccggaaggctgggtgagctccactggagacgacaccccagggtggttaggccccagacacgcgcgtgaccttggccggaccctgggagcggctgagccaggggcgatccccgagcgccctccccgtccccgcgccgcttggactccccggggagctcggtcgcgactggcgggcgcggagcccttccccttccggagcccaggaaggcggctccccgcggcgccggccgcgcgcgcgcccgcccttaccttgactggacgcggccatttcggtgagcttgtctcgcgaggacacacgtagaggatctgcgcggtaggccgcggagtggcgcgcagttgtcgccaccacttggcttccggcacgtggggcagatgtttccattcccacggcggcagcggaagagggagggccgggcgcgccgcggctgcttgcagtctccgcaagcggctacatcacagagctcagcgtgcggtgtcacaggccccgcggtcccgcccaacagatgcaccgagatgcgcgtgcgcagaaagcgtcccgggggtgaggctccctccctcgctctccctctactcccgccccactctcccccactttcccccctccacccaccgcggccgtcggggctcgctcgctcagtacctggaggcgagttcctgacgcgactgcgactcaatcctcgcctggtgaagaatattttacctatgactcactgaaaataaagacggctgagtgaccgtgtttgttcatgtaaacattgaacaaatatttatcggcttctgcgatgtgtcctactcttttagtggaggaagacacattttatttatgtatttaatttttcttttgaattttacatgcgagttatacttaataaaactcacttcaaaatataccttcaacagaaaatccagcaacagtttctattatgttagttaaaacagccagtcttttcctttacttttaaaaattattcataaatgtaattagtgaatgataataaacattgacatctgatccactgctttaggagtgacacaaatgaagttaactcaggctattttctttataatcattgtgctattgttttctttttcttttcaattatactgcttaatataggattttgtggcaccataggagttgagtaaaaataaaaggaataaaaatataccttatctggccgggcgcggtggctcacgcctgtaatttcagcagtttcggaggccgaggcgggcggatcacgcggtcaggagatcgaggccatcctggctaacatggtgaaaccccgtctctactaaaaatacaaaaaattagccgggcatggtggcggccgcctgtagtcccagctactcgggaggctgaggcaggagaatggcgtgaacccgggaggcggagcttgcagtgagccgagatcgcgacactgcactccagcctgggcgacagagtgagactgcgtctccaaaaaaaaaagaaaaaatacgttatctatgaagatttccaatttgatttctatttatcacaaatggccacagtactcctttgtactttaccacataccatattgtattcagtaattatttgtgaatatgtaattgataatattgtaggttttagagaatccttgaaaacatgaaaatttggtaatggggtctattttgattatttatttatttatttatttattttatttttgagacagagtctcgctcttgttgcccaggctggagtgcagtggcgcgatctcggctcactgcaagctccacctcccgggttcaagcgattctcctgcctcagcctcccaagtagctgggactacaggcacgtgccaccatgcccggctaattttttgtatttttagtagaggaggagtttcatcttgttagctaggatggtctagatctcctgacctcgtgatctgcccgcctcagcctcccaaagtgctgggattacaggtgtgagccaccgtgcccggccatattttgatttaaaatttagcaataatagataaaattttcaatcaactaagcccttgggccagggaatgctattccttaaaaagtgcttctatcaatatagcctctgactcattactttgttaatttttaaattgtatttcattcctgattaacattcccacccagattattaattatacaatctgttaactgtagaacctcaaacatgttggattgtactgtatttgtctggaagacacatttttaaaacattgtaatcgctataagagaagcactgggaaagaaaggagcttctatgcctgcagtgcctgaggagccctttaacagtgtgccccgcccctaagctactcatgcagtcatccccatcccagttagtcaactttattccaaaaaacttggtgttccaaatttttccttctcaaagcccacagatccaaaattcatcagcagttcccacaaacgttaccctcacaatgaatccagccatttttcaccctctccagtggtaccatcatagcccaagccgccaccatttctcacccccggttaacaggccac

SEQ ID NO: 1563598 - DNA, 4001 bp, Homo sapiens
taaaagtgaaaactgagaccacgtgtaatttgagatgaagcccttgttccaccagcccctgcacagtctcactgccccatgggacacaggggagggtgctctagtctcgggcgatggctgtcctaggaccacccctccctcccctcccatggaaatcctcatgctatactattcttttgtctttcctatgagtgcagaatggcggttctacaagctggacaattggggccaggtggggtgaggcagagctccttggtaggctttcgaaattgaggcaaagagacagtgttcaaagaaaagctaagtgtttgtatcgacggaacttgaagtgttagtgaagaggcagagatcaggcctcagatcctgcctttggaactcatttgttaaggcatgaacaggtctgaaaaaactacagaatgaatagcattccctgttttccccaagaagtccatctagacagtccctaaagagcctgcaactccaggattaagggctacattcagcggctaggcacagggttcagaaacgtcctgcagccgggcgtggtggctcatgcctgtcatcccagcactttgggaggccgaggcgggcggatcacttgaggtcaggagtttgagaccagcctggtcaacatggtgaaactccgtctctactaacaatacaaaaattagccgggtgtggtggtgcatgcctgtaatctcagctacttggggggctgaggcaggagaatcgcttgaacccaggaggccgaggttgcagtgagccaagatggcgccactgcaccccatcctgggcgaccagagcaaaactccgtctccaaaaaaaaaaaaaaaaaaaagtcttgcaagtgcatatgcacaccaggtagagccgggatgatcctggcgcactagcaggagcgggaggaggagctcaacttagcagagcctgtggggccctgcaacaattagttggaaaagctgaggcatggagcaggcacttcctggcttttaagattggggcctgggagatactcaccgatgcacccatgatgatgaatatgtgtgtatccgactgatggaaggcatcgccctggaaaagctcttcccgcaggatcccgcacacctgggtccggctcagggccacctgctctgccatgacgctgtctggtggaagaaaggctcgttaacaaggcagaagaacaggagagcattgagaagttagcccctttcttgagagttcctctggggtctcacaccagggtgacacctgattgcccaaatcactccttgtgaacggctgggcattggggagtggttgatgggttagaaactgctggctctgggctccagccactctctcctaggcagccttcattcagggtgtacattacaaaattactcaaagcattggtgtattccgactacagcatcaattctggacaaccgagtaaaatccttgtggggcatggaactgcgtgcccaggaccatctcattcccgactgtagcgggaactccacaatgacctggagcatgggagatggtgcagatgctggagttcagctccagccctccccttgccaagctgggtgaccccggtcggcaagtccccttcgctctcggggtctcaggggctcaagagaggaggtgcggggtataaagggattggttaagaccctctcgattctgctcggttctcaagcacaacaaacagcgtgtattttaccgccgcgcggcgcagcgcgggacagtacgctcctccgcctgcgcggcgcccgcccggccggttacctgcgcttcgtcgtcgtcgccctccgcgctcgcagccccgaagtgtacgaccgtttccgggggctgagccccgccggcccatttaatcggcgggggcgggggcgggcgcctgggctgagcggacccgcctcaggcgaggcgtgcggggcggggcctcggccaccacccctcgtgcgggcggggcggggcgagggcaggtgcgcgcgcatcccaggccagcccctgcctctcgggcacctgcgctggaggccggcccgccggctgcctgccatacccgctgccgctgctctgcatccccaattccggcgggcacgggtgcagctccgcgtagtgctcccgcatccccatcgccggcccggccccgcccctactgtccggtttccccgcctgccccggcggcctcgcgcgctcgcggagggctccacttccgccggcagcgtggccacgcctcctctgggctgtccctcggctcctgggcggggccttctgccgcgccactcccccgggaaccctcgcctgttcgcgggtcaagccggccctattgggcagtctcttcttgattcctcccccggagagggcggggcggccgagcgccccgaggctagacgccgccgtccgagagacgagggggcgtgtaggcggtgacgccctgcaaagtggccggcgtgcttatcattaccgagcttccgcgggcctgcagagcctggcggactcagacttctctccggagcgggatgcggccctaccgcggcctcacacttctcgccggcttcccgagttctcgggggcggggcttgtgtttttacttccggatcccacagctatgacaccggaagccggaagcgtggtagggaagggcgaccgcgaaactgggactttctcggagcgccggggccctaccagcgttcacagtccgccgctcccacccttctcacgtctgacggactctgctgacaggtgtggtccttttccccaaagacagggttccatccgtgggcgttccgccgcctccgaaacttcccccggacgttcaggctcccccctcttttttgggccccagcccgttcctgctccgcgcttctggagcactggccaaggcgggccgattcaggacccaggttacttgggcggcgagctggactgtttctactcctccctcctcctccactgcggggtctgaccctactccttgtgtgaggactcctctagttcagagacatattctgttcaccaaacttgactgcgctctatcgaggtcgttaaattcttcggaaatgcctcacatatagtttggcagctaggtatctgatttcatatgcctgtttgctcgttttgcaagacaacatctgcctatcgtcatactgtttctgtgatctgagaatgaatgggctctcctggcacattagaggaatagcacggaggtcactatagctggagcagagtgagggaggggagcacagttggagaggaagggatggggaacccgatggtacagggccttgtaggccgttgtagggagattggcttttacgcagaaggcaacggggatccatggtagggttctcagtagaggaggaatgtgatcggaattacgtcttacactgatcgttctagcagtggtggggagaacagaccatagtgggcaagggtaaaagaagggtggcgtggtaagaggtaattgcagtaatccagctcagagacagtgctttgagcattttattattggaaatttcaaaaatgtacgaaagtagaaaaatgagtatagtaaatctttttggtttgtttgtttttgagagatggagtctcgctctgtcgcccaggctggagtgcagtggcatgatctcagctcactctaacctcctcctcctgggttcaagcgattctcctgcctcagcttcccaggtagctgggactgcaggcgtgcgccactacgcccagctaatttttgtatttttagtagagacggggtttcactatatgttggccagtctggtcttgaactcctgacctcaggtgatctgcctgcctcagactcccaaagtgctgggattacaggtgtgagccactgcgctcggccagtatagtaaatcttacattcacagctaccaacttcaacaattgaaggtatcaacttctgactaattttgtttatatccctcgcaatcctctcccattattattttatttctttttctttctttctttcttttttttttttttttgagacagaa

SEQ ID NO: 1563599 - DNA, 4001 bp, Homo sapiens
cactttgggaggccgaggcgggcggatcacttgaggtcaggagtttgagaccagcctggtcaacatggtgaaactccgtctctactaacaatacaaaaattagccgggtgtggtggtgcatgcctgtaatctcagctacttggggggctgaggcaggagaatcgcttgaacccaggaggccgaggttgcagtgagccaagatggcgccactgcaccccatcctgggcgaccagagcaaaactccgtctccaaaaaaaaaaaaaaaaaaaagtcttgcaagtgcatatgcacaccaggtagagccgggatgatcctggcgcactagcaggagcgggaggaggagctcaacttagcagagcctgtggggccctgcaacaattagttggaaaagctgaggcatggagcaggcacttcctggcttttaagattggggcctgggagatactcaccgatgcacccatgatgatgaatatgtgtgtatccgactgatggaaggcatcgccctggaaaagctcttcccgcaggatcccgcacacctgggtccggctcagggccacctgctctgccatgacgctgtctggtggaagaaaggctcgttaacaaggcagaagaacaggagagcattgagaagttagcccctttcttgagagttcctctggggtctcacaccagggtgacacctgattgcccaaatcactccttgtgaacggctgggcattggggagtggttgatgggttagaaactgctggctctgggctccagccactctctcctaggcagccttcattcagggtgtacattacaaaattactcaaagcattggtgtattccgactacagcatcaattctggacaaccgagtaaaatccttgtggggcatggaactgcgtgcccaggaccatctcattcccgactgtagcgggaactccacaatgacctggagcatgggagatggtgcagatgctggagttcagctccagccctccccttgccaagctgggtgaccccggtcggcaagtccccttcgctctcggggtctcaggggctcaagagaggaggtgcggggtataaagggattggttaagaccctctcgattctgctcggttctcaagcacaacaaacagcgtgtattttaccgccgcgcggcgcagcgcgggacagtacgctcctccgcctgcgcggcgcccgcccggccggttacctgcgcttcgtcgtcgtcgccctccgcgctcgcagccccgaagtgtacgaccgtttccgggggctgagccccgccggcccatttaatcggcgggggcgggggcgggcgcctgggctgagcggacccgcctcaggcgaggcgtgcggggcggggcctcggccaccacccctcgtgcgggcggggcggggcgagggcaggtgcgcgcgcatcccaggccagcccctgcctctcgggcacctgcgctggaggccggcccgccggctgcctgccatacccgctgccgctgctctgcatccccaattccggcgggcacgggtgcagctccgcgtagtgctcccgcatccccatcgccggcccggccccgcccctactgtccggtttccccgcctgccccggcggcctcgcgcgctcgcggagggctccacttccgccggcagcgtggccacgcctcctctgggctgtccctcggctcctgggcggggccttctgccgcgccactcccccgggaaccctcgcctgttcgcgggtcaagccggccctattgggcagtctcttcttgattcctcccccggagagggcggggcggccgagcgccccgaggctagacgccgccgtccgagagacgagggggcgtgtaggcggtgacgccctgcaaagtggccggcgtgcttatcattaccgagcttccgcgggcctgcagagcctggcggactcagacttctctccggagcgggatgcggccctaccgcggcctcacacttctcgccggcttcccgagttctcgggggcggggcttgtgtttttacttccggatcccacagctatgacaccggaagccggaagcgtggtagggaagggcgaccgcgaaactgggactttctcggagcgccggggccctaccagcgttcacagtccgccgctcccacccttctcacgtctgacggactctgctgacaggtgtggtccttttccccaaagacagggttccatccgtgggcgttccgccgcctccgaaacttcccccggacgttcaggctcccccctcttttttgggccccagcccgttcctgctccgcgcttctggagcactggccaaggcgggccgattcaggacccaggttacttgggcggcgagctggactgtttctactcctccctcctcctccactgcggggtctgaccctactccttgtgtgaggactcctctagttcagagacatattctgttcaccaaacttgactgcgctctatcgaggtcgttaaattcttcggaaatgcctcacatatagtttggcagctaggtatctgatttcatatgcctgtttgctcgttttgcaagacaacatctgcctatcgtcatactgtttctgtgatctgagaatgaatgggctctcctggcacattagaggaatagcacggaggtcactatagctggagcagagtgagggaggggagcacagttggagaggaagggatggggaacccgatggtacagggccttgtaggccgttgtagggagattggcttttacgcagaaggcaacggggatccatggtagggttctcagtagaggaggaatgtgatcggaattacgtcttacactgatcgttctagcagtggtggggagaacagaccatagtgggcaagggtaaaagaagggtggcgtggtaagaggtaattgcagtaatccagctcagagacagtgctttgagcattttattattggaaatttcaaaaatgtacgaaagtagaaaaatgagtatagtaaatctttttggtttgtttgtttttgagagatggagtctcgctctgtcgcccaggctggagtgcagtggcatgatctcagctcactctaacctcctcctcctgggttcaagcgattctcctgcctcagcttcccaggtagctgggactgcaggcgtgcgccactacgcccagctaatttttgtatttttagtagagacggggtttcactatatgttggccagtctggtcttgaactcctgacctcaggtgatctgcctgcctcagactcccaaagtgctgggattacaggtgtgagccactgcgctcggccagtatagtaaatcttacattcacagctaccaacttcaacaattgaaggtatcaacttctgactaattttgtttatatccctcgcaatcctctcccattattattttatttctttttctttctttctttcttttttttttttttttgagacagaatctcgctctgtcaccaggctggagtgcagtggtgtgatctccacccactgcaacttccgcctcctggattcaagcgattcttctgcctcagccgctgggactacagttgtgcaccaccacgcccagctaatttttgtatttttagtagagatggggtttcatcatgttggccaggatggtcttgatctcttgaccttgtcatccgcccgcctcggcctcccaaagtgctgggattacaggcatgagccaccgcgcccggcctctttttttgagacccagtctcactctgtcgcccagaatggagtgcagtggcacgatcttggctcaccgcaacctccatctcccaggtttgagcgattctcctgcctcagcttcccaaatagctgggattacaggcatgcaccatcactcccagctattttttttttttttgtatttttggtaaatacagggttttgtcatgttggccaggctggtcttgaattcctgacctcaagtgatccacttgccatgacctcccaaagtgctgggattacaggtgtgaaccaccatgcctggccaccactat

SEQ ID NO: 1563600 - DNA, 4001 bp, Homo sapiens
acacctaggtactcttgtgtcttaagtctagtcactgccccatcatcacacgccccacatatctctaagctgcgcagtgtccactcttgccacatcccctaaaggaatgaaccgcgtgtgataataggcacacacactcatgccttcccaaagttgatgaaatactaataaacttccctaagccagtctgcttaagatacaaaaaaagactgggaaataaaatattctataatctttgccctccaggggcatctttctgtatcatctactgaaattgtatagtgaacctttaaaatgtctgtcattccaaaggacaacaaggaaacccatcctgagtcaacactgcaagcactactgtgtgacaaaagcctcacctgctcatgcaggtgatgggagcaggttttcttctcttgcctcctttgagtagcttcacagttaaggaagcagctggataatgcagaggccaagagatattggaccctgtgcttatggactcctggactcaaaagcaaatgatgtagggacacactggcacttagagaaatctcagtatttatgcactcctgatattcacgtgctaaatagaacaaccttcctctaaagttctgttctgcagaacaaacaacaaaaatcttttcaaagacccctaagagagaaacacacactgtctagcccgatgtgaatggggaaagagggcttgagcaactctatgttcaggaaaatctcctgccacacattctggaagtattcatacattattaaagtctttttataatcccacctcttgaacttccacacaatatgtgcctcatctatgtgggaacaaaaacagttgtgaaatttggccagaagaggacagcagtttgagagcactgtatagacaagagcacaaggctgaaccacatttggggtgggctgctttggatgagcgcagacatgcgcgagtttgttcctaccaccgtgcagtgaagttgcagagaaattaggaattaagaacaagatgaatccatccagctactcccagcctaaaaaaagcaagaagtcctaatagctatttatatgcaactccctggggactgaagtggttcttcctaatggctgaaaaacactgagtagcaatcaggtctttaagcagaatgtttttaagaccttatcgtgaggacgctgatggagataatgaacgtttgaggtgtcgatagtacatcttaaaacggtaatggaataggtaggaagattcgctcttccaagtattcctaatttcatattagtaaaagtcagttgtccagctggcactataaaagcgcggtgtcagcattaagaagaagctgaaaggagttacacgatgagaaacgagttacactgtgtagggttccagacagcagtgtccgatgacagctacaagagcagcactccttactccttacggtccagggggaatgcaggcaattcccctctggctgtcagtctccctatcccctgccgcgtctccttcgcggggcgatgggtctcagagccacccccagccaaagaaaggggcacgctttcgagatgtctccctggccgctcctgtacggagagtggcgcctgaggtttcagccccaacccgcctccctccgctagagtcagcggcggtctggagtccctgagccccgcgggcaggcgccacctggtctccggcccgctgcctagcacagcggcgaagctggctcgacgtgcgatttcggtttccgtccgtcggcctcgcccgcagtcccgggcgctgggagcggctgcgcctggcgcgcccggagcccagcggctccccgcggccgccccgcgggcgggtgccccgggacgcgaaggccgggcgggtggcggcgcccctactcacgtagcgctgtagcttcctctcggggggcgacttaacgagccagccggtgcacactgcgtcgcccgcactcatcgtggccgccgccgccgcttcctccagctgggccagccgcccgcggcagaaggaagtcgggccaaggatgccggcggggcgggcccagcgcccgcccgcccagcgccgccccgagcggccgctgcgacccccgcctccggccgccgcggcccccggggagggaaccgacgccgcccgcaacccaagacggcgggaaaagcaagcagcgaagcctgggaagccccttcgagcaactgcagctccgccagcggctgtgcccggggggggggtgtgggggggggagcctacgcagcagggcgcctgccactctcacccagggtcacgagaaagcgctcggaaggagccctgcgacctaatgggagcacagcctggaacctgttgccctcatgccccatccccaatccgccacgccaaacgggctggtccctgggtctcagggaccctggagctgaaacccaagtaccacctgcatctgccatgtgcatagttcacggagaaacaaaagcaagactcctcttggacttccctattccacttgattgcttgcacagtagtgtgttttctatgtccctcccccaaagatcgttgtattcagtgataagctttgccggctaaacggtctaaatgtcttaatgaacccaaatgacccaaactcaaaaggtagtgctgtttgcaatctctttgactcgaaggttttaaaagatggatctaaagtcgattgtgccaactagtgtgctgaccacgctaagtaaaaataacaatcatgagcacctaacacttgtgaccttccttactgccaagctaacaccatgccagcgattgtgctaagcactttccaggcgttatctcattgaatccacacaacaccctgtcaaagggctcttattattatctcaattttgcaggttactaaaatgaaaaacaggatgacagtgtcacttgtcgagagccacacgagaaaatcatccataggcagccagagctgtgtcaagagcccatccacttaagcaccaccctctgctttttgtgggtatcatctatgtgacgtttgctagcatcttcaacagaatgaccaacctcccatcctatcaggccagatgcttcagggtgatgagctaacatggtaacaccagtggagtccatcagcatgcgcacactggcttataatgattttcttgtgtgagataatgtcagtgtgaataatgggttcagtaagtcaatgggcaggagtgccagcagaaatgtgaattttaaaaaagcgaatccatgtacaaaattagtacctgttcaagtgagaaaaaattgctgccccttccagatggcagtccaggtggctgtctggtccccccagggaatgctgttattaagggttcattgtttgtctctgcctgtgggcagcttgagcacttagcagtggctgtggccatatcaactgttgccagtccctgagagccccactatgcattgctaattctctaagtcttgcttacacctctgttaaaaaaaaaatcccttaattatactttcctcatttcaaccccttgagtctactgtttgcttccttttgaaaccttgaccgatagacctggtcatgaggaactccctacgacattctgggtgtaagtccagggaatggtgatcatgcagcagcaggggccacaaagatgtgagccacctgctctagcaactttcctgtaccttccagacctgcttgagtctggtctcaaatattccacttccaaaagaggatgaaatagcaccaaatttatcagtggcagctgaagttccatggttctttggtgccccatggtcaagcattcagactttgccacagcccaggagcaagctggaagctgttggtcaaaaggaaaatacttcttttgtggtagagggcatggtttacttcaaaactctagggctttgctgtgtgtttctcctactgggacttgccagaggctccgtgtagcctcccagtgtgtcaaaggtcctgtacctgttgaatctacatggtcataagggtcaagtggcctggacctgtcacagagccttttcttgccct

SEQ ID NO: 1563601 - DNA, 4001 bp, Homo sapiens
aataaagcttaatgaatgaccttttgggctccttccagttccaaggttttagtattctaaaattttcggcacagaacaactccaaatgctcaggaaataagaatgaggtctgtttttaaaaggtgcagtttggagcatgttgggtggatgaggctataaaaagtgaagtacgattttcaaggaaaggaagctgaccaatcaaagtcttttgggcagcccctccagaaatccaggtgaagcccggctccaggctgagttgctgttactctacacgaaagccaggccgctactttccaaaaaaccttgccaagccacactgtacctattgtatctacacttgcctaacagacaaaggtgcaaaattctccccaagaaggcagtagtgcttcatggttaagaccacggattctggaaccaggttgccagtttaatttccaactgagacatgtaattgctctgtaatcttggataagttacttaacctctctgtgcctcaattttgtgagtaaaccaaagataataatagtgtctgttattcaatgcactattctgctacagtaatttaatgaagtaatacacaccaaacactcagcccagaatccaaaatatactacatactcgataattttagcaattagtattagggatgtcagaattactaccacaggcacagcagcgtcactcacttagaaagctcccatcaaacaattggatcccttcccctaccagttctgaagggctatactacaagagcctcaatcagtctttgcagagctccagacaaccagaacttgctgactctcaataagccaaactactcacgttagtaatcctacctcatcaccctgctttccataaatccaacagccacccttcccccagtcctcttgcccatgccacccgcagccacagccacagccacagtcagaggagcaacaaactgggaggccagttgcagacaaaccatcaggtgtttcctcccttccaaggacacagctggacttaacatgatgcctatgagtgagatggggtggggtatctcaatctctgatctaggatgtcagctcaattatctggaattgagggtgggcaggcaatggagcttctcgccgggaaacaaggcaaacctcccaagtttgtggaggaagtcaggcccaaccccacagtgagcccctcaaaggaaggggggagggctcaatctgctttaaaggaagcagttatttacaactttctactcacttgcatgtgggggaggtaatggggagatggggaaagaggctgcaaggtaccctccttctttcttatttccagcagtgagaagcagctgcggagaaagagttaaagaagggagaaagctccagccattactacatccctggtgcctagagctgtctggggggtcatgacagtgctgtctgctttggctaggggccactccgtggctttctgcagcagctgctggggccccccaagcaatttgcaaggtcagtgctgacctgcttccaaagaggaacaaaacaattcactgacaatgaagcaaatcacgcatataccacatcgcaaccccccttcctcaaatcgggttttaccccagtgtctccctgctcagatgccgcctctgggcttccaccagccccactggggaacccaggatagcatcacagctgcagagcatgcctcgcctcccggccaacccaaggagactctcagtacgggggagagatgctatcgctaaaggagacctgagcttgggggagggggaagaaggaacatcaatgtttcttaccgagctctacagtctgagcggaaaggagagaaggatgaatgaactgaaacaagttggaggttgagccctgacagagctcggcttctggcttcttcttctctctctgggtctctctcctggtccctctctcggtctgtctctctggtttgctcgctagcttgcgcgcgctcacgctctctcgctctctctctctctctctctctctctctctctctctctcaatctgcctccctccctctctgtcagtttctccctcccctcctcccctccccttctcccctccccctttgctggctttaggttcaccactggtgcttagcacgcggctgtgctggggctctgaatacagtactgcaaggctttagatgtggttgttttacgaaatactaaagtagtattttattccttaaggcatccaacagagaaatagagggaagcccagagagaaagggaggagcagaggcagcaaagggaagagaaagagagcaaaagggtatgagcgaataggaggataaaggaagtatgggttactgtagctgatgtgtgatgcttacttgctgctccgagactgaagagtgagcttcctcctttttccctctgtctcccttatatccttatgggcgtgccttctaacccaggctgcaaataaaggtttgacaatcctgtctgttcagattccatctctggggacaataatgagctagaaaaatgtacatcaaaggggttgtcattcatactccactaagaagaaagagttccgccacattgatcccctgttgacctaacttccacccccaccctcaaccaagtagaagtgcagacccaattcaaaactatcagttctagcttccctgtaggtaagacagacaagcagcagaaccacaatgctttcttttcaaaaattccaaagggaatatagatgtatgtaattgtgtgagcctatacatgagttgcacaaggactaaggtggggagaaggataattattgactcaaagtataaaagaactatattcccattgggtcaaaagaaaaaaagcaacctaggcaaagcacagtaacaatgcagcatagagtggaaaaagacctaggctaaaaataaaataaaggaacttgagtttgagttctgcctctgaaaattgctgtgttgctttcaacgagttcttcaatctggccctcaatatcctcagtgaccaaatgaatggtaatggaaatagatgatcttaaaagacccttccagaactaacagtctaggaatctaaagacaggaaaattccaggtaaaggagaagttggcccttagaaaataaaaactaaactgccacatttcaaaagttctccaaaggtgagtccccaaatgcgactccaaatcacattgattcaacattccatcttttgtgtttcagggataataccaatataagcacgtgaataaagagctgttcctatcaaagaattcagcatctgcttacatataatgattagtataaaagttttcttagtcaaactcttcatattgtgatttctagtcctgttagaaaaattcagagggcatctaattgaaagtgagttatatagtgtgtttaagtatactagtgtcaatatacatacagtgactgggacataataggcatttacaatgttgcccatagtgtgccatttctctttaaactaccatcctgttggtttttttcccccaaatttctaatgctctctactcctgccaaatgaagtacatgtgctacactcctatacatcttcaaaagcatgtgtccatacattgagtagaagatagataggtactcgtaagcttagagtcactgagctaaagggacccataaagataaccatgtcattgtacagaaaaagaaactagactaaatagaaaatataattcacacaaggtcatagtgagtcagtggcagaatcaaggccagtactcagattgctgactgcaggtacagtatttttctctacaaaattaacatgtaacttgcacataaagcaagtgtgtatgtgagcataaagctataaatactttttcctgcataggtacccattttcatgtgtagatttgtttgcataaatgtccattggatttaatagattagtatactggcaaaaagaaatattaaggttgctgtattagttttctagggctgccataacaaattaccataaattcagtagcttaaaacaacagaaatttattgtctca

SEQ ID NO: 1563602 - DNA, 4001 bp, Homo sapiens
aaggtggctttaatcctaaaattggcttttgccagttaaaaaaaaaaaacacaacaataaacaaacaaaacaaaacctcatcttgaggtccttggggttaaagagctgctgacaatgcatacctttccccagccagccattaagctcactttcggggctagacagaataaaaacttgaaaaacactcacacattggaatagtggcattttccagggcagtttttcagacattcacatgtctctagacataatggtccagcatgaagttgaatctctgcactaccccctcccaaacagtcgactgttggtggtgtgagaagtgggggggggaggggcgcataagaaaagatgttggatttttttctaaatcagatcttttttttcattctacagatggacaaactgaggcccagatagaggaaggactgtgccccaagtcacacaactaatttgaggctaagcctggaccagggagaggtcttctggttcagtgtggcccagtacaccccattgtcacctcctcagctctttcctgacaccacaggttgctatgcttgaagggcagtttccatttccccagtcccttttccctgctgttttcctctctgaccaccccttcttatttcccccaccccagagccatcttttgccctagccagtcaccacgtcagctttctcaactagtccacatcccattttgagggatgtggatgactggaaattgctagcacgcatagaaagacatttatcaagctcctgctgaggctagccccactccagggcaccagtgagccagcaagcagctacacatccccttctctgatgagctaacgcaatctggggtagggagagaagccaccctccctccccagaacagacaaacaagacacaagcccagtgccatggaatcttcgagaaagctccacagatcaggaagcttgcaaatttgtgacacttcacacacagcaggaaccatctcaaaacaacaacaacaaaacgaagcagtcatcttccaccccaaaaagccacaaatccagggcacgaccctcctagccaagtctcagggcgaggagaaggtgtgagggaagatggttgttcaagggaaacctgaaaggggagaaggggattgaaatctacggcccaaaccacagacttcagaggagaataatattcctggcctctggctccagtctgcccaaggcccagcagggtgtctagggatgagttaaggaagtgggaggctgtcagcggtggagagggggcatagctggtgcgggaacccttagactaaaccaaagctcgtgcctgagactggcaccaacaggagcagcggcatgggaagcaagtaatgtcagagttgcctggcgcagtgcctggaactcagtaggcactcttaaaaaaaatgtgagcagcagagaacacacgaggcaacactcacacatttttggcgcagctaagctccctcagcccgcgcacccccttctcaaaatgcacctccggcccccccagtagctgaagcctgccctggccggtcaccccggggccgctcccctgttcctgcgcaagactccgaggagtgcttgtcaccaggccaccgcagtgcttctgagagcgggaatccgcgaactggagtcccgtcttccttctggcgtcctgtcttccttttggagctccccctcaaggaccccgggagcccatcctacagtgaggcgggccgaggccggcgcgcatcgaggggacgcgggactcggccagcccgcggtagggccggggcaaagcgggcgcggggctcgaggaacgcggggccgctggggtcccgggagccgtcccggctcccggggagagggagctgggcgcgaagggctcccgggtcccgggatggagactcacctcgactggaggatcaataagatgcctaggaggactggaagaactttggacaacatttccgcggagaccggcgcgaccacctgcgcggaggtcgcggctcacgctctggccgcactgagcgcggggcggaggcttttgctgggctccaactttcactcctcccactcgccccgccccgtcccgcgctccccgccccaggcccgccccgatggaaatctccgacgacgtgacggctgctgcggtggggagccggggaggctcgcgcgggcgcgggaaggaggcgggagcccggttgctgaggccccccgtccccacgccgccactgcggcgctgccagacagccaggggcgggggaggcggagggaggaggcggcgagcccgcggcgcggggcctgggcgggggaaactcgcgccccaggctgtggccggcagggagctgcttcagggacaagatgtggggctggatgtgctcacgccccagaggcgaccccctcctgcccgctggcacgccgcggggtcaaactgtgctctccagccgtggcttcctccccgccacctgttgcaccccattgcttccccaagtgtcctggcttcaacctccctctctggttttcccagctctcagcccacaatcttcagtccttcggaatacaagtcttgtcgtatgaaggaagccgggtaactcagcaccttccttggcaccgagaagaagagagacaggggtctccccagcaagctctgatgtgaggtattccacagggcaaattcccaggtatttgggggcagggaggacccgccaacagaggaccaggcggagacattcactggagaattttctctgaaccccaagggggcactgccacaatgtggctcccgctttggccccagaagctgagtgtgagagggaccaactggaatagaggaggctttggaaacctccttgagactggatggccgaatctttctggagacttggcaccaggtgatagcagaagaagacacgagaaggcacagagggggaaggggaaggggcagtgccccacttcaggggagacacgtcaagagtctcaagcatacttggacttcatcttctttccctagacccttctgatttgcttcagaaggagaaggaatggcaaagatttgtgtaccaagctgatgccagacgctggcagcatcctcacctgttgctccagaaggggctgtgtgcatccttgaagaggcttagctctaccacactcacctacaacaccctcttcaccaccccacctcccaagcacatcactctgctttgtcctcttcacaacactgctcactcattgatgattatcttgggcattttttatgagcttgtttacagtgggtctctcctactgaagtaagctcagggacaaacacacacatgcatacacacaaaatgtgtctgttggggtctccactgtatccctaagacttagcagagctctgggtacacaataggcactcaaccaaatgtgtcactgatttgtgtgcagctgtgtgtgtcctactaccactgagttagtccactaggacctggggctgccttcagactacggtgcaagacagaagagactgcaggacatgtttaggcttgcacagcccctcacccccgccccccgacacacaccgggaagagccccatactttctttcatgctttgctgctgaaatttttaataatttttgaacaagtggacctgcatttttcttttttcctgggccctgcaaattatatagccagttttgccctgggcagaaatgccgcagagcagggaacaggcaaacacgcggctttgctgaggccatgaggaagagaaggctgccagtccatccgcctgccgtcctgtccaacaccagactgctatggaaaggagcatgtctgcccttactgtagccagcctgggatttgaagtgtcctgtatgcatgtctcttcctccactgacattggacctccgggaaatgaaggtttgtctgatttacctgtattcccctgggttgagcacagtgaccaatgaccagtaggcattaattacgtttgctgaatgagcgactgaatcccaggcagacaaaggaagcaagtgattacagct

SEQ ID NO: 1563603 - DNA, 4001 bp, Homo sapiens
tcctcccccccccaccttcccagctttaatccagagggtggggctcagagactggatccctgttaccaggcaggacttgtaggggttgacgagaggaggcggtaggagaaggggagacgaagaagagtgggcagatgaaagccctcagaaaaatgcattacttcagccccttcaagagccccatcttgcaatcagcctcgacgctgttttctaggttggtgggggtcctcctgccaggggcacctgattgccccaggaaaagtcatcttttgctctcagtgccctagtaagatgagctcaaagtttcatttccccttacctgggctagggctgggcattttttagtcacttttatgtcaaccttgtttctgcacaactctgttttccagacttggcatatggcataagacacacagagagagccttgctggtgtagctgagatttacgaccctcatccaaccaaaccatttcagattcttggggctcagagctctcatcggaaagacatctattctgggagcaggtatatctcttgctgagcatgtgcttccaccctggaggtgtcttgggtgagcataggtaagtggactcagcccagctctgtggagagctggcttttccagagatctctgacacgctcacccaattcacctagaccttcaacagggctccttccccaacagggcttgcgaatcagaacaggccccggcatcactgtgactcttcaaatctttgacgcattgcccagggaacgtcagcccctgcaaatgtgtgtgtttgtgtgtgtgtgtgtgtgtgtgtgtgcgcacgcgcatgtgtgcatgttcagtggcgcagtatggtatgttgggttaagggcactgcagggctgtctgctggaaccttgccaaacaccccccccccctttatgagtacatgttaatttctggcttgccatttaaacattgttaaaaattattcctaatcatctttaatcaaaaatttcattttgcagcatcccaaaatgtgcacatgaattattcccaaattaaagcaatgcattcccacctgtttccaagcacacattacccatgtgccaacgctcaggatctgtggccaccccaaatacacatttctgtgtgatttacatgtaaaggcttcagatactcgcacacccaaacaaacttaaaatcaaaaagagaaaaaaaccggagtcttcaaatattttcacacgactaagtacaaaagcacacccatcccagaccacacggttcgtgtttattcagacacgatcgcactgtctgggctccgatgggtttgagttaatcatttctatctgccgcattggaaagagtccctcatcccctcaacacatgcatgcacgcgcgcgcgcctcaggaaatggactaaaatgtagactcaaacaggtgtctctcctgtctatgttttgtgaattgcccgtcatcctgtaccctcctccccaatcccacaggtgccaaagctggggaaagctgccgggaaccttaaatccttggggatggatggacagatcctgggacgagggcgacccccgcccccacccctcgggctgcggtttaggcacacgcagggctcagtcaagctccgcagtaacaggtgggcggaagcacagggctccatttcaacaccccactcccaccttaccccttctaggggccaacaggcagggcccgggcgccagggctcagcgagcccgggtccgagtaccccccagcccgagtcgcccccagcccgctccgtccaagaggccagaggtcgtctgcccgtctccattcccgtccccgccgtgcctagcctggcggtgcccgcttaccagttgaagaggttcaggacgacttcgggcacagcagaggagaactcgaagtggaatttcgggatgggactggggtagttgccctccgcgagccaggtcctgatgagcagcaggatcactgcggctcgcagcatgcctcggatgcccatggccggggcgttctgggcgcctgagggcgcgggagacggggccgcgaaaaggaacagaggtggggtgggagagtgggtgactactggggccggggaaggcgggattgctggcccttccccaaagagtcgcctctaaggagagagcagcgagggcaagggaagtagggggtgcgggggtcggcccggataccggagatgagagcccgggaggagcaaccacccagcagctctgctggacgcagctccccccagggcccgcccggcagctgcgaggtgcgctccgtctgcggccgctcctggctgcgactgggcacagatcccagctcgctgctggctccgcccactccgacggcatcgcaggcccagccaatcggacagctgccaggagccgcacaaaaaggcgcgcgctcctgcctccgcccgtagcctgcgcgccgcccggcccccgccccttcaggcttctgcagtcatcccccggccatctccagacacaggcagggcggggccgggctgggggagggggaggagggctggctccttgggggctgggccaggaatccgcctcaaggggcactgggtcctgtctcttctctgcaaaatgcgaaatgtgtgtttttcttggaagaaagggcctgtgcccgagagttgtatttgatggtgaagggagtgtggtaatttgaccgccatggctgaatctgcattctgaaagacttggacaattttgggcgtcaggaggtacccaacggctggtgactccgtacccttgagcctccagtaaccccgcgtgccttgtctctggataaggtcaaggaggatcctaatgggttttgttacagggctctggccacagcaggactgctcctccctcaggatggacattgggctacaggagcccaagagttgcttaagacttaaatttcctagagtgctcttcaccccaactttgggtactcaggaaaaagactcaaggaactggaagggctcaccaactggggtctctctgagatgtggttgtgtctcatcagccaggggatgcagaatgaaggttcatggctgacaccatagaaggggaaaaaaaggccaaggtcagtgtttggggtgttcaagggagttaggcactggagaccagggtatgccaatgttcctgggttctgaccccatcatatggaaaagcctgacatcttgactagagggctcttattctttccactacctcagactctgcccctatgggacagaaaaatcgtggaggataagaaatgcctccacccaatttcctatgtccttcctatcccatgacaaagcaagttcagaaagcttagaaagtggcctcaccagagcccatagggcaaatgggtaatcaacaaacagagctgccatgttcaccggcatgccacctcccacatcacaccattgagaagagttgaaatcaaaacggatttcaggtttacttttggttacctagaacattcactgagaaacacaacatctccccctttttttcccctcagtatttgatgaaatgagttgagattgctggtgcccagcaaagcatgacttacctggtaggccaagcagttttgcacagctgagggtttaactcttttaccactccccctttaaaatcattttagaaccatacttttatgaaaaatgtctctcatagtttcctgccttcttttaatgagcagaacaccctcacacctttctttcccatctcccctctttccctggccattgcagtaagaaaaaaggatgatgggacccatttgtcaggatcacatatgagagcagattaaacccacctctactgctaccagtcctgtcccatcacctctggtcacacagacgtccttgtagagaaaatccttgtttgccaaaaatgttagagccattccggggcattttgtccagccacctcggttgtaatgtagggaaactgaagcccagagaagaaaaagggattggcccaaggtcacacagtagcagaggccaaaactaaaaaccacatttccaggtc

SEQ ID NO: 1563604 - DNA, 4001 bp, Homo sapiens
tagcctcctcgcttttccagtcaatttcaggcattctttccattgttttctttcctcctcttcctcctatgtgacaatgcctaacacacacacacacacgtgcacacacacacacacgaacacacacacacgcacacaccagcagacgttcttcttccctttccctcaccttgacctgcagatgctccctcatcctctccctcctgagcagctgcaggatcctgacgttgagttgctggttccccttcttcaggtgttgctggttccacttcatcactgaactgctcgggctggggaatacgtgtgggtgtgcaaataaaaaataagtttcgttattgatacaaaattttacatatatacacagaatacatagctatttctggtcctaactaagcctaaagacatttctccaactctatgctctatgcccaataaggttactccacccacagggaggttactgtgagaaaagtgacgcacgaggactttgggggctattatactctgtgttggaatacatgtgtacaatctgtcattaacaaacaaagccggagaaagaagtcatgggcaaaagctgaagaacacgagaggaaaaaaaaaatcctccagaatcaatgtttccttcatgagatgccatcctcattttttatgagcaggaaagacctttatcagcatttccacactaatgcaacgacgctatcacaaaaattaatttctactaatagaaaacatcgaattaacgtttaagcactcacccgcataggcccaatcatttcaggaggctgtacatagcgccttggtctaggccaataataggtcgatcttcctcgccaactcatatttcacactgaaaacagacaaccgtgattgggaacgtgcgctccagagggctgctatattcgatcacttccatggataaatgttaacttgccgttttacttttgaaaatactctcaaaataagtcccagagttaagcatacgtgtgtacgctgtctgagtgcctacaaagccacttctgctggccaggctggcagagcaatcatcttaaggcgtgtggcaaaaggcagaggacatttttttctaaatttcttttggacacgcggtctcgctgtgttgctcaggctggagtgcagcggcgtgatcacagctcactgcagcctcgacctcccgctcaagggatcctcccacctcagtgtccccagtaactgggaatacgtaggcgagcgccactgcgccccgcagacagaggtcatttctgatgaggtttagtttcacaagtgcactccccacgaaaaccctagtgaatcacaattctcgtgattgctgctttgggcacactcccacttcctagagccattcaccccccctcacaacaagtttggttggaccgcactgcctcgcccactccttcccactgttttcggaccttccatggcggaggtgagaccttgcagtgcttctcactcgggcgctccgcactccacaccgctgagggggcgctcgccaggccgcagccttcccaggtgccaggccccttcttcaccgcccgcctcgcccccgccgggggccccattcagggaatctgccctgtgtcgtcggggatcccggcacctcgggacttccatccccccaacagcactcaccccgtcttcacctgagcccctgaccgcctcccctccacggcccaccttcctccccgtccaggccccttcacgaccacgaagccgccggtggcctcgcagcctgtgaagggaaggaggacgacctcgtggcccttctccctcggaggccacagaccaggaagcgggacccgcctgacccacccgaggccctctccaccctcactcacacttcagcccccgggatgactggcctgcacacctaccagatgaatctcagtagaggaaaaagagtccggacggcaggaaccacacagcactgcctcacagctccctggcgttcttcacgtgggcgaaggggccgggcagaagacgcccagtgaacatgcgcactgaggcgggagcccagggagcatgcgcggctgtgggctggggagggctgccgttcccagcgccacgccccaaaccctccatgcccatcctcattgaggataagggaatcccacctccctctgctgtttcctatgcctctgggactcaagtagtgctcccctcaaaactcaccccatcttcaactgaaccccacccccaacccagggccctctcttgccccggacccaccatggggacaaggaccactgtgactggctgggaagacaggtaaaccacctgcgaaaacagaaatagcaacctatcccaaaaggaaattgttcaatgtgaacaagtcagagaaagagactgaaagaaaaatgaatagaatcgctaggacccgtaagaaaatgctaaaacgatatctatcatttgtagcatcagaatcgcagagggtgaagtgacagtattagggaaacaggacagccagagtgacaccacgtgaaaatatactccgtcttgaaagcagcaagatacatagtcctaccagtcacaacccatggtcctaagatgtttggagttgagaaaacagatgaaaggtacctccaaggacatgctcccacagcagcggaaagtgcacggttcccaacacccattaacaatatatgctttcaacagaattatgctttcatggacttacacactggtaagtcaaggacagttttctttaaatcaatagaatgataaaagtcatcatgctcttagcccacccgcacaaaggcacagattaactttagtctttatatagataagacccctatataagaaaaaccagaccaggccaaggctcacgcctgtaatcctagtattttgggaggctgagctggccagatcacctgagctcaggacttcgagaccagcctaagcaacatcagaaaatctcatcactacaaaaaacaaacaaaaaaccatcgaaaaattagctgggcatggtggcatgtacctatactcacagctcctcaggaggctgaggtgggaggcgcgcttgagcccaggaggtcaaggctgcagcgagctctgataacaccaccgcactccagcctcggtgacagagtgagacgctgtctcaagttttaataatcgaacctaaaaacgtacaaatttatcaatcgaattcactatattaacacatgaatgggaaaaaacgctgtggtaatcgaaatagatgcactgtttgatgaaaatcaacatatattcaaatgaatactctcagcaaatttggaacagaatgcaatgactcactctgataaagtccgtctacaaaaaaaggagagtgaataggatggtgaaatgttgaaatttttcggtttctcatcagggataagacaaggatgtccactgtcaccattgtaacgggtgggtctgcgcaatgccataaaatcagaaaaggaaataaaactctttacaatggcaacgacgggcccgccacggtggcccacgccagtaatcccagcactgtgggaggtgaggtgggtgcatcacttgcactcaaaagttcaacaacagcccgggaaacatggcaaaaccccgtctctacaaaaaaatacaaaagggaaaagaaaaaaatatggcggaaacaaaactgctcttattccaggatgatatgtttctgtatattgaagactgaaaacgacctagaagtaaactttagaattcacaagcatatttcacaaggccgctggatagaaaaccaatatgtaagaattatgtctccaccgggcgcggaggctcatgcctgtaatcccagcactttgggaggccaaggcaggtgaatcacgaggtcaggagttcaagagcaccccggccaagatggcgaaagcccatctctagtaaaaacacaaaacttagccaggcgtgctggtgggtgcctataatcccagctactcgggaggctgaggcagacaattgcttgaatccgggaggcggggttgcagtgagcagagatcgcgcca

SEQ ID NO: 1563605 - DNA, 4001 bp, Homo sapiens
ctttcctcctcttcctcctatgtgacaatgcctaacacacacacacacacacgtgcacacacacacacacgaacacacacacacgcacacaccagcagacgttcttcttccctttccctcaccttgacctgcagatgctccctcatcctctccctcctgagcagctgcaggatcctgacgttgagttgctggttccccttcttcaggtgttgctggttccacttcatcactgaactgctcgggctggggaatacgtgtgggtgtgcaaataaaaaataagtttcgttattgatacaaaattttacatatatacacagaatacatagctatttctggtcctaactaagcctaaagacatttctccaactctatgctctatgcccaataaggttactcgacccacaggaaggttactatgagaaaagtgacgcacgaggactttggaggctattatactcagtgttggaatacatgtgtacaatctgtcattaacaaacaaagcctgagaaagaagtcatgggcaaaagctgaagaacactagaggaaaaaaaattctccagaatcaatgtttccttcatgagacgccatcatcattttttatgagcaggaaagacctttatcagcatttccatactaatgcaacaatactgtcacaaaaattaatttctgctaatagaaaacaacgaattaacgtttaagcactcaccagcataggcccaatcatttcagggggctctacgtagcgtcttggtctaggccgataggtcgatcttcctcgccaactcatatttcacactgaaaacagacaaccgtgattgggaacgtgcgctccacagggctgctatattcgatcacctccatggataaatgttaacttgtcgttttaattttgaaaatactttcaaaataagtcccagagttaagcatatgtgtgtaccttttctgagtgcctacaaagccacttatgctggccaagctggcagagcaatcatcttaaggcgtgtgacaaaacgcagaggacattttttttctaaatttcttttggtcccgcagtctccctgtgttgctctggcagagtgcagcggcgtgatcacagctcactgcagcatcgacctcctgctcaagggatcctcccacctcagcgtcccgagtaactgggactacaggcgcaggccatggcgccccactggcagaggtcatttctgatgaggtttagtttcacaagtggactccacatgaaaacattagtgaatcataattctcgtgattgctactttgggcacactcccacttactagagccattcacttctctcaaatcaagtttgattggaccgcacagcctctcccagtccttcccactgttgccagaccttccatggcggaggtgagatcttgcgatgcttctcactcggggctccccactccacaaagctcaggggcactcaccagcccgcagtcttcccaggtgccaggtcccttctttatcgccctcctcgcacctgtccgggacctcattcagggatctcccctgtatcgggtattcctggcacctccggacttccatccctctgacagcacacccagcaatcgccccttcttcacctgagcccctgaccgcctcccctccatggcccaccttcctccttgtcctggccccttcacgaccacaaagcagatggtggcctcacagcctttgagagaaggaggacgacctcaaggcccttctctttcagaggccaggagccccttccctttcagaagcctcgaggcccttctccctcagaggccacagaccacgaagcaggacccaacggactcacccgaagcacactgcctgctcttcaccctcactcacacttcagaccccgggaggactggcctgcagacctaccagatgaatctcagtagaggaaaaatattccagacgacaggaacgagaccacacaccctcacagctccctggcgttctccacgtgggtaaagcggctgagcagaagacgcccagtggacatgcgcactgaggcgggagccaaggagcatgtacagctgcgggttggggaaggctgccgttcccagccccacgcccccaaccctcgattcccatccccactgaggataatggaatctgacctccctctgctgtttcctatgcctctgggactcaagtagtgctcccctcaaaactcactccatcttcaactaaacccccctcccctccagggccctctcttgccccggccccaccatggggacaaggaccacggtgactgcctgagaagacaggtaaaccacctgcgaaaacagaaatagcaacctaccccaaaaagaaattgttaaatgtgaacaagtcagagaaagagactgaaagaaaaatgaatacaatctctaggacccataagaaaatactaaaacgatatctatcatttgtagcatcagaatcacagaaagagaagtgccagtattagagaaacaggagagccagagtgacaccatgtgaaaatcaactccatcttgaaactcgcaagacacattccttaccagtcacaacccatggtcctaagatgtttggagttgagaaaacagacgaaaggtacctccaaggacatgctcccacagcagcagaaagtgcagggttctcaacacccataacaatatatgctttcaacataattatgctttcatggacttacacactggaaagtcaaggatagttttctttaaatcaatagaatgataaatttcatcatgcccttagcacaccctcacaaagatacagataagtttagtctttacatagagaagacccttgtataagaaaaactggccaggccaagactcatgcctgtagtactagtatttttggaggctgagctgggcagattgcctgagctcaggtgttcgagaccagcctaagcaacatgagaaaatctcatcactacaaaaaaaaaaaaaaagaagaagaaaaattagctgggaatggttacatgtacctatagtcacagctacttagaagcctgaggtgggaggatcacttgagccaagaaggtcaaggatgcagtgagctctgataacaccactgcactccagcctgggtgatagaatgagaccctgtctcgatttttaaaaatagaagataaaaatgtacaaagttatcaatctaattcactacattaacagatgaatgggaaaaaaatgctgttataaacaaaatagatgcactgatgaaactcaacatatattcaaatgaatactctcagcaaatttggaacagaatggaatgacttactctgataaagtccatctacaaaaaaaggacagtaaataggatggtgaaatgttgaaatttttcggtttctcatcagggataagacaaggatattgactgtcaccattttaacaggtgggtctgcacaatgccataaaatcagaaaaggaaataaaactctttacaatggcaacaacaggcccggcacggtggcccacgtcagtaatctcagcactgtgggaggtgaggcgggtgcatcacttgcactcaaaagttcaagaacagcccgggaaacatggcaaaaccccgtctctacaaaaaatacaaaaggaaaaagaaaaaaaaaatggcagaaacaaaattgttcttattcaaggatggtatgattctgtatgttgaagactgaaaaccatctagaagtaaacttttagaattcataagcatatttcacaaggctgctggatagaaaatcaatatataagaattatgtctcgcccgggcgcggtggctcacgcctgtaatcccaacactttgggaggccgaggtgggtggatcacgaggtcaggagttcaagagcaccccggccaagatggcgaaaccccgtctctactaaaaatacaaaatctggctgggtaggtggtgggctcctgtaatcccagctactcgggaggctgaggcagaaattgcttgcatccaggaggcgggggttgcagtgagcagagatcacaccactg

SEQ ID NO: 1563606 - DNA, 4001 bp, Homo sapiens
aacttttatcatagtgagggatttgcctaagctaagctgcaaactacatagcctcctcgcttttccagtcaatttcaggcattctttccattgttttctttcctcctcttcctcctatgtgacaatgcctaacacacacacacgtgcacacacacacacgaacacacacacacgcacacaccagcagacgttcttcttccctttccctcaccttgacctgcagatgctccctcatcctctccctcctgagcagctgcaggatcctgacattgagttgctggttccccttcttcaggtgttgctggttccacttcatcactgaactgctcgggctggggaatacgtgtgggtgtgcaaatagaaaataagtttcgttattgatacaaaattttacatatatacacagaatacatagctatttctggtcctaactaagcctaaagacatttctccaactctatgctctatgcccaataaggttactccacccacagggaggttactgtgagaaaagtgacgcacgaggactttgggggctattatactctgtgttggaatacatgtgtacaatctgtcattaacaaacaaagccggagaaagaagtcatgggcaaaagctgaagaacacgagaggaaaaaaaaaatcctccagaatcaatgtttccttcatgagatgccatcctcattttttatgagcaggaaagacctttatcagcatttccacactaatgcaacgacgctatcacaaaaattaatttctactaatagaaaacatcgaattaacgtttaagcactcacccgcataggcccaatcatttcaggaggctgtacatagcgccttggtctaggccaataataggtcgatcttcctcgccaactcatatttcacactgaaaacagacaaccgtgattgggaacgtgcgctccagagggctgctatattcgatcacttccatggataaatgttaacttgccgttttacttttgaaaatactctcaaaataagtcccagagttaagcatacgtgtgtacgctgtctgagtgcctacaaagccacttctgctggccaggctggcagagcaatcatcttaaggcgtgtggcaaaaggcagaggacatttttttctaaatttcttttggacacgcggtctcgctgtgttgctcaggctggagtgcagcggcgtgatcacagctcactgcagcctcgacctcccgctcaagggatcctcccacctcagtgtccccagtaactgggaatacgtaggcgagcgccactgcgccccgcagacagaggtcatttctgatgaggtttagtttcacaagtgcactccccacgaaaaccctagtgaatcacaattctcgtgattgctgctttgggcacactcccacttcctagagccattcacccccactcacaacaagtttggttggaccgcactgcctcgcccactccttcccactgttttcggaccttccatggcggaggtgagaccttgcagtgcttctcactcgggcgctccgcactccacaccgctgagggggcactcgccaggccgcagccttcccaggtgccaggccccttcttcaccgcccgcctcgcccccgccgggggccccattcagggaatctgccctgtgtcgtcggggatcccggcacctcgggacttccatccccccaacagcactcaccccgtcttcacctgagcccctgaccgcctcccctccacggcccaccttcctccccgtccaggccccttcacgaccacgaagccgccggtggcctcgcagcctgtgaagggaaggaggacgacctcgtggcccttctccctcggaggccacagaccaggaagcgggacccgcctgacccacccgaggccctctccaccctcactcacacttcagcccccgggatgactggcctgcacacctaccagatgaatctcagtagaggaaaaagagtccggacggcaggaaccacacagcactgcctcacagctccctggcgttcttcacgtgggcgaaggggccgggcagaagacgcccagtgaacatgcgcactgaggcgggagcccagggagcatgcgcggctgtgggctggggagggctgccgttcccagcgccacgccccaaaccctccatgcccatcctcattgaggataagggaatcccacctccctctgctgtttcctatgcctctgggactcaagtagtgctcccctcaaaactcaccccatcttcaactgaaccccacccccaacccagggccctctcttgccccggacccaccatggggacaaggaccactgtgactggctgggaagacaggtaaaccacctgcgaaaacagaaatagcaacctatcccaaaaggaaattgttcaatgtgaacaagtcagagaaagagactgaaagaaaaatgaatagaatcgctaggacccgtaagaaaatgctaaaacgatatctatcatttgtagcatcagaatcgcagagggtgaagtgacagtattagggaaacaggacagccagagtgacaccacgtgaaaatatactccgtcttgaaagcagcaagatacatagtcctaccagtcacaacccatggtcctaagatgtttggagttgagaaaacagatgaaaggtacctccaaggacatgctcccacagcagcggaaagtgcacggttcccaacacccattaacaatatatgctttcaacagaattatgctttcatggacttacacactggtaagtcaaggacagttttctttaaatcaatagaatgataaaagtcatcatgctcttagcccacccgcacaaaggcacagattaactttagtctttatatagataagacccctatataagaaaaaccagaccaggccaaggctcacgcctgtaatcctagtattttgggaggctgagctggccagatcacctgagctcaggacttcgagaccagcctaagcaacatcagaaaatctcatcactacaaaaaacaaacaaaaaaccatcgaaaaattagctgggcatggtggcatgtacctatactcacagctcctcaggaggctgaggtgggaggcgcgcttgagcccaggaggtcaaggctgcagcgagctctgataacaccaccgcactccagcctcggtgacagagtgagacgctgtctcaagttttaataatcgaacctaaaaacgtacaaatttatcaatcgaattcactatattaacacatgaatgggaaaaaacgctgtggtaatcgaaatagatgcactgtttgatgaaaatcaacatatattcaaatgaatactctcagcaaatttggaacagaatgcaatgactcactctgataaagtccgtctacaaaaaaaggagagtgaataggatggcgaaatgttgaaatttttcggtttctcatcagggagaagacaaggatgtccactgtcaccattgtaacgggtgagtctgcacaatgccataaaatcagaaaaggaaataaaactctttacaatgccaacgacgggcccgccacggtggcccacgccagtaatcccagcactgtgggaggtgaggtgggtgcatcacttgcactcaaaagttcaacaacagcccgggaaacatggcaaaaccccgtctctacaaaaaaatacaaaagggaaaagaaaaaaatatggcggaaacaaaactgctcttattccaggatgatatgtttctgtatattgaagactgaaaacgacctagaagtaaactttagaattcacaagcatatttcacaaggccgctggatagaaaaccaatatgtaagaattatgtctccaccgggcacggaggctcatgcctgtaatcccagcactttgggaggccaaggcaggtgaatcacgaggtcaggagttcaagagcaccccggccaagatggcgaaagcccatctctagtaaaaacacaaaacttagccaggcgtgctggtgggtgcctataatcccagctactcgggaggctgaggcagacaattgct

SEQ ID NO: 1563607 - DNA, 4001 bp, Homo sapiens
aacttttatcatagtgagggatttgcctaagctaagctgcaaactacatagcctcctcgcttttccagtcaatttcaggcattctttccattgttttctttcctcctcttcctcctatgtgacaatgcctaacacacacacacgtgcacacacacacacgaacacacacacacgcacacaccagcagacgttcttcttccctttccctcaccttgacctgcagatgctccctcatcctctccctcctgagcagctgcaggatcctgacattgagttgctggttccccttcttcaggtgttgctggttccacttcatcactgaactgctcgggctggggaatacgtgtgggtgtgcaaataaaaaataagtttcgttattgatacaaaattttacatatatacacagaatacatagctatttctggtcctaactaagcctaaagacatttctccaactctatgctctatgcccaataaggttactccacccacagggaggttactgtgagaaaagtgacgcacgaggactttgggggctattatactctgtgttggaatacatgtgtacaatctgtcattaacaaacaaagccggagaaagaagtcatgggcaaaagctgaagaacacgagaggaaaaaaaaaatcctccagaatcaatgtttccttcatgagatgccatcctcattttttatgagcaggaaagacctttatcagcatttccacactaatgcaacgacgctatcacaaaaattaatttctactaatagaaaacatcgaattaacgtttaagcactcacccgcataggcccaatcatttcaggaggctgtacatagcgccttggtctaggccaataataggtcgatcttcctcgccaactcatatttcacactgaaaacagacaaccgtgattgggaacgtgcgctccagagggctgctatattcgatcacttccatggataaatgttaacttgccgttttacttttgaaaatactctcaaaataagtcccagagttaagcatacgtgtgtacgctgtctgagtgcctacaaagccacttctgctggccaggctggcagagcaatcatcttaaggcgtgtggcaaaaggcagaggacatttttttctaaatttcttttggacacgcggtctcgctgtgttgctcaggctggagtgcagcggcgtgatcacagctcactgcagcctcgacctcccgctcaagggatcctcccacctcagtgtccccagtaactgggaatacgtaggcgagcgccactgcgccccgcagacagaggtcatttctgatgaggtttagtttcacaagtgcactccccacgaaaaccctagtgaatcacaattctcgtgattgctgctttgggcacactcccacttcctagagccattcacccccactcacaacaagtttggttggaccgcactgcctcgcccactccttcccactgttttcggaccttccatggcggaggtgagaccttgcagtgcttctcactcgggcgctccgcactccacaccgctgagggggcgctcgccaggccgcagccttcccaggtgccaggccccttcttcaccgcccgcctcgcccccgccgggggccccattcagggaatctgccctgtgtcgtcggggatcccggcacctcgggacttccatccccccaacagcactcaccccgtcttcacctgagcccctgaccgcctcccctccacggcccaccttcctccccgtccaggccccttcacgaccacgaagccgccggtggcctcgcagcctgtgaagggaaggaggacgacctcgtggcccttctccctcggaggccacagaccaggaagcgggacccgcctgacccacccgaggccctctccaccctcactcacacttcagcccccgggatgactggcctgcacacctaccagatgaatctcagtagaggaaaaagagtccggacggcaggaaccacacagcactgcctcacagctccctggcgttcttcacgtgggcgaaggggccgggcagaagacgcccagtgaacatgcgcactgaggcgggagcccagggagcatgcgcggctgtgggctggggagggctgccgttcccagcgccacgccccaaaccctccatgcccatcctcattgaggataagggaatcccacctccctctgctgtttcctatgcctctgggactcaagtagtgctcccctcaaaactcaccccatcttcaactgaaccccacccccaacccagggccctctcttgccccggacccaccatggggacaaggaccactgtgactggctgggaagacaggtaaaccacctgcgaaaacagaaatagcaacctatcccaaaaggaaattgttcaatgtgaacaagtcagagaaagagactgaaagaaaaatgaatagaatcgctaggacccgtaagaaaatgctaaaacgatatctatcatttgtagcatcagaatcgcagagggtgaagtgacagtattagggaaacaggacagccagagtgacaccacgtgaaaatatactccgtcttgaaagcagcaagatacatagtcctaccagtcacaacccatggtcctaagatgtttggagttgagaaaacagatgaaaggtacctccaaggacatgctcccacagcagcggaaagtgcacggttcccaacacccattaacaatatatgctttcaacagaattatgctttcatggacttacacactggtaagtcaaggacagttttctttaaatcaatagaatgataaaagtcatcatgctcttagcccacccgcacaaaggcacagattaactttagtctttatatagataagacccctatataagaaaaaccagaccaggccaaggctcacgcctgtaatcctagtattttgggaggctgagctggccagatcacctgagctcaggacttcgagaccagcctaagcaacatcagaaaatctcatcactacaaaaaacaaacaaaaaaccatcgaaaaattagctgggcatggtggcatgtacctatactcacagctcctcaggaggctgaggtgggaggcgcgcttgagcccaggaggtcaaggctgcagcgagctctgataacaccaccgcactccagcctcggtgacagagtgagacgctgtctcaagttttaataatcgaacctaaaaacgtacaaatttatcaatcgaattcactatattaacacatgaatgggaaaaaacgctgtggtaatcgaaatagatgcactgtttgatgaaaatcaacatatattcaaatgaatactctcagcaaatttggaacagaatgcaatgactcactctgataaagtccgtctacaaaaaaaggagagtgaataggatggcgaaatgttgaaatttttcggtttctcatcagggagaagacaaggatgtccactgtcaccattgtaacgggtgggtctgcacaatgccataaaatcagaaaaggaaataaaactctttacaatgccaacgacgggcccgccacggtggcccacgccagtaatcccagcactgtgggaggtgaggtgggtgcatcacttgcactcaaaagttcaacaacagcccgggaaacatggcaaaaccccgtctctacaaaaaaatacaaaagggaaaagaaaaaaatatggcggaaacaaaactgctcttattccaggatgatatgtttctgtatattgaagactgaaaacgacctagaagtaaactttagaattcacaagcatatttcacaaggccgctggatagaaaaccaatatgtaagaattatgtctccaccgggcacggaggctcatgcctgtaatcccagcactttgggaggccaaggcaggtgaatcacgaggtcaggagttcaagagcaccccggccaagatggcgaaagcccatctctagtaaaaacacaaaacttagccaggcgtgctggtgggtgcctataatcccagctactcgggaggctgaggcagacaattgct

SEQ ID NO: 1563608 - DNA, 4001 bp, Homo sapiens
aacttttatcatagtgagggatttgcctaagctaagctgcaaactacatagcctcctcgcttttccagtcaatttcaggcattctttccattgttttctttcctcctcttcctcctatgtgacaatgcctaacacacacacacgtgcacacacacacaggaacacacacacacgcacacaccagcagacgttcttcttccctttccctcaccttgacctgcagatgctccctcatcctctccctcctgagcagctgcaggatcctgacattgagttgctggttccccttcttcaggtgttgctggttccacttcatcactgaactgctcgggctggggaatacgtgtgggtgtgcaaatagaaaataagtttcgttattgatacaaaattttacatatatacacagaatacatagctatttctggtcctaactaagcctaaagacatttctccaactctatgctctatgcccaataaggttactccacccacagggaggttactgtgagaaaagtgacgcacgaggactttgggggctattatactctgtgttggaatacatgtgtacaatctgtcattaacaaacaaagccggagaaagaagtcatgggcaaaagctgaagaacacgagaggaaaaaaaaaatcctccagaatcaatgtttccttcatgagatgccatcctcattttttatgagcaggaaagacctttatcagcatttccacactaatgcaacgacgctatcacaaaaattaatttctactaatagaaaacatcgaattaacgtttaagcactcacccgcataggcccaatcatttcaggaggctgtacatagcgccttggtctaggccaataataggtcgatcttcctcgccaactcatatttcacactgaaaacagacaaccgtgattgggaacgtgcgctccagagggctgctatattcgatcacttccatggataaatgttaacttgccgttttacttttgaaaatactctcaaaataagtcccagagttaagcatacgtgtgtacgctgtctgagtgcctacaaagccacttctgctggccaggctggcagagcaatcatcttaaggcgtgtggcaaaaggcagaggacatttttttctaaatttcttttggacacgcggtctcgctgtgttgctcaggctggagtgcagcggcgtgatcacagctcactgcagcctcgacctcccgctcaagggatcctcccacctcagtgtccccagtaactgggaatacgtaggcgagcgccactgcgccccgcagacagaggtcatttctgatgaggtttagtttcacaagtgcactccccacgaaaaccctagtgaatcacaattctcgtgattgctgctttgggcacactcccacttcctagagccattcaccccccctcacaacaagtttggttggaccgcactgcctcgcccactccttcccactgttttcggaccttccatggcggaggtgagaccttgcagtgcttctcactcgggcgctccgcactccacaccgctgagggggcgctcgccaggccgcagccttcccaggtgccaggccccttcttcaccgcccgcctcgcccccgccgggggccccattcagggaatctgccctgtgtcgtcggggatcccggcacctcgggacttccatccccccaacagcactcaccccgtcttcacctgagcccctgaccgcctcccctccacggcccaccttcctccccgtccaggccccttcacgaccacgaagccgccggtggcctcgcagcctgtgaagggaaggaggacgacctcgtggcccttctccctcggaggccacagaccaggaagcgggacccgcttgacccacccgaggccctctccaccctcactcacacttcagcccccgggatgactggcctgcacacctaccagatgaatctcagtagaggaaaaagagtccggacggcaggaaccacacagcactgcctcacagctccctggcgttcttcacgtgggcgaaggggccgggcagaagacgcccagtgaacatgcgcactgaggcgggagcccagggagcatgcgcggctgtgggctggggagggctgccgttcccagcgccacgccccaaaccctccatgcccatcctcattgaggataagggaatcccacctccctctgctgtttcctatgcctctgggactcaagtagtgctcccctcaaaactcaccccatcttcaactgaaccccacccccaacccagggccctctcttgccccggacccaccatggggacaaggaccactgtgactggctgggaagacaggtaaaccacctgcgaaaacagaaatagcaacctatcccaaaaggaaattgttcaatgtgaacaagtcagagaaagagactgaaagaaaaatgaatagaatcgctaggacccgtaagaaaatgctaaaacgatatctatcatttgtagcatcagaatcgcagagggtgaagtgacagtattagggaaacaggacagccagagtgacaccacgtgaaaatatactccgtcttgaaagcagcaagatacatagtcctaccagtcacaacccatggtcctaagatgtttggagttgagaaaacagatgaaaggtacctccaaggacatgctcccacagcagcggaaagtgcacggttcccaacacccattaacaatatatgctttcaacagaattatgctttcatggacttacacactggtaagtcaaggacagttttctttaaatcaatagaatgataaaagtcatcatgctcttagcccacccgcacaaaggcacagattaactttagtctttatatagataagacccctatataagaaaaaccagaccaggccaaggctcacgcctgtaatcctagtattttgggaggctgagctggccagatcacctgagctcaggacttcgagaccagcctaagcaacatcagaaaatctcatcactacaaaaaacaaacaaaaaaccatcgaaaaattagctgggcatggtggcatgtacctatactcacagctcctcaggaggctgaggtgggaggcgcacttgagcccaggaggtcaaggctgcagcgagctctgataacaccaccgcactccagcctcggtgacagagtgagacgctgtctcaagttttaataatcgaacctaaaaacgtacaaatttatcaatcgaattcactatattaacacatgaatgggaaaaaacgctgtggtaatcgaaatagatgcactgtttgatgaaaatcaacatatattcaaatgaatactctcagcaaatttggaacagaatgcaatgactcactctgataaagtccgtctacaaaaaaaggagagtgaataggatggcgaaatgttgaaatttttcggtttctcatcagggagaagacaaggatgtccactgtcaccattgtaacgggtgggtctgcgcaatgccataaaatcagaaaaggaaataaaactctttacaatgccaacgacgggcccgccacggtggcccacgccagtaatcccagcactgtgggaggtgaggtgggtgcatcacttgcactcaaaagttcaacaacagcccgggaaacatggcaaaaccccgtctctacaaaaaaatacaaaagggaaaagaaaaaaatatggcggaaacaaaactgctcttattccaggatgatatgtttctgtatattgaagactgaaaacgacctagaagtaaactttagaattcacaagcatatttcacaaggccgctggatagaaaaccaatatgtaagaattatgtctccaccgggcacggaggctcatgcctgtaatcccagcactttgggaggccaaggcaggtgaatcacgaggtcaggagttcaagagcaccccggccaagatggcgaaagcccatctctagtaaaaacacaaaacttagccaggcgtgctggtgggtgcctataatcccagctactcgggaggctgaggcagacaattgct

SEQ ID NO: 1563609 - DNA, 4001 bp, Homo sapiens
gctgcaaactacatagcctcctcgcttttccagtcaatttcaggcattctttccattgttttctttcctcctcttcctcctatgtgacaatgcctaacacacacacacgtgcacacacacacacgaacacacacacacgcacacaccagcagacgttcttcttccctttccctcaccttgacctgcagatgctccctcatcctctccctcctgagcagctgcaggatcctgacattgagttgctggttccccttcttcaggtgttgctggttccacttcatcactgaactgctcgggctggggaatacgtgtgggtgtgcaaatagaaaataagtttcgttattgatacaaaattttacatatatacacagaatacatagctatttctggtcctaactaagcctaaagacatttctccaactctatgctctatgcccaataaggttactccacccacagggaggttactgtgagaaaagtgacgcacgaggactttgggggctattatactctgtgttggaatacatgtgtacaatctgtcattaacaaacaaagccggagaaagaagtcatgggcaaaagctgaagaacacgagaggaaaaaaaaaatcctccagaatcaatgtttccttcatgagatgccatcctcattttttatgagcaggaaagacctttatcagcatttccacactaatgcaacgacgctatcacaaaaattaatttctactaatagaaaacatcgaattaacgtttaagcactcacccgcataggcccaatcatttcaggaggctgtacatagcgccttggtctaggccaataataggtcgatcttcctcgccaactcatatttcacactgaaaacagacaaccgtgattgggaacgtgcgctccagagggctgctatattcgatcacttccatggataaatgttaacttgccgttttacttttgaaaatactctcaaaataagtcccagagttaagcatacgtgtgtacgctgtctgagtgcctacaaagccacttctgctggccaggctggcagagcaatcatcttaaggcgtgtggcaaaaggcagaggacatttttttctaaatttcttttggacacgcggtctcgctgtgttgctcaggctggagtgcagcggcgtgatcacagctcactgcagcctcgacctcccgctcaagggatcctcccacctcagtgtccccagtaactgggaatacgtaggcgagcgccactgcgccccgcagacagaggtcatttctgatgaggtttagtttcacaagtgcactccccacgaaaaccctagtgaatcacaattctcgtgattgctgctttgggcacactcccacttcctagagccattcacccccactcacaacaagtttggttggaccgcactgcctcgcccactccttcccactgttttcggaccttccatggcggaggtgagaccttgcagtgcttctcactcgggcgctccgcactccacaccgctgagggggcactcgccaggccgcagccttcccaggtgccaggccccttcttcaccgcccgcctcgcccccgccgggggccccattcagggaatctgccctgtgtcgtcggggatcccggcacctcgggacttccatccccccaacagcactcaccccgtcttcacctgagcccctgaccgcctcccctccacggcccaccttcctccccgtccaggccccttcacgaccacgaagccgccggtggcctcgcagcctgtgaagggaaggaggacgacctcgtggcccttctccctcggaggccacagaccaggaagcgggacccgcctgacccacccgaggccctctccaccctcactcacacttcagcccccgggatgactggcctgcacacctaccagatgaatctcagtagaggaaaaagagtccggacggcaggaaccacacagcactgcctcacagctccctggcgttcttcacgtgggcgaaggggccgggcagaagacgcccagtgaacatgcgcactgaggcgggagcccagggagcatgcgcggctgtgggctggggagggctgccgttcccagcgccacgccccaaaccctccatgcccatcctcattgaggataagggaatcccacctccctctgctgtttcctatgcctctgggactcaagtagtgctcccctcaaaactcaccccatcttcaactgaaccccacccccaacccagggccctctcttgccccggacccaccatggggacaaggaccactgtgactggctgggaagacaggtaaaccacctgcgaaaacagaaatagcaacctatcccaaaaggaaattgttcaatgtgaacaagtcagagaaagagactgaaagaaaaatgaatagaatcgctaggacccgtaagaaaatgctaaaacgatatctatcatttgtagcatcagaatcgcagagggtgaagtgacagtattagggaaacaggacagccagagtgacaccacgtgaaaatatactccgtcttgaaagcagcaagatacatagtcctaccagtcacaacccatggtcctaagatgtttggagttgagaaaacagatgaaaggtacctccaaggacatgctcccacagcagcggaaagtgcacggttcccaacacccattaacaatatatgctttcaacagaattatgctttcatggacttacacactggtaagtcaaggacagttttctttaaatcaatagaatgataaaagtcatcatgctcttagcccacccgcacaaaggcacagattaactttagtctttatatagataagacccctatataagaaaaaccagaccaggccaaggctcacgcctgtaatcctagtattttgggaggctgagctggccagatcacctgagctcaggacttcgagaccagcctaagcaacatcagaaaatctcatcactacaaaaaacaaacaaaaaaccatcgaaaaattagctgggcatggtggcatgtacctatactcacagctcctcaggaggctgaggtgggaggcgcgcttgagcccaggaggtcaaggctgcagcgagctctgataacaccaccgcactccagcctcggtgacagagtgagacgctgtctcaagttttaataatcgaacctaaaaacgtacaaatttatcaatcgaattcactatattaacacatgaatgggaaaaaacgctgtggtaatcgaaatagatgcactgtttgatgaaaatcaacatatattcaaatgaatactctcagcaaatttggaacagaatgcaatgactcactctgataaagtccgtctacaaaaaaaggagagtgaataggatggcgaaatgttgaaatttttcggtttctcatcagggagaagacaaggatgtccactgtcaccattgtaacgggtgagtctgcacaatgccataaaatcagaaaaggaaataaaactctttacaatgccaacgacgggcccgccacggtggcccacgccagtaatcccagcactgtgggaggtgaggtgggtgcatcacttgcactcaaaagttcaacaacagcccgggaaacatggcaaaaccccgtctctacaaaaaaatacaaaagggaaaagaaaaaaatatggcggaaacaaaactgctcttattccaggatgatatgtttctgtatattgaagactgaaaacgacctagaagtaaactttagaattcacaagcatatttcacaaggccgctggatagaaaaccaatatgtaagaattatgtctccaccgggcacggaggctcatgcctgtaatcccagcactttgggaggccaaggcaggtgaatcacgaggtcaggagttcaagagcaccccggccaagatggcgaaagcccatctctagtaaaaacacaaaacttagccaggcgtgctggtgggtgcctataatcccagctactcgggaggctgaggcagacaattgcttgaatccgggaggcggggttgcagtgagcagagat

SEQ ID NO: 1563610 - DNA, 4001 bp, Homo sapiens
gctgcaaactacatagcctcctcgcttttccagtcaatttcaggcattctttccattgttttctttcctcctcttcctcctatgtgacaatgcctaacacacacacacgtgcacacacacacacgaacacacacacacgcacacaccagcagacgttcttcttccctttccctcaccttgacctgcagatgctccctcatcctctccctcctgagcagctgcaggatcctgacattgagttgctggttccccttcttcaggtgttgctggttccacttcatcactgaactgctcgggctggggaatacgtgtgggtgtgcaaataaaaaataagtttcgttattgatacaaaattttacatatatacacagaatacatagctatttctggtcctaactaagcctaaagacatttctccaactctatgctctatgcccaataaggttactccacccacagggaggttactgtgagaaaagtgacgcacgaggactttgggggctattatactctgtgttggaatacatgtgtacaatctgtcattaacaaacaaagccggagaaagaagtcatgggcaaaagctgaagaacacgagaggaaaaaaaaaatcctccagaatcaatgtttccttcatgagatgccatcctcattttttatgagcaggaaagacctttatcagcatttccacactaatgcaacgacgctatcacaaaaattaatttctactaatagaaaacatcgaattaacgtttaagcactcacccgcataggcccaatcatttcaggaggctgtacatagcgccttggtctaggccaataataggtcgatcttcctcgccaactcatatttcacactgaaaacagacaaccgtgattgggaacgtgcgctccagagggctgctatattcgatcacttccatggataaatgttaacttgccgttttacttttgaaaatactctcaaaataagtcccagagttaagcatacgtgtgtacgctgtctgagtgcctacaaagccacttctgctggccaggctggcagagcaatcatcttaaggcgtgtggcaaaaggcagaggacatttttttctaaatttcttttggacacgcggtctcgctgtgttgctcaggctggagtgcagcggcgtgatcacagctcactgcagcctcgacctcccgctcaagggatcctcccacctcagtgtccccagtaactgggaatacgtaggcgagcgccactgcgccccgcagacagaggtcatttctgatgaggtttagtttcacaagtgcactccccacgaaaaccctagtgaatcacaattctcgtgattgctgctttgggcacactcccacttcctagagccattcacccccactcacaacaagtttggttggaccgcactgcctcgcccactccttcccactgttttcggaccttccatggcggaggtgagaccttgcagtgcttctcactcgggcgctccgcactccacaccgctgagggggcgctcgccaggccgcagccttcccaggtgccaggccccttcttcaccgcccgcctcgcccccgccgggggccccattcagggaatctgccctgtgtcgtcggggatcccggcacctcgggacttccatccccccaacagcactcaccccgtcttcacctgagcccctgaccgcctcccctccacggcccaccttcctccccgtccaggccccttcacgaccacgaagccgccggtggcctcgcagcctgtgaagggaaggaggacgacctcgtggcccttctccctcggaggccacagaccaggaagcgggacccgcctgacccacccgaggccctctccaccctcactcacacttcagcccccgggatgactggcctgcacacctaccagatgaatctcagtagaggaaaaagagtccggacggcaggaaccacacagcactgcctcacagctccctggcgttcttcacgtgggcgaaggggccgggcagaagacgcccagtgaacatgcgcactgaggcgggagcccagggagcatgcgcggctgtgggctggggagggctgccgttcccagcgccacgccccaaaccctccatgcccatcctcattgaggataagggaatcccacctccctctgctgtttcctatgcctctgggactcaagtagtgctcccctcaaaactcaccccatcttcaactgaaccccacccccaacccagggccctctcttgccccggacccaccatggggacaaggaccactgtgactggctgggaagacaggtaaaccacctgcgaaaacagaaatagcaacctatcccaaaaggaaattgttcaatgtgaacaagtcagagaaagagactgaaagaaaaatgaatagaatcgctaggacccgtaagaaaatgctaaaacgatatctatcatttgtagcatcagaatcgcagagggtgaagtgacagtattagggaaacaggacagccagagtgacaccacgtgaaaatatactccgtcttgaaagcagcaagatacatagtcctaccagtcacaacccatggtcctaagatgtttggagttgagaaaacagatgaaaggtacctccaaggacatgctcccacagcagcggaaagtgcacggttcccaacacccattaacaatatatgctttcaacagaattatgctttcatggacttacacactggtaagtcaaggacagttttctttaaatcaatagaatgataaaagtcatcatgctcttagcccacccgcacaaaggcacagattaactttagtctttatatagataagacccctatataagaaaaaccagaccaggccaaggctcacgcctgtaatcctagtattttgggaggctgagctggccagatcacctgagctcaggacttcgagaccagcctaagcaacatcagaaaatctcatcactacaaaaaacaaacaaaaaaccatcgaaaaattagctgggcatggtggcatgtacctatactcacagctcctcaggaggctgaggtgggaggcgcgcttgagcccaggaggtcaaggctgcagcgagctctgataacaccaccgcactccagcctcggtgacagagtgagacgctgtctcaagttttaataatcgaacctaaaaacgtacaaatttatcaatcgaattcactatattaacacatgaatgggaaaaaacgctgtggtaatcgaaatagatgcactgtttgatgaaaatcaacatatattcaaatgaatactctcagcaaatttggaacagaatgcaatgactcactctgataaagtccgtctacaaaaaaaggagagtgaataggatggcgaaatgttgaaatttttcggtttctcatcagggagaagacaaggatgtccactgtcaccattgtaacgggtgggtctgcacaatgccataaaatcagaaaaggaaataaaactctttacaatgccaacgacgggcccgccacggtggcccacgccagtaatcccagcactgtgggaggtgaggtgggtgcatcacttgcactcaaaagttcaacaacagcccgggaaacatggcaaaaccccgtctctacaaaaaaatacaaaagggaaaagaaaaaaatatggcggaaacaaaactgctcttattccaggatgatatgtttctgtatattgaagactgaaaacgacctagaagtaaactttagaattcacaagcatatttcacaaggccgctggatagaaaaccaatatgtaagaattatgtctccaccgggcacggaggctcatgcctgtaatcccagcactttgggaggccaaggcaggtgaatcacgaggtcaggagttcaagagcaccccggccaagatggcgaaagcccatctctagtaaaaacacaaaacttagccaggcgtgctggtgggtgcctataatcccagctactcgggaggctgaggcagacaattgcttgaatccgggaggcggggttgcagtgagcagagat

SEQ ID NO: 1563611 - DNA, 4001 bp, Homo sapiens
gctgcaaactacatagcctcctcgcttttccagtcaatttcaggcattctttccattgttttctttcctcctcttcctcctatgtgacaatgcctaacacacacacacgtgcacacacacacaggaacacacacacacgcacacaccagcagacgttcttcttccctttccctcaccttgacctgcagatgctccctcatcctctccctcctgagcagctgcaggatcctgacattgagttgctggttccccttcttcaggtgttgctggttccacttcatcactgaactgctcgggctggggaatacgtgtgggtgtgcaaatagaaaataagtttcgttattgatacaaaattttacatatatacacagaatacatagctatttctggtcctaactaagcctaaagacatttctccaactctatgctctatgcccaataaggttactccacccacagggaggttactgtgagaaaagtgacgcacgaggactttgggggctattatactctgtgttggaatacatgtgtacaatctgtcattaacaaacaaagccggagaaagaagtcatgggcaaaagctgaagaacacgagaggaaaaaaaaaatcctccagaatcaatgtttccttcatgagatgccatcctcattttttatgagcaggaaagacctttatcagcatttccacactaatgcaacgacgctatcacaaaaattaatttctactaatagaaaacatcgaattaacgtttaagcactcacccgcataggcccaatcatttcaggaggctgtacatagcgccttggtctaggccaataataggtcgatcttcctcgccaactcatatttcacactgaaaacagacaaccgtgattgggaacgtgcgctccagagggctgctatattcgatcacttccatggataaatgttaacttgccgttttacttttgaaaatactctcaaaataagtcccagagttaagcatacgtgtgtacgctgtctgagtgcctacaaagccacttctgctggccaggctggcagagcaatcatcttaaggcgtgtggcaaaaggcagaggacatttttttctaaatttcttttggacacgcggtctcgctgtgttgctcaggctggagtgcagcggcgtgatcacagctcactgcagcctcgacctcccgctcaagggatcctcccacctcagtgtccccagtaactgggaatacgtaggcgagcgccactgcgccccgcagacagaggtcatttctgatgaggtttagtttcacaagtgcactccccacgaaaaccctagtgaatcacaattctcgtgattgctgctttgggcacactcccacttcctagagccattcaccccccctcacaacaagtttggttggaccgcactgcctcgcccactccttcccactgttttcggaccttccatggcggaggtgagaccttgcagtgcttctcactcgggcgctccgcactccacaccgctgagggggcgctcgccaggccgcagccttcccaggtgccaggccccttcttcaccgcccgcctcgcccccgccgggggccccattcagggaatctgccctgtgtcgtcggggatcccggcacctcgggacttccatccccccaacagcactcaccccgtcttcacctgagcccctgaccgcctcccctccacggcccaccttcctccccgtccaggccccttcacgaccacgaagccgccggtggcctcgcagcctgtgaagggaaggaggacgacctcgtggcccttctccctcggaggccacagaccaggaagcgggacccgcttgacccacccgaggccctctccaccctcactcacacttcagcccccgggatgactggcctgcacacctaccagatgaatctcagtagaggaaaaagagtccggacggcaggaaccacacagcactgcctcacagctccctggcgttcttcacgtgggcgaaggggccgggcagaagacgcccagtgaacatgcgcactgaggcgggagcccagggagcatgcgcggctgtgggctggggagggctgccgttcccagcgccacgccccaaaccctccatgcccatcctcattgaggataagggaatcccacctccctctgctgtttcctatgcctctgggactcaagtagtgctcccctcaaaactcaccccatcttcaactgaaccccacccccaacccagggccctctcttgccccggacccaccatggggacaaggaccactgtgactggctgggaagacaggtaaaccacctgcgaaaacagaaatagcaacctatcccaaaaggaaattgttcaatgtgaacaagtcagagaaagagactgaaagaaaaatgaatagaatcgctaggacccgtaagaaaatgctaaaacgatatctatcatttgtagcatcagaatcgcagagggtgaagtgacagtattagggaaacaggacagccagagtgacaccacgtgaaaatatactccgtcttgaaagcagcaagatacatagtcctaccagtcacaacccatggtcctaagatgtttggagttgagaaaacagatgaaaggtacctccaaggacatgctcccacagcagcggaaagtgcacggttcccaacacccattaacaatatatgctttcaacagaattatgctttcatggacttacacactggtaagtcaaggacagttttctttaaatcaatagaatgataaaagtcatcatgctcttagcccacccgcacaaaggcacagattaactttagtctttatatagataagacccctatataagaaaaaccagaccaggccaaggctcacgcctgtaatcctagtattttgggaggctgagctggccagatcacctgagctcaggacttcgagaccagcctaagcaacatcagaaaatctcatcactacaaaaaacaaacaaaaaaccatcgaaaaattagctgggcatggtggcatgtacctatactcacagctcctcaggaggctgaggtgggaggcgcacttgagcccaggaggtcaaggctgcagcgagctctgataacaccaccgcactccagcctcggtgacagagtgagacgctgtctcaagttttaataatcgaacctaaaaacgtacaaatttatcaatcgaattcactatattaacacatgaatgggaaaaaacgctgtggtaatcgaaatagatgcactgtttgatgaaaatcaacatatattcaaatgaatactctcagcaaatttggaacagaatgcaatgactcactctgataaagtccgtctacaaaaaaaggagagtgaataggatggcgaaatgttgaaatttttcggtttctcatcagggagaagacaaggatgtccactgtcaccattgtaacgggtgggtctgcgcaatgccataaaatcagaaaaggaaataaaactctttacaatgccaacgacgggcccgccacggtggcccacgccagtaatcccagcactgtgggaggtgaggtgggtgcatcacttgcactcaaaagttcaacaacagcccgggaaacatggcaaaaccccgtctctacaaaaaaatacaaaagggaaaagaaaaaaatatggcggaaacaaaactgctcttattccaggatgatatgtttctgtatattgaagactgaaaacgacctagaagtaaactttagaattcacaagcatatttcacaaggccgctggatagaaaaccaatatgtaagaattatgtctccaccgggcacggaggctcatgcctgtaatcccagcactttgggaggccaaggcaggtgaatcacgaggtcaggagttcaagagcaccccggccaagatggcgaaagcccatctctagtaaaaacacaaaacttagccaggcgtgctggtgggtgcctataatcccagctactcgggaggctgaggcagacaattgcttgaatccgggaggcggggttgcagtgagcagagat

SEQ ID NO: 1563612 - DNA, 4001 bp, Homo sapiens
aactacatagcctcctcgcttttccagtcaatttcaggcattctttccattgttttctttcctcctcttcctcctatgtgacaatgcctaacacacacacacacacgtgcacacacacacacacgaacacacacacacgcacacaccagcagacgttcttcttccctttccctcaccttgacctgcagatgctccctcatcctctccctcctgagcagctgcaggatcctgacgttgagttgctggttccccttcttcaggtgttgctggttccacttcatcactgaactgctcgggctggggaatacgtgtgggtgtgcaaataaaaaataagtttcgttattgatacaaaattttacatatatacacagaatacatagctatttctggtcctaactaagcctaaagacatttctccaactctatgctctatgcccaataaggttactccacccacagggaggttactgtgagaaaagtgacgcacgaggactttgggggctattatactctgtgttggaatacatgtgtacaatctgtcattaacaaacaaagccggagaaagaagtcatgggcaaaagctgaagaacacgagaggaaaaaaaaaatcctccagaatcaatgtttccttcatgagatgccatcctcattttttatgagcaggaaagacctttatcagcatttccacactaatgcaacgacgctatcacaaaaattaatttctactaatagaaaacatcgaattaacgtttaagcactcacccgcataggcccaatcatttcaggaggctgtacatagcgccttggtctaggccaataataggtcgatcttcctcgccaactcatatttcacactgaaaacagacaaccgtgattgggaacgtgcgctccagagggctgctatattcgatcacttccatggataaatgttaacttgccgttttacttttgaaaatactctcaaaataagtcccagagttaagcatacgtgtgtacgctgtctgagtgcctacaaagccacttctgctggccaggctggcagagcaatcatcttaaggcgtgtggcaaaaggcagaggacatttttttctaaatttcttttggacacgcggtctcgctgtgttgctcaggctggagtgcagcggcgtgatcacagctcactgcagcctcgacctcccgctcaagggatcctcccacctcagtgtccccagtaactgggaatacgtaggcgagcgccactgcgccccgcagacagaggtcatttctgatgaggtttagtttcacaagtgcactccccacgaaaaccctagtgaatcacaattctcgtgattgctgctttgggcacactcccacttcctagagccattcacccccactcacaacaagtttggttggaccgcactgcctcgcccactccttcccactgttttcggaccttccatggcggaggtgagaccttgcagtgcttctcactcgggcgctccgcactccacaccgctgagggggcgctcgccaggccgcagccttcccaggtgccaggccccttcttcaccgcccgcctcgcccccgccgggggccccattcagggaatctgccctgtgtcgtcggggatcccggcacctcgggacttccatccccccaacagcactcaccccgtcttcacctgagcccctgaccgcctcccctccacggcccaccttcctccccgtccaggccccttcacgaccacgaagccgccggtggcctcgcagcctgtgaagggaaggaggacgacctcgtggcccttctccctcggaggccacagaccaggaagcgggacccgcctgacccacccgaggccctctccaccctcactcacacttcagcccccgggatgactggcctgcacacctaccagatgaatctcagtagaggaaaaagagtccggacggcaggaaccacacagcactgcctcacagctccctggcgttcttcacgtgggcgaaggggccgggcagaagacgcccagtgaacatgcgcactgaggcgggagcccagggagcatgcgcggctgtgggctggggagggctgccgttcccagcgccacgccccaaaccctccatgcccatcctcattgaggataagggaatcccacctccctctgctgtttcctatgcctctgggactcaagtagtgctcccctcaaaactcaccccatcttcaactgaaccccacccccaacccagggccctctcttgccccggacccaccatggggacaaggaccactgtgactggctgggaagacaggtaaaccacctgcgaaaacagaaatagcaacctatcccaaaaggaaattgttcaatgtgaacaagtcagagaaagagactgaaagaaaaatgaatagaatcgctaggacccgtaagaaaatgctaaaacgatatctatcatttgtagcatcagaatcgcagagggtgaagtgacagtattagggaaacaggacagccagagtgacaccacgtgaaaatatactccgtcttgaaagcagcaagatacatagtcctaccagtcacaacccatggtcctaagatgtttggagttgagaaaacagatgaaaggtacctccaaggacatgctcccacagcagcggaaagtgcacggttcccaacacccattaacaatatatgctttcaacagaattatgctttcatggacttacacactggtaagtcaaggacagttttctttaaatcaatagaatgataaaagtcatcatgctcttagcccacccgcacaaaggcacagattaactttagtctttatatagataagacccctatataagaaaaaccagaccaggccaaggctcacgcctgtaatcctagtattttgggaggctgagctggccagatcacctgagctcaggacttcgagaccagcctaagcaacatcagaaaatctcatcactacaaaaaacaaacaaaaaaccatcgaaaaattagctgggcatggtggcatgtacctatactcacagctcctcaggaggctgaggtgggaggcgcgcttgagcccaggaggtcaaggctgcagcgagctctgataacaccaccgcactccagcctcggtgacagagtgagacgctgtctcaagttttaataatcgaacctaaaaacgtacaaatttatcaatcgaattcactatattaacacatgaatgggaaaaaacgctgtggtaatcgaaatagatgcactgtttgatgaaaatcaacatatattcaaatgaatactctcagcaaatttggaacagaatgcaatgactcactctgataaagtccgtctacaaaaaaaggagagtgaataggatggtgaaatgttgaaatttttcggtttctcatcagggataagacaaggatgtccactgtcaccattgtaacgggtgggtctgcgcaatgccataaaatcagaaaaggaaataaaactctttacaatggcaacgacgggcccgccacggtggcccacgccagtaatcccagcactgtgggaggtgaggtgggtgcatcacttgcactcaaaagttcaacaacagcccgggaaacatggcaaaaccccgtctctacaaaaaaatacaaaagggaaaagaaaaaaatatggcggaaacaaaactgctcttattccaggatgatatgtttctgtatattgaagactgaaaacgacctagaagtaaactttagaattcacaagcatatttcacaaggccgctggatagaaaaccaatatgtaagaattatgtctccaccgggcgcggaggctcatgcctgtaatcccagcactttgggaggccaaggcaggtgaatcacgaggtcaggagttcaagagcaccccggccaagatggcgaaagcccatctctagtaaaaacacaaaacttagccaggcgtgctggtgggtgcctataatcccagctactcgggaggctgaggcagacaattgcttgaatccgggaggcggggttgcagtgagcagagat

SEQ ID NO: 1563613 - DNA, 4001 bp, Homo sapiens
gctgcaaactacatagcctcctcgcttttccagtcaatttcaggcattctttccattgttttctttcctcctcttcctcctatgtgacaatgcctaacacacacacacgtgcacacacacacacgaacacacacacacgcacacaccagcagacgttcttcttccctttccctcaccttgacctgcagatgctccctcatcctctccctcctgagcagctgcaggatcctgacgttgagttgctggttccccttcttcaggtgttgctggttccacttcatcactgaactgctcgggctggggaatacgtgtgggtgtgcaaatagaaaataagtttcgttattgatacaaaattttacatatatacacagaatacatagctatttctggtcctaactaagcctaaagacatttctccaactctatgctctatgcccaataaggttactccacccacagggaggttactgtgagaaaagtgacgcacgaggactttgggggctattatactctgtgttggaatacatgtgtacaatctgtcattaacaaacaaagccggagaaagaagtcatgggcaaaagctgaagaacacgagaggaaaaaaaaaatcctccagaatcaatgtttccttcatgagatgccatcctcattttttatgagcaggaaagacctttatcagcatttccacactaatgcaacgacgctatcacaaaaattaatttctactaatagaaaacatcgaattaacgtttaagcactcacccgcataggcccaatcatttcaggaggctgtacatagcgccttggtctaggccaataataggtcgatcttcctcgccaactcatatttcacactgaaaacagacaaccgtgattgggaacgtgcgctccagagggctgctatattcgatcacttccatggataaatgttaacttgccgttttacttttgaaaatactctcaaaataagtcccagagttaagcatacgtgtgtacgctgtctgagtgcctacaaagccacttctgctggccaggctggcagagcaatcatcttaaggcgtgtggcaaaaggcagaggacatttttttctaaatttcttttggacacgcggtctcgctgtgttgctcaggctggagtgcagcggcgtgatcacagctcactgcagcctcgacctcccgctcaagggatcctcccacctcagtgtccccagtaactgggaatacgtaggcgagcgccactgcgccccgcagacagaggtcatttctgatgaggtttagtttcacaagtgcactccccacgaaaaccctagtgaatcacaattctcgtgattgctgctttgggcacactcccacttcctagagccattcacccccactcacaacaagtttggttggaccgcactgcctcgcccactccttcccactgttttcggaccttccatggcggaggtgagaccttgcagtgcttctcactcgggcgctccgcactccacaccgctgagggggcgctcgccaggccgcagccttcccaggtgccaggccccttcttcaccgcccgcctcgcccccgccgggggccccattcagggaatctgccctgtgtcgtcggggatcccggcacctcgggacttccatccccccaacagcactcaccccgtcttcacctgagcccctgaccgcctcccctccacggcccaccttcctccccgtccaggccccttcacgaccacgaagccgccggtggcctcgcagcctgtgaagggaaggaggacgacctcgtggcccttctccctcggaggccacagaccaggaagcgggacccgcctgacccacccgaggccctctccaccctcactcacacttcagcccccgggatgactggcctgcacacctaccagatgaatctcagtagaggaaaaagagtccggacggcaggaaccacacagcactgcctcacagctccctggcgttcttcacgtgggcgaaggggccgggcagaagacgcccagtgaacatgcgcactgaggcgggagcccagggagcatgcgcggctgtgggctggggagggctgccgttcccagcgccacgccccaaaccctccatgcccatcctcattgaggataagggaatcccacctccctctgctgtttcctatgcctctgggactcaagtagtgctcccctcaaaactcaccccatcttcaactgaaccccacccccaacccagggccctctcttgccccggacccaccatggggacaaggaccactgtgactggctgggaagacaggtaaaccacctgcgaaaacagaaatagcaacctatcccaaaaggaaattgttcaatgtgaacaagtcagagaaagagactgaaagaaaaatgaatagaatcgctaggacccgtaagaaaatgctaaaacgatatctatcatttgtagcatcagaatcgcagagggtgaagtgacagtattagggaaacaggacagccagagtgacaccacgtgaaaatatactccgtcttgaaagcagcaagatacatagtcctaccagtcacaacccatggtcctaagatgtttggagttgagaaaacagatgaaaggtacctccaaggacatgctcccacagcagcggaaagtgcacggttcccaacacccattaacaatatatgctttcaacagaattatgctttcatggacttacacactggtaagtcaaggacagttttctttaaatcaatagaatgataaaagtcatcatgctcttagcccacccgcacaaaggcacagattaactttagtctttatatagataagacccctatataagaaaaaccagaccaggccaaggctcacgcctgtaatcctagtattttgggaggctgagctggccagatcacctgagctcaggacttcgagaccagcctaagcaacatcagaaaatctcatcactacaaaaaacaaacaaaaaaccatcgaaaaattagctgggcatggtggcatgtacctatactcacagctcctcaggaggctgaggtgggaggcgcgcttgagcccagcaggtcaaggctgcagcgagctctgataacaccaccgcactccagcctcggtgacagagtgagacgctgtctcaagttttaataatcgaacctaaaaacgtacaaatttatcaatcgaattcactatattaacacatgaatgggaaaaaacgctgtggtaatcgaaatagatgcactgtttgatgaaaatcaacatatattcaaatgaatactctcagcaaatttggaacagaatgcaatgactcactctgataaagtccgtctacaaaaaaaggagagtgaataggatggtgaaatgttgaaatttttcggtttctcatcagggataagacaaggatgtccactgtcaccattgtaacgggtgggtctgcgcaatgccataaaatcagaaaaggaaataaaactctttacaatggcaatgacgggcccgccacggtggcccacgccagtaatcccagcactgtgggaggtgaggtgggtgcatcacttgcactcaaaagttcaacaacagcccgggaaacatggcaaaaccccgtctctacaaaaaaatacaaaagggaaaagaaaaaaatatggcggaaacaaaactgctcttattccaggatgatatgtttctgtatattgaagactgaaaacgacctagaagtaaactttagaattcacaagcatatttcacaaggccgctggatagaaaaccaatatgtaagaattatgtctccaccgggcacggaggctcatgcctgtaatcccagcactttgggaggccaaggcaggtgaatcacgaggtcaggagttcaagagcaccccggccaagatggcgaaagcccatctctagtaaaaacacaaaacttagccaggcgtgctggtgggtgcctataatcccagctactcgggaggctgaggcagacaattgcttgaatccgggaggcggggttgcagtgagcagagat

SEQ ID NO: 1563614 - DNA, 4001 bp, Homo sapiens
gctgcaaactacatagcctcctcgcttttccagtcaatttcaggcattctttccattgttttctttcctcctcttcctcctatgtgacaatgcctaacacacacacacgtgcacacacacacacgaacacacacacacgcacacaccagcagacgttcttcttccctttccctcaccttgacctgcagatgctccctcatcctctcccttctgagcagctgcaggatcctgacattgagttgctggttccccttcttcaggtgttgctggttccacttcatcactgaactgctcgggctggggaatacgtgtgggtgtgcaaataaaaaataagtttcgttattgatacaaaattttacatatatacacagaatacatagctatttctggtcctaactaagcctaaagacatttctccaactctatgctctatgcccaataaggttactccacccacagggaggttactgtgagaaaagtgacgcacgaggactttgggggctattatactctgtgttggaatacatgtgtacaatctgtcattaacaaacaaagccggagaaagaagtcatgggcaaaagctgaagaacacgagaggaaaaaaaaaatcctccagaatcaatgtttccttcatgagatgccatcctcattttttatgagcaggaaagacctttatcagcatttccacactaatgcaacgacgctatcacaaaaattaatttctactaatagaaaacatcgaattaacgtttaagcactcacccgcataggcccaatcatttcaggaggctgtacatagcgccttggtctaggccaataataggtcgatcttcctcgccaactcatatttcacactgaaaacagacaaccgtgattgggaacgtgcgctccagagggctgctatattcgatcacttccatggataaatgttaacttgccgttttacttttgaaaatactctcaaaataagtcccagagttaagcatacgtgtgtacgctgtctgagtgcctacaaagccacttctgctggccaggctggcagagcaatcatcttaaggcgtgtggcaaaaggcagaggacatttttttctaaatttcttttggacacgcggtctcgctgtgttgctcaggctggagtgcagcggcgtgatcacagctcactgcagcctcgacctcccgctcaagggatcctcccacctcagtgtccccagtaactgggaatacgtaggcgagcgccactgcgccccgcagacagaggtcatttctgatgaggtttagtttcacaagtgcactccccacgaaaaccctagtgaatcacaattctcgtgattgctgctttgggcacactcccacttcctagagccattcacccccactcacaacaagtttggttggaccgcactgcctcgcccactccttcccactgttttcggaccttccatggcggaggtgagaccttgcagtgcttctcactcgggcgctccgcactccacaccgctgagggggcgctcgccaggccgcagccttcccaggtgccaggccccttcttcaccgcccgcctcgcccccgccgggggccccattcagggaatctgccctgtgtcgtcggggatcccggcacctcgggacttccatccccccaacagcactcaccccgtcttcacctgagcccctgaccgcctcccctccacggcccaccttcctccccgtccaggccccttcacgaccacgaagccgccggtggcctcgcagcctgtgaagggaaggaggacgacctcgtggcccttctccctcggaggccacagaccaggaagcgggacccgcctgacccacccgaggccctctccaccctcactcacacttcagcccccgggatgactggcctgcacacctaccagatgaatctcagtagaggaaaaagagtccggacggcaggaaccacacagcactgcctcacagctccctggcgttcttcacgtgggcgaaggggccgggcagaagacgcccagtgaacatgcgcactgaggcgggagcccagggagcatgcgcggctgtgggctggggagggctgccgttcccagcgccacgccccaaaccctccatgcccatcctcattgaggataagggaatcccacctccctctgctgtttcctatgcctctgggactcaagtagtgctcccctcaaaactcaccccatcttcaactgaaccccacccccaacccagggccctctcttgccccggacccaccatggggacaaggaccactgtgactggctgggaagacaggtaaaccacctgcgaaaacagaaatagcaacctatcccaaaaggaaattgttcaatgtgaacaagtcagagaaagagactgaaagaaaaatgaatagaatcgctaggacccgtaagaaaatgctaaaacgatatctatcatttgtagcatcagaatcgcagagggtgaagtgacagtattagggaaacaggacagccagagtgacaccacgtgaaaatatactccgtcttgaaagcagcaagatacatagtcctaccagtcacaacccatggtcctaagatgtttggagttgagaaaacagatgaaaggtacctccaaggacatgctcccacagcagcggaaagtgcacggttcccaacacccattaacaatatatgctttcaacagaattatgctttcatggacttacacactggtaagtcaaggacagttttctttaaatcaatagaatgataaaagtcatcatgctcttagcccacccgcacaaaggcacagattaactttagtctttatatagataagacccctatataagaaaaaccagaccaggccaaggctcacgcctgtaatcctagtattttgggaggctgagctggccagatcacctgagctcaggacttcgagaccagcctaagcaacatcagaaaatctcatcactacaaaaaacaaacaaaaaaccatcgaaaaattagctgggcatggtggcatgtacctatactcacagctcctcaggaggctgaggtgggaggcgcgcttgagcccaggaggtcaaggctgcagcgagctctgataacaccaccgcactccagcctcggtgacagagtgagacgctgtctcaagttttaataatcgaacctaaaaacgtacaaatttatcaatcgaattcactatattaacacatgaatgggaaaaaacgctgtggtaatcgaaatagatgcactgtttgatgaaaatcaacatatattcaaatgaatactctcagcaaatttggaacagaatgcaatgactcactctgataaagtccgtctacaaaaaaaggagagtgaataggatggcgaaatgttgaaatttttcggtttctcatcagggagaagacaaggatgtccactgtcaccattgtaacgggtgggtctgcacaatgccataaaatcagaaaaggaaataaaactctttacaatgccaacgacgggcccgccacggtggcccacgccagtaatcccagcactgtgggaggtgaggtgggtgcatcacttgcactcaaaagttcaacaacagcccgggaaacatggcaaaaccccgtctctacaaaaaaatacaaaagggaaaagaaaaaaatatggcggaaacaaaactgctcttattccaggatgatatgtttctgtatattgaagactgaaaacgacctagaagtaaactttagaattcacaagcatatttcacaaggccgctggatagaaaaccaatatgtaagaattatgtctccaccgggcacggaggctcatgcctgtaatcccagcactttgggaggccaaggcaggtgaatcacgaggtcaggagttcaagagcaccccggccaagatggcgaaagcccatctctagtaaaaacacaaaacttagccaggcgtgctggtgggtgcctataatcccagctactcgggaggctgaggcagacaattgcttgaatccgggaggcggggttgcagtgagcagagat

SEQ ID NO: 1563615 - DNA, 4001 bp, Homo sapiens
ccagtcaatttcaggcattctttccattgttttctttcctcctcttcctcctatgtgacaatgcctaacacacacacacacacacacacacacacatgcacacacacacacgaacacacacacacgcacacaccagcagacgttcttcttccctttccctcaccttgacctgcagatgctccctcatcctctccctcctgagcagctgcaggatcctgacgttgagttgctggttccccttcttcaggtgttgctggttccacttcatcactgaactgctcgggctggggaatacgtgtgggtgtgcaaataaaaaataagtttcgttattgatacaaaattttacatatatacacagaatacatagctatttctggtcctaactaagcctaaagacatttctccaactctatgctctatgcccaataaggttactccacccacagggaggttactgtgagaaaagtgacgcacgaggactttggaggctattgtactctgtgttggaatacatgtgtacaatctgtcattaacaaacaaagccggagaaagaagtcatgggcaaaagctgaagaacacgagaggaaaaaaaaaatcctccagaatcaatgtttccttcatgagatgccatcatcattttttatgagcaggaaagacctttatcagcatttccacactaatgcaacaacgctatcacaaaaattaatttctactaatagaaaacatcgaattaacgttcaagcactcacccgcataggcccaatcatttcaggaggctgtacatagggtcttggtctaggccaataataggtcgatcttcctcgccaactcatatttcacactgaaaacagacaaccgtgattgggaacgtgcgctccacagggctgctatattcgatcacttccatggataaatgtaaacttgccgttttacttttgaaaatactctcaagataagtcccagagttaagcatacgtgtgtacgctgtctgagtgcctacaaagccacttctgctggccaggctggcagagcaatcatcttaaggcatgtggcaaaaggcagaggacatttttttctaaatttcttttggacacgcggtctcgctgtgttgctcaggctggagtgcagcggcgtgatcacagctcactgcagcctcgacctcccgctcaagggatcctcccacctcagtgtcccgagtaactgggactacgtaggcgagcgccactgcgccccgcagacagaggtcatttctgatgaggtttagtttcacaagtgcactccccacgaaaaccctagtgaatcacaattctcgtgattgctgctttgggcacactcccacttcctagagccattcaccccccctcacaacaagtttggttggaccgcactgcctcgcccactccttcccactgttttcggaccttccatggcggaggtgagaccttgcagtgcttctcactcaggcgctccgcactccacaccgctggggggggcgctcaccaggccgcagccttcccaggtgccaggccccttcttcaccgcccgcctcgcccccgccggaggccccattcagggaatctgccctgtgtcgtcgggggttcccggcacctcgggacttccatccccccaacagcactcaccccatcttcacctgagcccctgaccgcctcccctccacggcccaccttcctccccgtccaggccccttcacgaccacgaagccgccggtggcctcgcagcctgtgaagggaaggaggacgacctcgtggcccttctccctcggaggccacagaccaggaagcgggacccgcctgacccacccaaggccctctccaccctcactcacacttcagcccccgggatgactggcctgcagacctaccagatgaatctcagtagaggaaaaagagtccggacggcaggaaccacacagcactgcctcacagctccctggcgttcttcacgtgggcgaaggggccgggcagaagacgcccagtgaacatgcgcactgaggcgggagcccagggagcatgcgcggctgtgggctggggagggctgccgttcccagcgccacgccccaaaccctccatgcccatcctcattgaggataagggaatcccacctccctctgctgtttcctatgcctctgggactcaagtagtgctcccctcaaaactcaccccatcttcaactgaaccccacccccaacccagggccctctcttgccccggacccaccatggggacaaggaccactgtgactggctgggaagacaggtaaaccacctgcgaaaacagaaatagcaacctatcccaaaaggaaattgttcattgtgaacaagtcagagaaagagactgaaagaaaaatgaatagaatcgctaggacccgtaagaaaatgctaaaacgatatctatcatttgtagcatcagaatcacagagggtgaagtgacagtattagggaaacaggacagccagagtgaaaccacgtgaaaatatactccgtcttgaaagcagcaagatacatagtcctaccagtcacaacccatggtcctaagatgtttggagttgagaaaacagatgaaaggtacctccaaggacatgctcccacagcagcggaaagtgcacggttcccaacacccattaacaatatatgctttcaacagaattatgctttcatggccttacacactggtaagtcaaggatagttttctttaaatcaatagaatgataaaagtcatcatgctcttagcccacccgcacaaaggcacagattaactttagtctttatatagataagacccctatataagaaaaaccagaccaggccaaggctcacgcctgtaatcctagtattttgggaggctgagctggccagatcacctgagctcaggacttcgagaccagcctaagcaacatcagaaaatctcatcactacaaaaaacaaacaaaaaaccatcgaaaaattagctgggcatggtggcatgtacctatactcacagctactcaggaggctgaggtgggaggagcgcctgagcccaggaggtcaaggctgcagcgagctctgataacaccactgcactccagcctcggtgacagagtgagacgctgtctcaagttttaataatcgaacctaaaaacgtacaaatttatcaatcgaattcactatattaacacatgaatgggaaaaaacgctgtggtaatcgaaatagatgcactgtttgatgaaaatcaacatatattcaaatgaatactctcagcaaatttggaacagaatggaatgactcactctgataaagtccatctacaaaaaaaggagagtgaataggatggtgaaatgttgaaatttttcggtttctcatcagggataagacaaggatgtccactgtcaccattgtaacgggtgggtctgcgcaatgccataaaatcagaaaaggaaataaaactctttacaatggcaacgacgggcccgccacggtggcccacgccagtaatcccagcactgtgggagatgacgtgggtgcatcacttgcactcaaaagttcaacaacagcccgggaaacatggcaaaaccccgtctctacaaaaaaatacaaaagggaaaagaaaaaaaaatggcggaaacaaaactgctcttattccaggatgatatgtttctgtatattgaagactgaaaacgacctagaagtaaactttagaattcacaagcatatttcacaaggccgctggatagaaaaccaatatgtaagaattatgtctccaccgggcgcggaggctcatgcctgtaatcccagcactttgggaggccaaggcaggtgaatcacgaggtcaggagttcaagagcaccccggccaagatggcgaaagcccatctctagtaaaaacacaaaacttagccaggcgtgctggtgggtgcctataatcccagctactcgggaggctgaggcagacaattgcttgaatccgggaggcggggttgcagtgagcagagatcgcgccactgc

SEQ ID NO: 1563616 - DNA, 4001 bp, Homo sapiens
catagcctcctcgcttttccagtcaatttcaggcattctttccattgttttctttcctcctcttcctcctatgtgacaatgcctaacacacacacacgtgcacacacacacacgaacacacacacacgcacacaccagcagacgttcttcttccctttccctcaccttgacctgcagatgctccctcatcctctccctcctgagcagctgcaggatcctgacattgagttgctggttccccttcttcaggtgttgctggttccacttcatcactgaactgctcgggctggggaatacgtgtgggtgtgcaaatagaaaataagtttcgttattgatacaaaattttacatatatacacagaatacatagctatttctggtcctaactaagcctaaagacatttctccaactctatgctctatgcccaataaggttactccacccacagggaggttactgtgagaaaagtgacgcacgaggactttgggggctattatactctgtgttggaatacatgtgtacaatctgtcattaacaaacaaagccggagaaagaagtcatgggcaaaagctgaagaacacgagaggaaaaaaaaaatcctccagaatcaatgtttccttcatgagatgccatcctcattttttatgagcaggaaagacctttatcagcatttccacactaatgcaacgacgctatcacaaaaattaatttctactaatagaaaacatcgaattaacgtttaagcactcacccgcataggcccaatcatttcaggaggctgtacatagcgccttggtctaggccaataataggtcgatcttcctcgccaactcatatttcacactgaaaacagacaaccgtgattgggaacgtgcgctccagagggctgctatattcgatcacttccatggataaatgttaacttgccgttttacttttgaaaatactctcaaaataagtcccagagttaagcatacgtgtgtacgctgtctgagtgcctacaaagccacttctgctggccaggctggcagagcaatcatcttaaggcgtgtggcaaaaggcagaggacatttttttctaaatttcttttggacacgcggtctcgctgtgttgctcaggctggagtgcagcggcgtgatcacagctcactgcagcctcgacctcccgctcaagggatcctcccacctcagtgtccccagtaactgggaatacgtaggcgagcgccactgcgccccgcagacagaggtcatttctgatgaggtttagtttcacaagtgcactccccacgaaaaccctagtgaatcacaattctcgtgattgctgctttgggcacactcccacttcctagagccattcacccccactcacaacaagtttggttggaccgcactgcctcgcccactccttcccactgttttcggaccttccatggcggaggtgagaccttgcagtgcttctcactcgggcgctccgcactccacaccgctgagggggcactcgccaggccgcagccttcccaggtgccaggccccttcttcaccgcccgcctcgcccccgccgggggccccattcagggaatctgccctgtgtcgtcggggatcccggcacctcgggacttccatccccccaacagcactcaccccgtcttcacctgagcccctgaccgcctcccctccacggcccaccttcctccccgtccaggccccttcacgaccacgaagccgccggtggcctcgcagcctgtgaagggaaggaggacgacctcgtggcccttctccctcggaggccacagaccaggaagcgggacccgcctgacccacccgaggccctctccaccctcactcacacttcagcccccgggatgactggcctgcacacctaccagatgaatctcagtagaggaaaaagagtccggacggcaggaaccacacagcactgcctcacagctccctggcgttcttcacgtgggcgaaggggccgggcagaagacgcccagtgaacatgcgcactgaggcgggagcccagggagcatgcgcggctgtgggctggggagggctgccgttcccagcgccacgccccaaaccctccatgcccatcctcattgaggataagggaatcccacctccctctgctgtttcctatgcctctgggactcaagtagtgctcccctcaaaactcaccccatcttcaactgaaccccacccccaacccagggccctctcttgccccggacccaccatggggacaaggaccactgtgactggctgggaagacaggtaaaccacctgcgaaaacagaaatagcaacctatcccaaaaggaaattgttcaatgtgaacaagtcagagaaagagactgaaagaaaaatgaatagaatcgctaggacccgtaagaaaatgctaaaacgatatctatcatttgtagcatcagaatcgcagagggtgaagtgacagtattagggaaacaggacagccagagtgacaccacgtgaaaatatactccgtcttgaaagcagcaagatacatagtcctaccagtcacaacccatggtcctaagatgtttggagttgagaaaacagatgaaaggtacctccaaggacatgctcccacagcagcggaaagtgcacggttcccaacacccattaacaatatatgctttcaacagaattatgctttcatggacttacacactggtaagtcaaggacagttttctttaaatcaatagaatgataaaagtcatcatgctcttagcccacccgcacaaaggcacagattaactttagtctttatatagataagacccctatataagaaaaaccagaccaggccaaggctcacgcctgtaatcctagtattttgggaggctgagctggccagatcacctgagctcaggacttcgagaccagcctaagcaacatcagaaaatctcatcactacaaaaaacaaacaaaaaaccatcgaaaaattagctgggcatggtggcatgtacctatactcacagctcctcaggaggctgaggtgggaggcgcgcttgagcccaggaggtcaaggctgcagcgagctctgataacaccaccgcactccagcctcggtgacagagtgagacgctgtctcaagttttaataatcgaacctaaaaacgtacaaatttatcaatcgaattcactatattaacacatgaatgggaaaaaacgctgtggtaatcgaaatagatgcactgtttgatgaaaatcaacatatattcaaatgaatactctcagcaaatttggaacagaatgcaatgactcactctgataaagtccgtctacaaaaaaaggagagtgaataggatggcgaaatgttgaaatttttcggtttctcatcagggagaagacaaggatgtccactgtcaccattgtaacgggtgagtctgcacaatgccataaaatcagaaaaggaaataaaactctttacaatgccaacgacgggcccgccacggtggcccacgccagtaatcccagcactgtgggaggtgaggtgggtgcatcacttgcactcaaaagttcaacaacagcccgggaaacatggcaaaaccccgtctctacaaaaaaatacaaaagggaaaagaaaaaaatatggcggaaacaaaactgctcttattccaggatgatatgtttctgtatattgaagactgaaaacgacctagaagtaaactttagaattcacaagcatatttcacaaggccgctggatagaaaaccaatatgtaagaattatgtctccaccgggcacggaggctcatgcctgtaatcccagcactttgggaggccaaggcaggtgaatcacgaggtcaggagttcaagagcaccccggccaagatggcgaaagcccatctctagtaaaaacacaaaacttagccaggcgtgctggtgggtgcctataatcccagctactcgggaggctgaggcagacaattgcttgaatccgggaggcggggttgcagtgagcagagatcgcgccactgc

SEQ ID NO: 1563617 - DNA, 4001 bp, Homo sapiens
catagcctcctcgcttttccagtcaatttcaggcattctttccattgttttctttcctcctcttcctcctatgtgacaatgcctaacacacacacacgtgcacacacacacacgaacacacacacacgcacacaccagcagacgttcttcttccctttccctcaccttgacctgcagatgctccctcatcctctccctcctgagcagctgcaggatcctgacattgagttgctggttccccttcttcaggtgttgctggttccacttcatcactgaactgctcgggctggggaatacgtgtgggtgtgcaaataaaaaataagtttcgttattgatacaaaattttacatatatacacagaatacatagctatttctggtcctaactaagcctaaagacatttctccaactctatgctctatgcccaataaggttactccacccacagggaggttactgtgagaaaagtgacgcacgaggactttgggggctattatactctgtgttggaatacatgtgtacaatctgtcattaacaaacaaagccggagaaagaagtcatgggcaaaagctgaagaacacgagaggaaaaaaaaaatcctccagaatcaatgtttccttcatgagatgccatcctcattttttatgagcaggaaagacctttatcagcatttccacactaatgcaacgacgctatcacaaaaattaatttctactaatagaaaacatcgaattaacgtttaagcactcacccgcataggcccaatcatttcaggaggctgtacatagcgccttggtctaggccaataataggtcgatcttcctcgccaactcatatttcacactgaaaacagacaaccgtgattgggaacgtgcgctccagagggctgctatattcgatcacttccatggataaatgttaacttgccgttttacttttgaaaatactctcaaaataagtcccagagttaagcatacgtgtgtacgctgtctgagtgcctacaaagccacttctgctggccaggctggcagagcaatcatcttaaggcgtgtggcaaaaggcagaggacatttttttctaaatttcttttggacacgcggtctcgctgtgttgctcaggctggagtgcagcggcgtgatcacagctcactgcagcctcgacctcccgctcaagggatcctcccacctcagtgtccccagtaactgggaatacgtaggcgagcgccactgcgccccgcagacagaggtcatttctgatgaggtttagtttcacaagtgcactccccacgaaaaccctagtgaatcacaattctcgtgattgctgctttgggcacactcccacttcctagagccattcacccccactcacaacaagtttggttggaccgcactgcctcgcccactccttcccactgttttcggaccttccatggcggaggtgagaccttgcagtgcttctcactcgggcgctccgcactccacaccgctgagggggcgctcgccaggccgcagccttcccaggtgccaggccccttcttcaccgcccgcctcgcccccgccgggggccccattcagggaatctgccctgtgtcgtcggggatcccggcacctcgggacttccatccccccaacagcactcaccccgtcttcacctgagcccctgaccgcctcccctccacggcccaccttcctccccgtccaggccccttcacgaccacgaagccgccggtggcctcgcagcctgtgaagggaaggaggacgacctcgtggcccttctccctcggaggccacagaccaggaagcgggacccgcctgacccacccgaggccctctccaccctcactcacacttcagcccccgggatgactggcctgcacacctaccagatgaatctcagtagaggaaaaagagtccggacggcaggaaccacacagcactgcctcacagctccctggcgttcttcacgtgggcgaaggggccgggcagaagacgcccagtgaacatgcgcactgaggcgggagcccagggagcatgcgcggctgtgggctggggagggctgccgttcccagcgccacgccccaaaccctccatgcccatcctcattgaggataagggaatcccacctccctctgctgtttcctatgcctctgggactcaagtagtgctcccctcaaaactcaccccatcttcaactgaaccccacccccaacccagggccctctcttgccccggacccaccatggggacaaggaccactgtgactggctgggaagacaggtaaaccacctgcgaaaacagaaatagcaacctatcccaaaaggaaattgttcaatgtgaacaagtcagagaaagagactgaaagaaaaatgaatagaatcgctaggacccgtaagaaaatgctaaaacgatatctatcatttgtagcatcagaatcgcagagggtgaagtgacagtattagggaaacaggacagccagagtgacaccacgtgaaaatatactccgtcttgaaagcagcaagatacatagtcctaccagtcacaacccatggtcctaagatgtttggagttgagaaaacagatgaaaggtacctccaaggacatgctcccacagcagcggaaagtgcacggttcccaacacccattaacaatatatgctttcaacagaattatgctttcatggacttacacactggtaagtcaaggacagttttctttaaatcaatagaatgataaaagtcatcatgctcttagcccacccgcacaaaggcacagattaactttagtctttatatagataagacccctatataagaaaaaccagaccaggccaaggctcacgcctgtaatcctagtattttgggaggctgagctggccagatcacctgagctcaggacttcgagaccagcctaagcaacatcagaaaatctcatcactacaaaaaacaaacaaaaaaccatcgaaaaattagctgggcatggtggcatgtacctatactcacagctcctcaggaggctgaggtgggaggcgcgcttgagcccaggaggtcaaggctgcagcgagctctgataacaccaccgcactccagcctcggtgacagagtgagacgctgtctcaagttttaataatcgaacctaaaaacgtacaaatttatcaatcgaattcactatattaacacatgaatgggaaaaaacgctgtggtaatcgaaatagatgcactgtttgatgaaaatcaacatatattcaaatgaatactctcagcaaatttggaacagaatgcaatgactcactctgataaagtccgtctacaaaaaaaggagagtgaataggatggcgaaatgttgaaatttttcggtttctcatcagggagaagacaaggatgtccactgtcaccattgtaacgggtgggtctgcacaatgccataaaatcagaaaaggaaataaaactctttacaatgccaacgacgggcccgccacggtggcccacgccagtaatcccagcactgtgggaggtgaggtgggtgcatcacttgcactcaaaagttcaacaacagcccgggaaacatggcaaaaccccgtctctacaaaaaaatacaaaagggaaaagaaaaaaatatggcggaaacaaaactgctcttattccaggatgatatgtttctgtatattgaagactgaaaacgacctagaagtaaactttagaattcacaagcatatttcacaaggccgctggatagaaaaccaatatgtaagaattatgtctccaccgggcacggaggctcatgcctgtaatcccagcactttgggaggccaaggcaggtgaatcacgaggtcaggagttcaagagcaccccggccaagatggcgaaagcccatctctagtaaaaacacaaaacttagccaggcgtgctggtgggtgcctataatcccagctactcgggaggctgaggcagacaattgcttgaatccgggaggcggggttgcagtgagcagagatcgcgccactgc

SEQ ID NO: 1563618 - DNA, 4001 bp, Homo sapiens
catagcctcctcgcttttccagtcaatttcaggcattctttccattgttttctttcctcctcttcctcctatgtgacaatgcctaacacacacacacgtgcacacacacacaggaacacacacacacgcacacaccagcagacgttcttcttccctttccctcaccttgacctgcagatgctccctcatcctctccctcctgagcagctgcaggatcctgacattgagttgctggttccccttcttcaggtgttgctggttccacttcatcactgaactgctcgggctggggaatacgtgtgggtgtgcaaatagaaaataagtttcgttattgatacaaaattttacatatatacacagaatacatagctatttctggtcctaactaagcctaaagacatttctccaactctatgctctatgcccaataaggttactccacccacagggaggttactgtgagaaaagtgacgcacgaggactttgggggctattatactctgtgttggaatacatgtgtacaatctgtcattaacaaacaaagccggagaaagaagtcatgggcaaaagctgaagaacacgagaggaaaaaaaaaatcctccagaatcaatgtttccttcatgagatgccatcctcattttttatgagcaggaaagacctttatcagcatttccacactaatgcaacgacgctatcacaaaaattaatttctactaatagaaaacatcgaattaacgtttaagcactcacccgcataggcccaatcatttcaggaggctgtacatagcgccttggtctaggccaataataggtcgatcttcctcgccaactcatatttcacactgaaaacagacaaccgtgattgggaacgtgcgctccagagggctgctatattcgatcacttccatggataaatgttaacttgccgttttacttttgaaaatactctcaaaataagtcccagagttaagcatacgtgtgtacgctgtctgagtgcctacaaagccacttctgctggccaggctggcagagcaatcatcttaaggcgtgtggcaaaaggcagaggacatttttttctaaatttcttttggacacgcggtctcgctgtgttgctcaggctggagtgcagcggcgtgatcacagctcactgcagcctcgacctcccgctcaagggatcctcccacctcagtgtccccagtaactgggaatacgtaggcgagcgccactgcgccccgcagacagaggtcatttctgatgaggtttagtttcacaagtgcactccccacgaaaaccctagtgaatcacaattctcgtgattgctgctttgggcacactcccacttcctagagccattcaccccccctcacaacaagtttggttggaccgcactgcctcgcccactccttcccactgttttcggaccttccatggcggaggtgagaccttgcagtgcttctcactcgggcgctccgcactccacaccgctgagggggcgctcgccaggccgcagccttcccaggtgccaggccccttcttcaccgcccgcctcgcccccgccgggggccccattcagggaatctgccctgtgtcgtcggggatcccggcacctcgggacttccatccccccaacagcactcaccccgtcttcacctgagcccctgaccgcctcccctccacggcccaccttcctccccgtccaggccccttcacgaccacgaagccgccggtggcctcgcagcctgtgaagggaaggaggacgacctcgtggcccttctccctcggaggccacagaccaggaagcgggacccgcttgacccacccgaggccctctccaccctcactcacacttcagcccccgggatgactggcctgcacacctaccagatgaatctcagtagaggaaaaagagtccggacggcaggaaccacacagcactgcctcacagctccctggcgttcttcacgtgggcgaaggggccgggcagaagacgcccagtgaacatgcgcactgaggcgggagcccagggagcatgcgcggctgtgggctggggagggctgccgttcccagcgccacgccccaaaccctccatgcccatcctcattgaggataagggaatcccacctccctctgctgtttcctatgcctctgggactcaagtagtgctcccctcaaaactcaccccatcttcaactgaaccccacccccaacccagggccctctcttgccccggacccaccatggggacaaggaccactgtgactggctgggaagacaggtaaaccacctgcgaaaacagaaatagcaacctatcccaaaaggaaattgttcaatgtgaacaagtcagagaaagagactgaaagaaaaatgaatagaatcgctaggacccgtaagaaaatgctaaaacgatatctatcatttgtagcatcagaatcgcagagggtgaagtgacagtattagggaaacaggacagccagagtgacaccacgtgaaaatatactccgtcttgaaagcagcaagatacatagtcctaccagtcacaacccatggtcctaagatgtttggagttgagaaaacagatgaaaggtacctccaaggacatgctcccacagcagcggaaagtgcacggttcccaacacccattaacaatatatgctttcaacagaattatgctttcatggacttacacactggtaagtcaaggacagttttctttaaatcaatagaatgataaaagtcatcatgctcttagcccacccgcacaaaggcacagattaactttagtctttatatagataagacccctatataagaaaaaccagaccaggccaaggctcacgcctgtaatcctagtattttgggaggctgagctggccagatcacctgagctcaggacttcgagaccagcctaagcaacatcagaaaatctcatcactacaaaaaacaaacaaaaaaccatcgaaaaattagctgggcatggtggcatgtacctatactcacagctcctcaggaggctgaggtgggaggcgcacttgagcccaggaggtcaaggctgcagcgagctctgataacaccaccgcactccagcctcggtgacagagtgagacgctgtctcaagttttaataatcgaacctaaaaacgtacaaatttatcaatcgaattcactatattaacacatgaatgggaaaaaacgctgtggtaatcgaaatagatgcactgtttgatgaaaatcaacatatattcaaatgaatactctcagcaaatttggaacagaatgcaatgactcactctgataaagtccgtctacaaaaaaaggagagtgaataggatggcgaaatgttgaaatttttcggtttctcatcagggagaagacaaggatgtccactgtcaccattgtaacgggtgggtctgcgcaatgccataaaatcagaaaaggaaataaaactctttacaatgccaacgacgggcccgccacggtggcccacgccagtaatcccagcactgtgggaggtgaggtgggtgcatcacttgcactcaaaagttcaacaacagcccgggaaacatggcaaaaccccgtctctacaaaaaaatacaaaagggaaaagaaaaaaatatggcggaaacaaaactgctcttattccaggatgatatgtttctgtatattgaagactgaaaacgacctagaagtaaactttagaattcacaagcatatttcacaaggccgctggatagaaaaccaatatgtaagaattatgtctccaccgggcacggaggctcatgcctgtaatcccagcactttgggaggccaaggcaggtgaatcacgaggtcaggagttcaagagcaccccggccaagatggcgaaagcccatctctagtaaaaacacaaaacttagccaggcgtgctggtgggtgcctataatcccagctactcgggaggctgaggcagacaattgcttgaatccgggaggcggggttgcagtgagcagagatcgcgccactgc

SEQ ID NO: 1563619 - DNA, 4001 bp, Homo sapiens
ctcctcgcttttccagtcaatttcaggcattctttccattgttttctttcctcctcttcctcctatgtgacaatgcctaacacacacacacacacgtgcacacacacacacacgaacacacacacacgcacacaccagcagacgttcttcttccctttccctcaccttgacctgcagatgctccctcatcctctccctcctgagcagctgcaggatcctgacgttgagttgctggttccccttcttcaggtgttgctggttccacttcatcactgaactgctcgggctggggaatacgtgtgggtgtgcaaataaaaaataagtttcgttattgatacaaaattttacatatatacacagaatacatagctatttctggtcctaactaagcctaaagacatttctccaactctatgctctatgcccaataaggttactccacccacagggaggttactgtgagaaaagtgacgcacgaggactttgggggctattatactctgtgttggaatacatgtgtacaatctgtcattaacaaacaaagccggagaaagaagtcatgggcaaaagctgaagaacacgagaggaaaaaaaaaatcctccagaatcaatgtttccttcatgagatgccatcctcattttttatgagcaggaaagacctttatcagcatttccacactaatgcaacgacgctatcacaaaaattaatttctactaatagaaaacatcgaattaacgtttaagcactcacccgcataggcccaatcatttcaggaggctgtacatagcgccttggtctaggccaataataggtcgatcttcctcgccaactcatatttcacactgaaaacagacaaccgtgattgggaacgtgcgctccagagggctgctatattcgatcacttccatggataaatgttaacttgccgttttacttttgaaaatactctcaaaataagtcccagagttaagcatacgtgtgtacgctgtctgagtgcctacaaagccacttctgctggccaggctggcagagcaatcatcttaaggcgtgtggcaaaaggcagaggacatttttttctaaatttcttttggacacgcggtctcgctgtgttgctcaggctggagtgcagcggcgtgatcacagctcactgcagcctcgacctcccgctcaagggatcctcccacctcagtgtccccagtaactgggaatacgtaggcgagcgccactgcgccccgcagacagaggtcatttctgatgaggtttagtttcacaagtgcactccccacgaaaaccctagtgaatcacaattctcgtgattgctgctttgggcacactcccacttcctagagccattcacccccactcacaacaagtttggttggaccgcactgcctcgcccactccttcccactgttttcggaccttccatggcggaggtgagaccttgcagtgcttctcactcgggcgctccgcactccacaccgctgagggggcgctcgccaggccgcagccttcccaggtgccaggccccttcttcaccgcccgcctcgcccccgccgggggccccattcagggaatctgccctgtgtcgtcggggatcccggcacctcgggacttccatccccccaacagcactcaccccgtcttcacctgagcccctgaccgcctcccctccacggcccaccttcctccccgtccaggccccttcacgaccacgaagccgccggtggcctcgcagcctgtgaagggaaggaggacgacctcgtggcccttctccctcggaggccacagaccaggaagcgggacccgcctgacccacccgaggccctctccaccctcactcacacttcagcccccgggatgactggcctgcacacctaccagatgaatctcagtagaggaaaaagagtccggacggcaggaaccacacagcactgcctcacagctccctggcgttcttcacgtgggcgaaggggccgggcagaagacgcccagtgaacatgcgcactgaggcgggagcccagggagcatgcgcggctgtgggctggggagggctgccgttcccagcgccacgccccaaaccctccatgcccatcctcattgaggataagggaatcccacctccctctgctgtttcctatgcctctgggactcaagtagtgctcccctcaaaactcaccccatcttcaactgaaccccacccccaacccagggccctctcttgccccggacccaccatggggacaaggaccactgtgactggctgggaagacaggtaaaccacctgcgaaaacagaaatagcaacctatcccaaaaggaaattgttcaatgtgaacaagtcagagaaagagactgaaagaaaaatgaatagaatcgctaggacccgtaagaaaatgctaaaacgatatctatcatttgtagcatcagaatcgcagagggtgaagtgacagtattagggaaacaggacagccagagtgacaccacgtgaaaatatactccgtcttgaaagcagcaagatacatagtcctaccagtcacaacccatggtcctaagatgtttggagttgagaaaacagatgaaaggtacctccaaggacatgctcccacagcagcggaaagtgcacggttcccaacacccattaacaatatatgctttcaacagaattatgctttcatggacttacacactggtaagtcaaggacagttttctttaaatcaatagaatgataaaagtcatcatgctcttagcccacccgcacaaaggcacagattaactttagtctttatatagataagacccctatataagaaaaaccagaccaggccaaggctcacgcctgtaatcctagtattttgggaggctgagctggccagatcacctgagctcaggacttcgagaccagcctaagcaacatcagaaaatctcatcactacaaaaaacaaacaaaaaaccatcgaaaaattagctgggcatggtggcatgtacctatactcacagctcctcaggaggctgaggtgggaggcgcgcttgagcccaggaggtcaaggctgcagcgagctctgataacaccaccgcactccagcctcggtgacagagtgagacgctgtctcaagttttaataatcgaacctaaaaacgtacaaatttatcaatcgaattcactatattaacacatgaatgggaaaaaacgctgtggtaatcgaaatagatgcactgtttgatgaaaatcaacatatattcaaatgaatactctcagcaaatttggaacagaatgcaatgactcactctgataaagtccgtctacaaaaaaaggagagtgaataggatggtgaaatgttgaaatttttcggtttctcatcagggataagacaaggatgtccactgtcaccattgtaacgggtgggtctgcgcaatgccataaaatcagaaaaggaaataaaactctttacaatggcaacgacgggcccgccacggtggcccacgccagtaatcccagcactgtgggaggtgaggtgggtgcatcacttgcactcaaaagttcaacaacagcccgggaaacatggcaaaaccccgtctctacaaaaaaatacaaaagggaaaagaaaaaaatatggcggaaacaaaactgctcttattccaggatgatatgtttctgtatattgaagactgaaaacgacctagaagtaaactttagaattcacaagcatatttcacaaggccgctggatagaaaaccaatatgtaagaattatgtctccaccgggcgcggaggctcatgcctgtaatcccagcactttgggaggccaaggcaggtgaatcacgaggtcaggagttcaagagcaccccggccaagatggcgaaagcccatctctagtaaaaacacaaaacttagccaggcgtgctggtgggtgcctataatcccagctactcgggaggctgaggcagacaattgcttgaatccgggaggcggggttgcagtgagcagagatcgcgccactgc

SEQ ID NO: 1563620 - DNA, 4001 bp, Homo sapiens
catagcctcctcgcttttccagtcaatttcaggcattctttccattgttttctttcctcctcttcctcctatgtgacaatgcctaacacacacacacgtgcacacacacacacgaacacacacacacgcacacaccagcagacgttcttcttccctttccctcaccttgacctgcagatgctccctcatcctctccctcctgagcagctgcaggatcctgacgttgagttgctggttccccttcttcaggtgttgctggttccacttcatcactgaactgctcgggctggggaatacgtgtgggtgtgcaaatagaaaataagtttcgttattgatacaaaattttacatatatacacagaatacatagctatttctggtcctaactaagcctaaagacatttctccaactctatgctctatgcccaataaggttactccacccacagggaggttactgtgagaaaagtgacgcacgaggactttgggggctattatactctgtgttggaatacatgtgtacaatctgtcattaacaaacaaagccggagaaagaagtcatgggcaaaagctgaagaacacgagaggaaaaaaaaaatcctccagaatcaatgtttccttcatgagatgccatcctcattttttatgagcaggaaagacctttatcagcatttccacactaatgcaacgacgctatcacaaaaattaatttctactaatagaaaacatcgaattaacgtttaagcactcacccgcataggcccaatcatttcaggaggctgtacatagcgccttggtctaggccaataataggtcgatcttcctcgccaactcatatttcacactgaaaacagacaaccgtgattgggaacgtgcgctccagagggctgctatattcgatcacttccatggataaatgttaacttgccgttttacttttgaaaatactctcaaaataagtcccagagttaagcatacgtgtgtacgctgtctgagtgcctacaaagccacttctgctggccaggctggcagagcaatcatcttaaggcgtgtggcaaaaggcagaggacatttttttctaaatttcttttggacacgcggtctcgctgtgttgctcaggctggagtgcagcggcgtgatcacagctcactgcagcctcgacctcccgctcaagggatcctcccacctcagtgtccccagtaactgggaatacgtaggcgagcgccactgcgccccgcagacagaggtcatttctgatgaggtttagtttcacaagtgcactccccacgaaaaccctagtgaatcacaattctcgtgattgctgctttgggcacactcccacttcctagagccattcacccccactcacaacaagtttggttggaccgcactgcctcgcccactccttcccactgttttcggaccttccatggcggaggtgagaccttgcagtgcttctcactcgggcgctccgcactccacaccgctgagggggcgctcgccaggccgcagccttcccaggtgccaggccccttcttcaccgcccgcctcgcccccgccgggggccccattcagggaatctgccctgtgtcgtcggggatcccggcacctcgggacttccatccccccaacagcactcaccccgtcttcacctgagcccctgaccgcctcccctccacggcccaccttcctccccgtccaggccccttcacgaccacgaagccgccggtggcctcgcagcctgtgaagggaaggaggacgacctcgtggcccttctccctcggaggccacagaccaggaagcgggacccgcctgacccacccgaggccctctccaccctcactcacacttcagcccccgggatgactggcctgcacacctaccagatgaatctcagtagaggaaaaagagtccggacggcaggaaccacacagcactgcctcacagctccctggcgttcttcacgtgggcgaaggggccgggcagaagacgcccagtgaacatgcgcactgaggcgggagcccagggagcatgcgcggctgtgggctggggagggctgccgttcccagcgccacgccccaaaccctccatgcccatcctcattgaggataagggaatcccacctccctctgctgtttcctatgcctctgggactcaagtagtgctcccctcaaaactcaccccatcttcaactgaaccccacccccaacccagggccctctcttgccccggacccaccatggggacaaggaccactgtgactggctgggaagacaggtaaaccacctgcgaaaacagaaatagcaacctatcccaaaaggaaattgttcaatgtgaacaagtcagagaaagagactgaaagaaaaatgaatagaatcgctaggacccgtaagaaaatgctaaaacgatatctatcatttgtagcatcagaatcgcagagggtgaagtgacagtattagggaaacaggacagccagagtgacaccacgtgaaaatatactccgtcttgaaagcagcaagatacatagtcctaccagtcacaacccatggtcctaagatgtttggagttgagaaaacagatgaaaggtacctccaaggacatgctcccacagcagcggaaagtgcacggttcccaacacccattaacaatatatgctttcaacagaattatgctttcatggacttacacactggtaagtcaaggacagttttctttaaatcaatagaatgataaaagtcatcatgctcttagcccacccgcacaaaggcacagattaactttagtctttatatagataagacccctatataagaaaaaccagaccaggccaaggctcacgcctgtaatcctagtattttgggaggctgagctggccagatcacctgagctcaggacttcgagaccagcctaagcaacatcagaaaatctcatcactacaaaaaacaaacaaaaaaccatcgaaaaattagctgggcatggtggcatgtacctatactcacagctcctcaggaggctgaggtgggaggcgcgcttgagcccagcaggtcaaggctgcagcgagctctgataacaccaccgcactccagcctcggtgacagagtgagacgctgtctcaagttttaataatcgaacctaaaaacgtacaaatttatcaatcgaattcactatattaacacatgaatgggaaaaaacgctgtggtaatcgaaatagatgcactgtttgatgaaaatcaacatatattcaaatgaatactctcagcaaatttggaacagaatgcaatgactcactctgataaagtccgtctacaaaaaaaggagagtgaataggatggtgaaatgttgaaatttttcggtttctcatcagggataagacaaggatgtccactgtcaccattgtaacgggtgggtctgcgcaatgccataaaatcagaaaaggaaataaaactctttacaatggcaatgacgggcccgccacggtggcccacgccagtaatcccagcactgtgggaggtgaggtgggtgcatcacttgcactcaaaagttcaacaacagcccgggaaacatggcaaaaccccgtctctacaaaaaaatacaaaagggaaaagaaaaaaatatggcggaaacaaaactgctcttattccaggatgatatgtttctgtatattgaagactgaaaacgacctagaagtaaactttagaattcacaagcatatttcacaaggccgctggatagaaaaccaatatgtaagaattatgtctccaccgggcacggaggctcatgcctgtaatcccagcactttgggaggccaaggcaggtgaatcacgaggtcaggagttcaagagcaccccggccaagatggcgaaagcccatctctagtaaaaacacaaaacttagccaggcgtgctggtgggtgcctataatcccagctactcgggaggctgaggcagacaattgcttgaatccgggaggcggggttgcagtgagcagagatcgcgccactgc

SEQ ID NO: 1563621 - DNA, 4001 bp, Homo sapiens
catagcctcctcgcttttccagtcaatttcaggcattctttccattgttttctttcctcctcttcctcctatgtgacaatgcctaacacacacacacgtgcacacacacacacgaacacacacacacgcacacaccagcagacgttcttcttccctttccctcaccttgacctgcagatgctccctcatcctctcccttctgagcagctgcaggatcctgacattgagttgctggttccccttcttcaggtgttgctggttccacttcatcactgaactgctcgggctggggaatacgtgtgggtgtgcaaataaaaaataagtttcgttattgatacaaaattttacatatatacacagaatacatagctatttctggtcctaactaagcctaaagacatttctccaactctatgctctatgcccaataaggttactccacccacagggaggttactgtgagaaaagtgacgcacgaggactttgggggctattatactctgtgttggaatacatgtgtacaatctgtcattaacaaacaaagccggagaaagaagtcatgggcaaaagctgaagaacacgagaggaaaaaaaaaatcctccagaatcaatgtttccttcatgagatgccatcctcattttttatgagcaggaaagacctttatcagcatttccacactaatgcaacgacgctatcacaaaaattaatttctactaatagaaaacatcgaattaacgtttaagcactcacccgcataggcccaatcatttcaggaggctgtacatagcgccttggtctaggccaataataggtcgatcttcctcgccaactcatatttcacactgaaaacagacaaccgtgattgggaacgtgcgctccagagggctgctatattcgatcacttccatggataaatgttaacttgccgttttacttttgaaaatactctcaaaataagtcccagagttaagcatacgtgtgtacgctgtctgagtgcctacaaagccacttctgctggccaggctggcagagcaatcatcttaaggcgtgtggcaaaaggcagaggacatttttttctaaatttcttttggacacgcggtctcgctgtgttgctcaggctggagtgcagcggcgtgatcacagctcactgcagcctcgacctcccgctcaagggatcctcccacctcagtgtccccagtaactgggaatacgtaggcgagcgccactgcgccccgcagacagaggtcatttctgatgaggtttagtttcacaagtgcactccccacgaaaaccctagtgaatcacaattctcgtgattgctgctttgggcacactcccacttcctagagccattcacccccactcacaacaagtttggttggaccgcactgcctcgcccactccttcccactgttttcggaccttccatggcggaggtgagaccttgcagtgcttctcactcgggcgctccgcactccacaccgctgagggggcgctcgccaggccgcagccttcccaggtgccaggccccttcttcaccgcccgcctcgcccccgccgggggccccattcagggaatctgccctgtgtcgtcggggatcccggcacctcgggacttccatccccccaacagcactcaccccgtcttcacctgagcccctgaccgcctcccctccacggcccaccttcctccccgtccaggccccttcacgaccacgaagccgccggtggcctcgcagcctgtgaagggaaggaggacgacctcgtggcccttctccctcggaggccacagaccaggaagcgggacccgcctgacccacccgaggccctctccaccctcactcacacttcagcccccgggatgactggcctgcacacctaccagatgaatctcagtagaggaaaaagagtccggacggcaggaaccacacagcactgcctcacagctccctggcgttcttcacgtgggcgaaggggccgggcagaagacgcccagtgaacatgcgcactgaggcgggagcccagggagcatgcgcggctgtgggctggggagggctgccgttcccagcgccacgccccaaaccctccatgcccatcctcattgaggataagggaatcccacctccctctgctgtttcctatgcctctgggactcaagtagtgctcccctcaaaactcaccccatcttcaactgaaccccacccccaacccagggccctctcttgccccggacccaccatggggacaaggaccactgtgactggctgggaagacaggtaaaccacctgcgaaaacagaaatagcaacctatcccaaaaggaaattgttcaatgtgaacaagtcagagaaagagactgaaagaaaaatgaatagaatcgctaggacccgtaagaaaatgctaaaacgatatctatcatttgtagcatcagaatcgcagagggtgaagtgacagtattagggaaacaggacagccagagtgacaccacgtgaaaatatactccgtcttgaaagcagcaagatacatagtcctaccagtcacaacccatggtcctaagatgtttggagttgagaaaacagatgaaaggtacctccaaggacatgctcccacagcagcggaaagtgcacggttcccaacacccattaacaatatatgctttcaacagaattatgctttcatggacttacacactggtaagtcaaggacagttttctttaaatcaatagaatgataaaagtcatcatgctcttagcccacccgcacaaaggcacagattaactttagtctttatatagataagacccctatataagaaaaaccagaccaggccaaggctcacgcctgtaatcctagtattttgggaggctgagctggccagatcacctgagctcaggacttcgagaccagcctaagcaacatcagaaaatctcatcactacaaaaaacaaacaaaaaaccatcgaaaaattagctgggcatggtggcatgtacctatactcacagctcctcaggaggctgaggtgggaggcgcgcttgagcccaggaggtcaaggctgcagcgagctctgataacaccaccgcactccagcctcggtgacagagtgagacgctgtctcaagttttaataatcgaacctaaaaacgtacaaatttatcaatcgaattcactatattaacacatgaatgggaaaaaacgctgtggtaatcgaaatagatgcactgtttgatgaaaatcaacatatattcaaatgaatactctcagcaaatttggaacagaatgcaatgactcactctgataaagtccgtctacaaaaaaaggagagtgaataggatggcgaaatgttgaaatttttcggtttctcatcagggagaagacaaggatgtccactgtcaccattgtaacgggtgggtctgcacaatgccataaaatcagaaaaggaaataaaactctttacaatgccaacgacgggcccgccacggtggcccacgccagtaatcccagcactgtgggaggtgaggtgggtgcatcacttgcactcaaaagttcaacaacagcccgggaaacatggcaaaaccccgtctctacaaaaaaatacaaaagggaaaagaaaaaaatatggcggaaacaaaactgctcttattccaggatgatatgtttctgtatattgaagactgaaaacgacctagaagtaaactttagaattcacaagcatatttcacaaggccgctggatagaaaaccaatatgtaagaattatgtctccaccgggcacggaggctcatgcctgtaatcccagcactttgggaggccaaggcaggtgaatcacgaggtcaggagttcaagagcaccccggccaagatggcgaaagcccatctctagtaaaaacacaaaacttagccaggcgtgctggtgggtgcctataatcccagctactcgggaggctgaggcagacaattgcttgaatccgggaggcggggttgcagtgagcagagatcgcgccactgc

SEQ ID NO: 1563622 - DNA, 4001 bp, Homo sapiens; identical to SEQ ID NO: 1563609

SEQ ID NO: 1563623 - DNA, 4001 bp, Homo sapiens; identical to SEQ ID NO: 1563610

SEQ ID NO: 1563624 - DNA, 4001 bp, Homo sapiens; identical to SEQ ID NO: 1563611

SEQ ID NO: 1563625 - DNA, 4001 bp, Homo sapiens; identical to SEQ ID NO: 1563612

SEQ ID NO: 1563626 - DNA, 4001 bp, Homo sapiens; identical to SEQ ID NO: 1563613

SEQ ID NO: 1563627 - DNA, 4001 bp, Homo sapiens; identical to SEQ ID NO: 1563614

SEQ ID NO: 1563628 - DNA, 4001 bp, Homo sapiens
aatttcaggcattctttccattgttttctttcctcctcttcctcctatgtgacaatgcctaacacacacacacgtgcacacacacacacgaacacacacacacgcacacaccagcagacgttcttcttccctttccctcaccttgacctgcagatgctccctcatcctctccctcctgagcagctgcaggatcctgacgttgagttgctggttccccttcttcaggtgttgctggttccacttcatcactgaactgctcgggctggggaatacgtgtgggtgtgcaaataaaaaataagtttcgttattgatacaaaattttacatatatacacagaatacatagctatttctggtcataactaagcctaaagacatttctccaactctatgctctatgcccaataaggttactccaaccacagggaggttactgtgagaaaagtgacacacgaggactttgggggctattatactctgtgttggaatacatgtgtacaatctgtcattaacaaacaaagccggagaaagaagtcatgggcaaaagctgaagaacacgagaggaaaaaaaaaatcctccagaatcaatgtttccttcatgagatgccatcctcattttttatgagcaggaaagacctttatcagcatttccacactaatgcaacgacgctatcacaaaaattaatttctactaatagaaaacatcgaattaacgtttaagcactcacccgcataggcccaatcatttcaggaggctgtacatagcgccttggtctaggccaataataggtcgatcttcctcgccaactcatatttcacactgaaaacagacaaccgtgattgggaacgtgcgctccagagggctgctatattcgatcacttccatggataaatgttaacttgccgttttacttttgaaaatactctcaaaataagtcccagagttaagcatacgtgtgtacgctgtctgagtgcctacaaagccacttctgctggccaggctggcagagcaatcatcttaaggcgtgtggcaaaaggcagaggacatttttttctaaatttcttttggacacgcggtctcgctgtgttgctcaggctggagtgcagcggcgtgatcacagctcactgcagcctcgacctcccgctcaagggatcctcccacctcagtgtccccagtaactgggaatacgtaggcgagcgccactgcgccccgcagacagaggtcatttctgatgaggtttagtttcacaagtgcactccccacgaaaaccctagtgaatcacaattctcgtgattgctgctttgggcacactcccacttcctagagccattcaccccccctcacaacaagtttggttggaccgcactgcctcgcccactccttcccactgttttcggaccttccatggcggaggtgagaccttgcagtgcttctcactcgggcgctccgcactccacaccgctggggggggcgctcgccaggccgcagccttcccaggtgccaggccccttcttcaccgcccgcctcgcccccgccgggggccccattcagggaatctgccctgtgtcgtcggggatcccggcacctcgggacttccatccccccaacagcactcaccccgtcttcacctgagcccctgaccgcctcccctccacggcccaccttcctccccgtccaggccccttcacgaccacgaagccgccggtggcctcgcagcctgtgaagggaaggaggacgacctcgtggcccttctccctcggaggccacagaccaggaagcgggacccgcctgacccacccgaggccctctccaccctcactcacacttcagcccccgggatgactggcctgcacacctaccagatgaatctcagtagaggaaaaagagtccggacggcaggaaccacacagcactgcctcacagctccctggcgttcttcacgtgggcgaaggggccgggcagaaggcgcccagtgaacatgcgcactgaggcgggagcccagggagcatgcgcggctgtgggctggggagggctgccgttcccagcgccacgccccaaaccctccatgcccatcctcattgaggataagggaatcccacctccctctgctgtttcctatgcctctgggactcaagtagtgctcccctcaaaactcaccccatcttcaactgaaccccacccccaacccagggccctctcttgccccggacccaccatggggacaaggaccactgtgactggctgggaagacaggtaaaccacctgcgaaaacagaaatagcaacctatcccaaaaggaaattgttcaatgtgaacaagtcagagaaagagactgaaagaaaaatgaatagaatcgctaggacccgtaagaaaatgctaaaacgatatctatcatttgtagcatcagaatcgcagagggtgaagtgacagtattagggaaacaggacagccagagtgacaccacgtgaaaatatactccgtcttgaaagcagcaagatacatagtcctaccagtcacaacccatggtcctaagatgtttggagttgagaaaacagatgaaaggtacctccaaggacatgctcccacagcagcggaaagtgcacggttcccaacacccattaacaatatatgctttcaacagaattatgctttcatggacttacacactggtaagtcaaggacagttttctttaaatcaatagaatgataaaagtcatcatgctcttagcccacccgcacaaaggaacagattaactttagtctttatatagataagacccctatataagaaaaaccagaccaggccaaggctcacgcctgtaatcctagtattttgggaggctgagctggccagatcacctgagctcaggacttcgagaccagcctaagcaacatcagaaaatctcatcactacaaaaaacaaacaaaaaaaccatcaaaaaattagctgggcatggtggcatgtacctatactcacagctactcaggaggctgaggtgggaggagcgcttgagcccaggaggtcaaggctgcagcgagctctgataacaccaccgcactccagcctcggtgacagagtgagacgctgtctcaagttttaataatcgaacctaaaaacgtacaaatttatcaatcgaattcactatattaacccatgaatgggaaaaaacgctgtggtaatcgaaatagatgcactgtttgatgaaaatcaacatatattcaaatgaatactctcagcaaatttggaacagaatggaatgactcactctagataaagtctgtctacaaaaaaagaagagtgaataggatggcgaaatgttgaaatttttcggtttctcatcagggataagacaaggatgtccactgtcaccattgtaacgggtgggtctgcgcaatgccataaaatcagaaaaggaaataaaactctttacaatggcaacgacgggcccgccacggtggcccacgccagtaatcccagcactgtgggaggtgacgtgggtgcatcacttgcactcaaaagttcaacaacagcccgggaaacatggcaaaaccccgtctctacaaaaaaatacaaaagggaaaagaaaaaaaaatggcggaaacaaaactgctcttattccaggatgatatgtttctgtatattgaagactgaaaacgacctagaagtaaactttagaattcacaagcatatttcacaaggccgctggatagaaaaccaatatgtaagaattatgtctccaccgggcgcggaggctcatgcctgtaatcccagcactttgggaggccaaggcaggtgaatcacgaggtcaggagttcaagagcaccccggccaagatggcgaaagcccatctctagtaaaaacacaaaacttagccaggcgtgctggtgggtgcctataatcccagctactcgggaggctgaggcagacaattgcttgaatccgggaggcggggttgcagtgagcagagatcgcgccactgcactccagcctgggcgacagag

SEQ ID NO: 1563629 - DNA, 4001 bp, Homo sapiens
caatttcaggcattctttccattgttttctttcctcctcttcctcctatgtgacaatgcctaacacacacacacgtgcacacacacacacgaacacacacacacgcacacaccagcagacgttcttcttccctttccctcaccttgacctgcagatgctccctcatcctctccctcctgagcagctgcaggatcctgacattgagttgctggttccccttcttcaggtgttgctggttccacttcatcactgaactgctcgggctggggaatacgtgtgggtgtgcaaatagaaaataagtttcgttattgatacaaaattttacatatatacacagaatacatagctatttctggtcctaactaagcctaaagacatttctccaactctatgctctatgcccaataaggttactccacccacagggaggttactgtgagaaaagtgacgcacgaggactttgggggctattatactctgtgttggaatacatgtgtacaatctgtcattaacaaacaaagccggagaaagaagtcatgggcaaaagctgaagaacacgagaggaaaaaaaaaatcctccagaatcaatgtttccttcatgagatgccatcctcattttttatgagcaggaaagacctttatcagcatttccacactaatgcaacgacgctatcacaaaaattaatttctactaatagaaaacatcgaattaacgtttaagcactcacccgcataggcccaatcatttcaggaggctgtacatagcgccttggtctaggccaataataggtcgatcttcctcgccaactcatatttcacactgaaaacagacaaccgtgattgggaacgtgcgctccagagggctgctatattcgatcacttccatggataaatgttaacttgccgttttacttttgaaaatactctcaaaataagtcccagagttaagcatacgtgtgtacgctgtctgagtgcctacaaagccacttctgctggccaggctggcagagcaatcatcttaaggcgtgtggcaaaaggcagaggacatttttttctaaatttcttttggacacgcggtctcgctgtgttgctcaggctggagtgcagcggcgtgatcacagctcactgcagcctcgacctcccgctcaagggatcctcccacctcagtgtccccagtaactgggaatacgtaggcgagcgccactgcgccccgcagacagaggtcatttctgatgaggtttagtttcacaagtgcactccccacgaaaaccctagtgaatcacaattctcgtgattgctgctttgggcacactcccacttcctagagccattcacccccactcacaacaagtttggttggaccgcactgcctcgcccactccttcccactgttttcggaccttccatggcggaggtgagaccttgcagtgcttctcactcgggcgctccgcactccacaccgctgagggggcactcgccaggccgcagccttcccaggtgccaggccccttcttcaccgcccgcctcgcccccgccgggggccccattcagggaatctgccctgtgtcgtcggggatcccggcacctcgggacttccatccccccaacagcactcaccccgtcttcacctgagcccctgaccgcctcccctccacggcccaccttcctccccgtccaggccccttcacgaccacgaagccgccggtggcctcgcagcctgtgaagggaaggaggacgacctcgtggcccttctccctcggaggccacagaccaggaagcgggacccgcctgacccacccgaggccctctccaccctcactcacacttcagcccccgggatgactggcctgcacacctaccagatgaatctcagtagaggaaaaagagtccggacggcaggaaccacacagcactgcctcacagctccctggcgttcttcacgtgggcgaaggggccgggcagaagacgcccagtgaacatgcgcactgaggcgggagcccagggagcatgcgcggctgtgggctggggagggctgccgttcccagcgccacgccccaaaccctccatgcccatcctcattgaggataagggaatcccacctccctctgctgtttcctatgcctctgggactcaagtagtgctcccctcaaaactcaccccatcttcaactgaaccccacccccaacccagggccctctcttgccccggacccaccatggggacaaggaccactgtgactggctgggaagacaggtaaaccacctgcgaaaacagaaatagcaacctatcccaaaaggaaattgttcaatgtgaacaagtcagagaaagagactgaaagaaaaatgaatagaatcgctaggacccgtaagaaaatgctaaaacgatatctatcatttgtagcatcagaatcgcagagggtgaagtgacagtattagggaaacaggacagccagagtgacaccacgtgaaaatatactccgtcttgaaagcagcaagatacatagtcctaccagtcacaacccatggtcctaagatgtttggagttgagaaaacagatgaaaggtacctccaaggacatgctcccacagcagcggaaagtgcacggttcccaacacccattaacaatatatgctttcaacagaattatgctttcatggacttacacactggtaagtcaaggacagttttctttaaatcaatagaatgataaaagtcatcatgctcttagcccacccgcacaaaggcacagattaactttagtctttatatagataagacccctatataagaaaaaccagaccaggccaaggctcacgcctgtaatcctagtattttgggaggctgagctggccagatcacctgagctcaggacttcgagaccagcctaagcaacatcagaaaatctcatcactacaaaaaacaaacaaaaaaccatcgaaaaattagctgggcatggtggcatgtacctatactcacagctcctcaggaggctgaggtgggaggcgcgcttgagcccaggaggtcaaggctgcagcgagctctgataacaccaccgcactccagcctcggtgacagagtgagacgctgtctcaagttttaataatcgaacctaaaaacgtacaaatttatcaatcgaattcactatattaacacatgaatgggaaaaaacgctgtggtaatcgaaatagatgcactgtttgatgaaaatcaacatatattcaaatgaatactctcagcaaatttggaacagaatgcaatgactcactctgataaagtccgtctacaaaaaaaggagagtgaataggatggcgaaatgttgaaatttttcggtttctcatcagggagaagacaaggatgtccactgtcaccattgtaacgggtgagtctgcacaatgccataaaatcagaaaaggaaataaaactctttacaatgccaacgacgggcccgccacggtggcccacgccagtaatcccagcactgtgggaggtgaggtgggtgcatcacttgcactcaaaagttcaacaacagcccgggaaacatggcaaaaccccgtctctacaaaaaaatacaaaagggaaaagaaaaaaatatggcggaaacaaaactgctcttattccaggatgatatgtttctgtatattgaagactgaaaacgacctagaagtaaactttagaattcacaagcatatttcacaaggccgctggatagaaaaccaatatgtaagaattatgtctccaccgggcacggaggctcatgcctgtaatcccagcactttgggaggccaaggcaggtgaatcacgaggtcaggagttcaagagcaccccggccaagatggcgaaagcccatctctagtaaaaacacaaaacttagccaggcgtgctggtgggtgcctataatcccagctactcgggaggctgaggcagacaattgcttgaatccgggaggcggggttgcagtgagcagagatcgcgccactgcactccagcctgggcgacagagca

SEQ ID NO: 1563630 - DNA, 4001 bp, Homo sapiens
caatttcaggcattctttccattgttttctttcctcctcttcctcctatgtgacaatgcctaacacacacacacgtgcacacacacacacgaacacacacacacgcacacaccagcagacgttcttcttccctttccctcaccttgacctgcagatgctccctcatcctctccctcctgagcagctgcaggatcctgacattgagttgctggttccccttcttcaggtgttgctggttccacttcatcactgaactgctcgggctggggaatacgtgtgggtgtgcaaataaaaaataagtttcgttattgatacaaaattttacatatatacacagaatacatagctatttctggtcctaactaagcctaaagacatttctccaactctatgctctatgcccaataaggttactccacccacagggaggttactgtgagaaaagtgacgcacgaggactttgggggctattatactctgtgttggaatacatgtgtacaatctgtcattaacaaacaaagccggagaaagaagtcatgggcaaaagctgaagaacacgagaggaaaaaaaaaatcctccagaatcaatgtttccttcatgagatgccatcctcattttttatgagcaggaaagacctttatcagcatttccacactaatgcaacgacgctatcacaaaaattaatttctactaatagaaaacatcgaattaacgtttaagcactcacccgcataggcccaatcatttcaggaggctgtacatagcgccttggtctaggccaataataggtcgatcttcctcgccaactcatatttcacactgaaaacagacaaccgtgattgggaacgtgcgctccagagggctgctatattcgatcacttccatggataaatgttaacttgccgttttacttttgaaaatactctcaaaataagtcccagagttaagcatacgtgtgtacgctgtctgagtgcctacaaagccacttctgctggccaggctggcagagcaatcatcttaaggcgtgtggcaaaaggcagaggacatttttttctaaatttcttttggacacgcggtctcgctgtgttgctcaggctggagtgcagcggcgtgatcacagctcactgcagcctcgacctcccgctcaagggatcctcccacctcagtgtccccagtaactgggaatacgtaggcgagcgccactgcgccccgcagacagaggtcatttctgatgaggtttagtttcacaagtgcactccccacgaaaaccctagtgaatcacaattctcgtgattgctgctttgggcacactcccacttcctagagccattcacccccactcacaacaagtttggttggaccgcactgcctcgcccactccttcccactgttttcggaccttccatggcggaggtgagaccttgcagtgcttctcactcgggcgctccgcactccacaccgctgagggggcgctcgccaggccgcagccttcccaggtgccaggccccttcttcaccgcccgcctcgcccccgccgggggccccattcagggaatctgccctgtgtcgtcggggatcccggcacctcgggacttccatccccccaacagcactcaccccgtcttcacctgagcccctgaccgcctcccctccacggcccaccttcctccccgtccaggccccttcacgaccacgaagccgccggtggcctcgcagcctgtgaagggaaggaggacgacctcgtggcccttctccctcggaggccacagaccaggaagcgggacccgcctgacccacccgaggccctctccaccctcactcacacttcagcccccgggatgactggcctgcacacctaccagatgaatctcagtagaggaaaaagagtccggacggcaggaaccacacagcactgcctcacagctccctggcgttcttcacgtgggcgaaggggccgggcagaagacgcccagtgaacatgcgcactgaggcgggagcccagggagcatgcgcggctgtgggctggggagggctgccgttcccagcgccacgccccaaaccctccatgcccatcctcattgaggataagggaatcccacctccctctgctgtttcctatgcctctgggactcaagtagtgctcccctcaaaactcaccccatcttcaactgaaccccacccccaacccagggccctctcttgccccggacccaccatggggacaaggaccactgtgactggctgggaagacaggtaaaccacctgcgaaaacagaaatagcaacctatcccaaaaggaaattgttcaatgtgaacaagtcagagaaagagactgaaagaaaaatgaatagaatcgctaggacccgtaagaaaatgctaaaacgatatctatcatttgtagcatcagaatcgcagagggtgaagtgacagtattagggaaacaggacagccagagtgacaccacgtgaaaatatactccgtcttgaaagcagcaagatacatagtcctaccagtcacaacccatggtcctaagatgtttggagttgagaaaacagatgaaaggtacctccaaggacatgctcccacagcagcggaaagtgcacggttcccaacacccattaacaatatatgctttcaacagaattatgctttcatggacttacacactggtaagtcaaggacagttttctttaaatcaatagaatgataaaagtcatcatgctcttagcccacccgcacaaaggcacagattaactttagtctttatatagataagacccctatataagaaaaaccagaccaggccaaggctcacgcctgtaatcctagtattttgggaggctgagctggccagatcacctgagctcaggacttcgagaccagcctaagcaacatcagaaaatctcatcactacaaaaaacaaacaaaaaaccatcgaaaaattagctgggcatggtggcatgtacctatactcacagctcctcaggaggctgaggtgggaggcgcgcttgagcccaggaggtcaaggctgcagcgagctctgataacaccaccgcactccagcctcggtgacagagtgagacgctgtctcaagttttaataatcgaacctaaaaacgtacaaatttatcaatcgaattcactatattaacacatgaatgggaaaaaacgctgtggtaatcgaaatagatgcactgtttgatgaaaatcaacatatattcaaatgaatactctcagcaaatttggaacagaatgcaatgactcactctgataaagtccgtctacaaaaaaaggagagtgaataggatggcgaaatgttgaaatttttcggtttctcatcagggagaagacaaggatgtccactgtcaccattgtaacgggtgggtctgcacaatgccataaaatcagaaaaggaaataaaactctttacaatgccaacgacgggcccgccacggtggcccacgccagtaatcccagcactgtgggaggtgaggtgggtgcatcacttgcactcaaaagttcaacaacagcccgggaaacatggcaaaaccccgtctctacaaaaaaatacaaaagggaaaagaaaaaaatatggcggaaacaaaactgctcttattccaggatgatatgtttctgtatattgaagactgaaaacgacctagaagtaaactttagaattcacaagcatatttcacaaggccgctggatagaaaaccaatatgtaagaattatgtctccaccgggcacggaggctcatgcctgtaatcccagcactttgggaggccaaggcaggtgaatcacgaggtcaggagttcaagagcaccccggccaagatggcgaaagcccatctctagtaaaaacacaaaacttagccaggcgtgctggtgggtgcctataatcccagctactcgggaggctgaggcagacaattgcttgaatccgggaggcggggttgcagtgagcagagatcgcgccactgcactccagcctgggcgacagagca

SEQ ID NO: 1563631 - DNA, 4001 bp, Homo sapiens
caatttcaggcattctttccattgttttctttcctcctcttcctcctatgtgacaatgcctaacacacacacacgtgcacacacacacaggaacacacacacacgcacacaccagcagacgttcttcttccctttccctcaccttgacctgcagatgctccctcatcctctccctcctgagcagctgcaggatcctgacattgagttgctggttccccttcttcaggtgttgctggttccacttcatcactgaactgctcgggctggggaatacgtgtgggtgtgcaaatagaaaataagtttcgttattgatacaaaattttacatatatacacagaatacatagctatttctggtcctaactaagcctaaagacatttctccaactctatgctctatgcccaataaggttactccacccacagggaggttactgtgagaaaagtgacgcacgaggactttgggggctattatactctgtgttggaatacatgtgtacaatctgtcattaacaaacaaagccggagaaagaagtcatgggcaaaagctgaagaacacgagaggaaaaaaaaaatcctccagaatcaatgtttccttcatgagatgccatcctcattttttatgagcaggaaagacctttatcagcatttccacactaatgcaacgacgctatcacaaaaattaatttctactaatagaaaacatcgaattaacgtttaagcactcacccgcataggcccaatcatttcaggaggctgtacatagcgccttggtctaggccaataataggtcgatcttcctcgccaactcatatttcacactgaaaacagacaaccgtgattgggaacgtgcgctccagagggctgctatattcgatcacttccatggataaatgttaacttgccgttttacttttgaaaatactctcaaaataagtcccagagttaagcatacgtgtgtacgctgtctgagtgcctacaaagccacttctgctggccaggctggcagagcaatcatcttaaggcgtgtggcaaaaggcagaggacatttttttctaaatttcttttggacacgcggtctcgctgtgttgctcaggctggagtgcagcggcgtgatcacagctcactgcagcctcgacctcccgctcaagggatcctcccacctcagtgtccccagtaactgggaatacgtaggcgagcgccactgcgccccgcagacagaggtcatttctgatgaggtttagtttcacaagtgcactccccacgaaaaccctagtgaatcacaattctcgtgattgctgctttgggcacactcccacttcctagagccattcaccccccctcacaacaagtttggttggaccgcactgcctcgcccactccttcccactgttttcggaccttccatggcggaggtgagaccttgcagtgcttctcactcgggcgctccgcactccacaccgctgagggggcgctcgccaggccgcagccttcccaggtgccaggccccttcttcaccgcccgcctcgcccccgccgggggccccattcagggaatctgccctgtgtcgtcggggatcccggcacctcgggacttccatccccccaacagcactcaccccgtcttcacctgagcccctgaccgcctcccctccacggcccaccttcctccccgtccaggccccttcacgaccacgaagccgccggtggcctcgcagcctgtgaagggaaggaggacgacctcgtggcccttctccctcggaggccacagaccaggaagcgggacccgcttgacccacccgaggccctctccaccctcactcacacttcagcccccgggatgactggcctgcacacctaccagatgaatctcagtagaggaaaaagagtccggacggcaggaaccacacagcactgcctcacagctccctggcgttcttcacgtgggcgaaggggccgggcagaagacgcccagtgaacatgcgcactgaggcgggagcccagggagcatgcgcggctgtgggctggggagggctgccgttcccagcgccacgccccaaaccctccatgcccatcctcattgaggataagggaatcccacctccctctgctgtttcctatgcctctgggactcaagtagtgctcccctcaaaactcaccccatcttcaactgaaccccacccccaacccagggccctctcttgccccggacccaccatggggacaaggaccactgtgactggctgggaagacaggtaaaccacctgcgaaaacagaaatagcaacctatcccaaaaggaaattgttcaatgtgaacaagtcagagaaagagactgaaagaaaaatgaatagaatcgctaggacccgtaagaaaatgctaaaacgatatctatcatttgtagcatcagaatcgcagagggtgaagtgacagtattagggaaacaggacagccagagtgacaccacgtgaaaatatactccgtcttgaaagcagcaagatacatagtcctaccagtcacaacccatggtcctaagatgtttggagttgagaaaacagatgaaaggtacctccaaggacatgctcccacagcagcggaaagtgcacggttcccaacacccattaacaatatatgctttcaacagaattatgctttcatggacttacacactggtaagtcaaggacagttttctttaaatcaatagaatgataaaagtcatcatgctcttagcccacccgcacaaaggcacagattaactttagtctttatatagataagacccctatataagaaaaaccagaccaggccaaggctcacgcctgtaatcctagtattttgggaggctgagctggccagatcacctgagctcaggacttcgagaccagcctaagcaacatcagaaaatctcatcactacaaaaaacaaacaaaaaaccatcgaaaaattagctgggcatggtggcatgtacctatactcacagctcctcaggaggctgaggtgggaggcgcacttgagcccaggaggtcaaggctgcagcgagctctgataacaccaccgcactccagcctcggtgacagagtgagacgctgtctcaagttttaataatcgaacctaaaaacgtacaaatttatcaatcgaattcactatattaacacatgaatgggaaaaaacgctgtggtaatcgaaatagatgcactgtttgatgaaaatcaacatatattcaaatgaatactctcagcaaatttggaacagaatgcaatgactcactctgataaagtccgtctacaaaaaaaggagagtgaataggatggcgaaatgttgaaatttttcggtttctcatcagggagaagacaaggatgtccactgtcaccattgtaacgggtgggtctgcgcaatgccataaaatcagaaaaggaaataaaactctttacaatgccaacgacgggcccgccacggtggcccacgccagtaatcccagcactgtgggaggtgaggtgggtgcatcacttgcactcaaaagttcaacaacagcccgggaaacatggcaaaaccccgtctctacaaaaaaatacaaaagggaaaagaaaaaaatatggcggaaacaaaactgctcttattccaggatgatatgtttctgtatattgaagactgaaaacgacctagaagtaaactttagaattcacaagcatatttcacaaggccgctggatagaaaaccaatatgtaagaattatgtctccaccgggcacggaggctcatgcctgtaatcccagcactttgggaggccaaggcaggtgaatcacgaggtcaggagttcaagagcaccccggccaagatggcgaaagcccatctctagtaaaaacacaaaacttagccaggcgtgctggtgggtgcctataatcccagctactcgggaggctgaggcagacaattgcttgaatccgggaggcggggttgcagtgagcagagatcgcgccactgcactccagcctgggcgacagagca

SEQ ID NO: 1563632 - DNA, 4001 bp, Homo sapiens
caggcattctttccattgttttctttcctcctcttcctcctatgtgacaatgcctaacacacacacacacacgtgcacacacacacacacgaacacacacacacgcacacaccagcagacgttcttcttccctttccctcaccttgacctgcagatgctccctcatcctctccctcctgagcagctgcaggatcctgacgttgagttgctggttccccttcttcaggtgttgctggttccacttcatcactgaactgctcgggctggggaatacgtgtgggtgtgcaaataaaaaataagtttcgttattgatacaaaattttacatatatacacagaatacatagctatttctggtcctaactaagcctaaagacatttctccaactctatgctctatgcccaataaggttactccacccacagggaggttactgtgagaaaagtgacgcacgaggactttgggggctattatactctgtgttggaatacatgtgtacaatctgtcattaacaaacaaagccggagaaagaagtcatgggcaaaagctgaagaacacgagaggaaaaaaaaaatcctccagaatcaatgtttccttcatgagatgccatcctcattttttatgagcaggaaagacctttatcagcatttccacactaatgcaacgacgctatcacaaaaattaatttctactaatagaaaacatcgaattaacgtttaagcactcacccgcataggcccaatcatttcaggaggctgtacatagcgccttggtctaggccaataataggtcgatcttcctcgccaactcatatttcacactgaaaacagacaaccgtgattgggaacgtgcgctccagagggctgctatattcgatcacttccatggataaatgttaacttgccgttttacttttgaaaatactctcaaaataagtcccagagttaagcatacgtgtgtacgctgtctgagtgcctacaaagccacttctgctggccaggctggcagagcaatcatcttaaggcgtgtggcaaaaggcagaggacatttttttctaaatttcttttggacacgcggtctcgctgtgttgctcaggctggagtgcagcggcgtgatcacagctcactgcagcctcgacctcccgctcaagggatcctcccacctcagtgtccccagtaactgggaatacgtaggcgagcgccactgcgccccgcagacagaggtcatttctgatgaggtttagtttcacaagtgcactccccacgaaaaccctagtgaatcacaattctcgtgattgctgctttgggcacactcccacttcctagagccattcacccccactcacaacaagtttggttggaccgcactgcctcgcccactccttcccactgttttcggaccttccatggcggaggtgagaccttgcagtgcttctcactcgggcgctccgcactccacaccgctgagggggcgctcgccaggccgcagccttcccaggtgccaggccccttcttcaccgcccgcctcgcccccgccgggggccccattcagggaatctgccctgtgtcgtcggggatcccggcacctcgggacttccatccccccaacagcactcaccccgtcttcacctgagcccctgaccgcctcccctccacggcccaccttcctccccgtccaggccccttcacgaccacgaagccgccggtggcctcgcagcctgtgaagggaaggaggacgacctcgtggcccttctccctcggaggccacagaccaggaagcgggacccgcctgacccacccgaggccctctccaccctcactcacacttcagcccccgggatgactggcctgcacacctaccagatgaatctcagtagaggaaaaagagtccggacggcaggaaccacacagcactgcctcacagctccctggcgttcttcacgtgggcgaaggggccgggcagaagacgcccagtgaacatgcgcactgaggcgggagcccagggagcatgcgcggctgtgggctggggagggctgccgttcccagcgccacgccccaaaccctccatgcccatcctcattgaggataagggaatcccacctccctctgctgtttcctatgcctctgggactcaagtagtgctcccctcaaaactcaccccatcttcaactgaaccccacccccaacccagggccctctcttgccccggacccaccatggggacaaggaccactgtgactggctgggaagacaggtaaaccacctgcgaaaacagaaatagcaacctatcccaaaaggaaattgttcaatgtgaacaagtcagagaaagagactgaaagaaaaatgaatagaatcgctaggacccgtaagaaaatgctaaaacgatatctatcatttgtagcatcagaatcgcagagggtgaagtgacagtattagggaaacaggacagccagagtgacaccacgtgaaaatatactccgtcttgaaagcagcaagatacatagtcctaccagtcacaacccatggtcctaagatgtttggagttgagaaaacagatgaaaggtacctccaaggacatgctcccacagcagcggaaagtgcacggttcccaacacccattaacaatatatgctttcaacagaattatgctttcatggacttacacactggtaagtcaaggacagttttctttaaatcaatagaatgataaaagtcatcatgctcttagcccacccgcacaaaggcacagattaactttagtctttatatagataagacccctatataagaaaaaccagaccaggccaaggctcacgcctgtaatcctagtattttgggaggctgagctggccagatcacctgagctcaggacttcgagaccagcctaagcaacatcagaaaatctcatcactacaaaaaacaaacaaaaaaccatcgaaaaattagctgggcatggtggcatgtacctatactcacagctcctcaggaggctgaggtgggaggcgcgcttgagcccaggaggtcaaggctgcagcgagctctgataacaccaccgcactccagcctcggtgacagagtgagacgctgtctcaagttttaataatcgaacctaaaaacgtacaaatttatcaatcgaattcactatattaacacatgaatgggaaaaaacgctgtggtaatcgaaatagatgcactgtttgatgaaaatcaacatatattcaaatgaatactctcagcaaatttggaacagaatgcaatgactcactctgataaagtccgtctacaaaaaaaggagagtgaataggatggtgaaatgttgaaatttttcggtttctcatcagggataagacaaggatgtccactgtcaccattgtaacgggtgggtctgcgcaatgccataaaatcagaaaaggaaataaaactctttacaatggcaacgacgggcccgccacggtggcccacgccagtaatcccagcactgtgggaggtgaggtgggtgcatcacttgcactcaaaagttcaacaacagcccgggaaacatggcaaaaccccgtctctacaaaaaaatacaaaagggaaaagaaaaaaatatggcggaaacaaaactgctcttattccaggatgatatgtttctgtatattgaagactgaaaacgacctagaagtaaactttagaattcacaagcatatttcacaaggccgctggatagaaaaccaatatgtaagaattatgtctccaccgggcgcggaggctcatgcctgtaatcccagcactttgggaggccaaggcaggtgaatcacgaggtcaggagttcaagagcaccccggccaagatggcgaaagcccatctctagtaaaaacacaaaacttagccaggcgtgctggtgggtgcctataatcccagctactcgggaggctgaggcagacaattgcttgaatccgggaggcggggttgcagtgagcagagatcgcgccactgcactccagcctgggcgacagagca

SEQ ID NO: 1563633 - DNA, 4001 bp, Homo sapiens
caatttcaggcattctttccattgttttctttcctcctcttcctcctatgtgacaatgcctaacacacacacacgtgcacacacacacacgaacacacacacacgcacacaccagcagacgttcttcttccctttccctcaccttgacctgcagatgctccctcatcctctccctcctgagcagctgcaggatcctgacgttgagttgctggttccccttcttcaggtgttgctggttccacttcatcactgaactgctcgggctggggaatacgtgtgggtgtgcaaatagaaaataagtttcgttattgatacaaaattttacatatatacacagaatacatagctatttctggtcctaactaagcctaaagacatttctccaactctatgctctatgcccaataaggttactccacccacagggaggttactgtgagaaaagtgacgcacgaggactttgggggctattatactctgtgttggaatacatgtgtacaatctgtcattaacaaacaaagccggagaaagaagtcatgggcaaaagctgaagaacacgagaggaaaaaaaaaatcctccagaatcaatgtttccttcatgagatgccatcctcattttttatgagcaggaaagacctttatcagcatttccacactaatgcaacgacgctatcacaaaaattaatttctactaatagaaaacatcgaattaacgtttaagcactcacccgcataggcccaatcatttcaggaggctgtacatagcgccttggtctaggccaataataggtcgatcttcctcgccaactcatatttcacactgaaaacagacaaccgtgattgggaacgtgcgctccagagggctgctatattcgatcacttccatggataaatgttaacttgccgttttacttttgaaaatactctcaaaataagtcccagagttaagcatacgtgtgtacgctgtctgagtgcctacaaagccacttctgctggccaggctggcagagcaatcatcttaaggcgtgtggcaaaaggcagaggacatttttttctaaatttcttttggacacgcggtctcgctgtgttgctcaggctggagtgcagcggcgtgatcacagctcactgcagcctcgacctcccgctcaagggatcctcccacctcagtgtccccagtaactgggaatacgtaggcgagcgccactgcgccccgcagacagaggtcatttctgatgaggtttagtttcacaagtgcactccccacgaaaaccctagtgaatcacaattctcgtgattgctgctttgggcacactcccacttcctagagccattcacccccactcacaacaagtttggttggaccgcactgcctcgcccactccttcccactgttttcggaccttccatggcggaggtgagaccttgcagtgcttctcactcgggcgctccgcactccacaccgctgagggggcgctcgccaggccgcagccttcccaggtgccaggccccttcttcaccgcccgcctcgcccccgccgggggccccattcagggaatctgccctgtgtcgtcggggatcccggcacctcgggacttccatccccccaacagcactcaccccgtcttcacctgagcccctgaccgcctcccctccacggcccaccttcctccccgtccaggccccttcacgaccacgaagccgccggtggcctcgcagcctgtgaagggaaggaggacgacctcgtggcccttctccctcggaggccacagaccaggaagcgggacccgcctgacccacccgaggccctctccaccctcactcacacttcagcccccgggatgactggcctgcacacctaccagatgaatctcagtagaggaaaaagagtccggacggcaggaaccacacagcactgcctcacagctccctggcgttcttcacgtgggcgaaggggccgggcagaagacgcccagtgaacatgcgcactgaggcgggagcccagggagcatgcgcggctgtgggctggggagggctgccgttcccagcgccacgccccaaaccctccatgcccatcctcattgaggataagggaatcccacctccctctgctgtttcctatgcctctgggactcaagtagtgctcccctcaaaactcaccccatcttcaactgaaccccacccccaacccagggccctctcttgccccggacccaccatggggacaaggaccactgtgactggctgggaagacaggtaaaccacctgcgaaaacagaaatagcaacctatcccaaaaggaaattgttcaatgtgaacaagtcagagaaagagactgaaagaaaaatgaatagaatcgctaggacccgtaagaaaatgctaaaacgatatctatcatttgtagcatcagaatcgcagagggtgaagtgacagtattagggaaacaggacagccagagtgacaccacgtgaaaatatactccgtcttgaaagcagcaagatacatagtcctaccagtcacaacccatggtcctaagatgtttggagttgagaaaacagatgaaaggtacctccaaggacatgctcccacagcagcggaaagtgcacggttcccaacacccattaacaatatatgctttcaacagaattatgctttcatggacttacacactggtaagtcaaggacagttttctttaaatcaatagaatgataaaagtcatcatgctcttagcccacccgcacaaaggcacagattaactttagtctttatatagataagacccctatataagaaaaaccagaccaggccaaggctcacgcctgtaatcctagtattttgggaggctgagctggccagatcacctgagctcaggacttcgagaccagcctaagcaacatcagaaaatctcatcactacaaaaaacaaacaaaaaaccatcgaaaaattagctgggcatggtggcatgtacctatactcacagctcctcaggaggctgaggtgggaggcgcgcttgagcccagcaggtcaaggctgcagcgagctctgataacaccaccgcactccagcctcggtgacagagtgagacgctgtctcaagttttaataatcgaacctaaaaacgtacaaatttatcaatcgaattcactatattaacacatgaatgggaaaaaacgctgtggtaatcgaaatagatgcactgtttgatgaaaatcaacatatattcaaatgaatactctcagcaaatttggaacagaatgcaatgactcactctgataaagtccgtctacaaaaaaaggagagtgaataggatggtgaaatgttgaaatttttcggtttctcatcagggataagacaaggatgtccactgtcaccattgtaacgggtgggtctgcgcaatgccataaaatcagaaaaggaaataaaactctttacaatggcaatgacgggcccgccacggtggcccacgccagtaatcccagcactgtgggaggtgaggtgggtgcatcacttgcactcaaaagttcaacaacagcccgggaaacatggcaaaaccccgtctctacaaaaaaatacaaaagggaaaagaaaaaaatatggcggaaacaaaactgctcttattccaggatgatatgtttctgtatattgaagactgaaaacgacctagaagtaaactttagaattcacaagcatatttcacaaggccgctggatagaaaaccaatatgtaagaattatgtctccaccgggcacggaggctcatgcctgtaatcccagcactttgggaggccaaggcaggtgaatcacgaggtcaggagttcaagagcaccccggccaagatggcgaaagcccatctctagtaaaaacacaaaacttagccaggcgtgctggtgggtgcctataatcccagctactcgggaggctgaggcagacaattgcttgaatccgggaggcggggttgcagtgagcagagatcgcgccactgcactccagcctgggcgacagagca

SEQ ID NO: 1563634 - DNA, 4001 bp, Homo sapiens
agctgcaaactacatagcctcctcgcttttccagtcaatttcaggcattctttccattgttttctttcctcctcttcctcctatgtgacaatgcctaacacacacacacgtgcacacacacacacgaacacacacacacgcacacaccagcagacgttcttcttccctttccctcaccttgacctgcagatgctccctcatcctctccctcctgagcagctgcaggatcctgacgttgagttgctggttccccttcttcaggtgttgctggttccacttcatcactgaactgctcgggctggggaatacgtgtgggtgtgcaaataaaaaataagtttcgttattgatacaaaattttacatatatacacagaatacatagctatttctggtcataactaagcctaaagacatttctccaactctatgctctatgcccaataaggttactccaaccacagggaggttactgtgagaaaagtgacacacgaggactttgggggctattatactctgtgttggaatacatgtgtacaatctgtcattaacaaacaaagccggagaaagaagtcatgggcaaaagctgaagaacacgagaggaaaaaaaaaatcctccagaatcaatgtttccttcatgagatgccatcctcattttttatgagcaggaaagacctttatcagcatttccacactaatgcaacgacgctatcacaaaaattaatttctactaatagaaaacatcgaattaacgtttaagcactcacccgcataggcccaatcatttcaggaggctgtacatagcgccttggtctaggccaataataggtcgatcttcctcgccaactcatatttcacactgaaaacagacaaccgtgattgggaacgtgcgctccagagggctgctatattcgatcacttccatggataaatgttaacttgccgttttacttttgaaaatactctcaaaataagtcccagagttaagcatacgtgtgtacgctgtctgagtgcctacaaagccacttctgctggccaggctggcagagcaatcatcttaaggcgtgtggcaaaaggcagaggacatttttttctaaatttcttttggacacgcggtctcgctgtgttgctcaggctggagtgcagcggcgtgatcacagctcactgcagcctcgacctcccgctcaagggatcctcccacctcagtgtccccagtaactgggaatacgtaggcgagcgccactgcgccccgcagacagaggtcatttctgatgaggtttagtttcacaagtgcactccccacgaaaaccctagtgaatcacaattctcgtgattgctgctttgggcacactcccacttcctagagccattcaccccccctcacaacaagtttggttggaccgcactgcctcgcccactccttcccactgttttcggaccttccatggcggaggtgagaccttgcagtgcttctcactcgggcgctccgcactccacaccgctggggggggcgctcgccaggccgcagccttcccaggtgccaggccccttcttcaccgcccgcctcgcccccgccgggggccccattcagggaatctgccctgtgtcgtcggggatcccggcacctcgggacttccatccccccaacagcactcaccccgtcttcacctgagcccctgaccgcctcccctccacggcccaccttcctccccgtccaggccccttcacgaccacgaagccgccggtggcctcgcagcctgtgaagggaaggaggacgacctcgtggcccttctccctcggaggccacagaccaggaagcgggacccgcctgacccacccgaggccctctccaccctcactcacacttcagcccccgggatgactggcctgcacacctaccagatgaatctcagtagaggaaaaagagtccggacggcaggaaccacacagcactgcctcacagctccctggcgttcttcacgtgggcgaaggggccgggcagaaggcgcccagtgaacatgcgcactgaggcgggagcccagggagcatgcgcggctgtgggctggggagggctgccgttcccagcgccacgccccaaaccctccatgcccatcctcattgaggataagggaatcccacctccctctgctgtttcctatgcctctgggactcaagtagtgctcccctcaaaactcaccccatcttcaactgaaccccacccccaacccagggccctctcttgccccggacccaccatggggacaaggaccactgtgactggctgggaagacaggtaaaccacctgcgaaaacagaaatagcaacctatcccaaaaggaaattgttcaatgtgaacaagtcagagaaagagactgaaagaaaaatgaatagaatcgctaggacccgtaagaaaatgctaaaacgatatctatcatttgtagcatcagaatcgcagagggtgaagtgacagtattagggaaacaggacagccagagtgacaccacgtgaaaatatactccgtcttgaaagcagcaagatacatagtcctaccagtcacaacccatggtcctaagatgtttggagttgagaaaacagatgaaaggtacctccaaggacatgctcccacagcagcggaaagtgcacggttcccaacacccattaacaatatatgctttcaacagaattatgctttcatggacttacacactggtaagtcaaggacagttttctttaaatcaatagaatgataaaagtcatcatgctcttagcccacccgcacaaaggaacagattaactttagtctttatatagataagacccctatataagaaaaaccagaccaggccaaggctcacgcctgtaatcctagtattttgggaggctgagctggccagatcacctgagctcaggacttcgagaccagcctaagcaacatcagaaaatctcatcactacaaaaaacaaacaaaaaaaccatcaaaaaattagctgggcatggtggcatgtacctatactcacagctactcaggaggctgaggtgggaggagcgcttgagcccaggaggtcaaggctgcagcgagctctgataacaccaccgcactccagcctcggtgacagagtgagacgctgtctcaagttttaataatcgaacctaaaaacgtacaaatttatcaatcgaattcactatattaacccatgaatgggaaaaaacgctgtggtaatcgaaatagatgcactgtttgatgaaaatcaacatatattcaaatgaatactctcagcaaatttggaacagaatggaatgactcactctagataaagtctgtctacaaaaaaagaagagtgaataggatggcgaaatgttgaaatttttcggtttctcatcagggataagacaaggatgtccactgtcaccattgtaacgggtgggtctgcgcaatgccataaaatcagaaaaggaaataaaactctttacaatggcaacgacgggcccgccacggtggcccacgccagtaatcccagcactgtgggaggtgacgtgggtgcatcacttgcactcaaaagttcaacaacagcccgggaaacatggcaaaaccccgtctctacaaaaaaatacaaaagggaaaagaaaaaaaaatggcggaaacaaaactgctcttattccaggatgatatgtttctgtatattgaagactgaaaacgacctagaagtaaactttagaattcacaagcatatttcacaaggccgctggatagaaaaccaatatgtaagaattatgtctccaccgggcgcggaggctcatgcctgtaatcccagcactttgggaggccaaggcaggtgaatcacgaggtcaggagttcaagagcaccccggccaagatggcgaaagcccatctctagtaaaaacacaaaacttagccaggcgtgctggtgggtgcctataatcccagctactcgggaggctgaggcagacaattgcttgaatccgggaggcggggttgcagtgagcag

SEQ ID NO: 1563635 - DNA, 4001 bp, Homo sapiens; identical to SEQ ID NO: 1563609

SEQ ID NO: 1563636 - DNA, 4001 bp, Homo sapiens; identical to SEQ ID NO: 1563610

SEQ ID NO: 1563637 - DNA, 4001 bp, Homo sapiens; identical to SEQ ID NO: 1563611

SEQ ID NO: 1563638 - DNA, 4001 bp, Homo sapiens; identical to SEQ ID NO: 1563612

SEQ ID NO: 1563639 - DNA, 4001 bp, Homo sapiens; identical to SEQ ID NO: 1563613

SEQ ID NO: 1563640 - DNA, 4001 bp, Homo sapiens; identical to SEQ ID NO: 1563609

SEQ ID NO: 1563641 - DNA, 4001 bp, Homo sapiens; identical to SEQ ID NO: 1563610

SEQ ID NO: 1563642 - DNA, 4001 bp, Homo sapiens; identical to SEQ ID NO: 1563611

SEQ ID NO: 1563643 - DNA, 4001 bp, Homo sapiens; identical to SEQ ID NO: 1563614

SEQ ID NO: 1563644 - DNA, 4001 bp, Homo sapiens
tccattctctcattcataaagtcgagaacttttatcatagtgagggatttgcctaagctaagctgcaaactacatagcctcctcgcttttccagtcaatttcaggcattctttccattgttttctttcctcctcttcctcctatgtgacaatgcctaacacacacacacgtgcacacacacacacgaacacacacacacgcacacaccagcagacgttcttcttccctttccctcaccttgacctgcagatgctccctcatcctctccctcctgagcagctgcaggatcctgacgttgagttgctggttccccttcttcaggtgttgctggttccacttcatcactgaactgctcgggctggggaatacgtgtgggtgtgcaaataaaaaataagtttcgttattgatacaaaattttacatatatacacagaatacatagctatttctggtcataactaagcctaaagacatttctccaactctatgctctatgcccaataaggttactccaaccacagggaggttactgtgagaaaagtgacacacgaggactttgggggctattatactctgtgttggaatacatgtgtacaatctgtcattaacaaacaaagccggagaaagaagtcatgggcaaaagctgaagaacacgagaggaaaaaaaaaatcctccagaatcaatgtttccttcatgagatgccatcctcattttttatgagcaggaaagacctttatcagcatttccacactaatgcaacgacgctatcacaaaaattaatttctactaatagaaaacatcgaattaacgtttaagcactcacccgcataggcccaatcatttcaggaggctgtacatagcgccttggtctaggccaataataggtcgatcttcctcgccaactcatatttcacactgaaaacagacaaccgtgattgggaacgtgcgctccagagggctgctatattcgatcacttccatggataaatgttaacttgccgttttacttttgaaaatactctcaaaataagtcccagagttaagcatacgtgtgtacgctgtctgagtgcctacaaagccacttctgctggccaggctggcagagcaatcatcttaaggcgtgtggcaaaaggcagaggacatttttttctaaatttcttttggacacgcggtctcgctgtgttgctcaggctggagtgcagcggcgtgatcacagctcactgcagcctcgacctcccgctcaagggatcctcccacctcagtgtccccagtaactgggaatacgtaggcgagcgccactgcgccccgcagacagaggtcatttctgatgaggtttagtttcacaagtgcactccccacgaaaaccctagtgaatcacaattctcgtgattgctgctttgggcacactcccacttcctagagccattcaccccccctcacaacaagtttggttggaccgcactgcctcgcccactccttcccactgttttcggaccttccatggcggaggtgagaccttgcagtgcttctcactcgggcgctccgcactccacaccgctggggggggcgctcgccaggccgcagccttcccaggtgccaggccccttcttcaccgcccgcctcgcccccgccgggggccccattcagggaatctgccctgtgtcgtcggggatcccggcacctcgggacttccatccccccaacagcactcaccccgtcttcacctgagcccctgaccgcctcccctccacggcccaccttcctccccgtccaggccccttcacgaccacgaagccgccggtggcctcgcagcctgtgaagggaaggaggacgacctcgtggcccttctccctcggaggccacagaccaggaagcgggacccgcctgacccacccgaggccctctccaccctcactcacacttcagcccccgggatgactggcctgcacacctaccagatgaatctcagtagaggaaaaagagtccggacggcaggaaccacacagcactgcctcacagctccctggcgttcttcacgtgggcgaaggggccgggcagaaggcgcccagtgaacatgcgcactgaggcgggagcccagggagcatgcgcggctgtgggctggggagggctgccgttcccagcgccacgccccaaaccctccatgcccatcctcattgaggataagggaatcccacctccctctgctgtttcctatgcctctgggactcaagtagtgctcccctcaaaactcaccccatcttcaactgaaccccacccccaacccagggccctctcttgccccggacccaccatggggacaaggaccactgtgactggctgggaagacaggtaaaccacctgcgaaaacagaaatagcaacctatcccaaaaggaaattgttcaatgtgaacaagtcagagaaagagactgaaagaaaaatgaatagaatcgctaggacccgtaagaaaatgctaaaacgatatctatcatttgtagcatcagaatcgcagagggtgaagtgacagtattagggaaacaggacagccagagtgacaccacgtgaaaatatactccgtcttgaaagcagcaagatacatagtcctaccagtcacaacccatggtcctaagatgtttggagttgagaaaacagatgaaaggtacctccaaggacatgctcccacagcagcggaaagtgcacggttcccaacacccattaacaatatatgctttcaacagaattatgctttcatggacttacacactggtaagtcaaggacagttttctttaaatcaatagaatgataaaagtcatcatgctcttagcccacccgcacaaaggaacagattaactttagtctttatatagataagacccctatataagaaaaaccagaccaggccaaggctcacgcctgtaatcctagtattttgggaggctgagctggccagatcacctgagctcaggacttcgagaccagcctaagcaacatcagaaaatctcatcactacaaaaaacaaacaaaaaaaccatcaaaaaattagctgggcatggtggcatgtacctatactcacagctactcaggaggctgaggtgggaggagcgcttgagcccaggaggtcaaggctgcagcgagctctgataacaccaccgcactccagcctcggtgacagagtgagacgctgtctcaagttttaataatcgaacctaaaaacgtacaaatttatcaatcgaattcactatattaacccatgaatgggaaaaaacgctgtggtaatcgaaatagatgcactgtttgatgaaaatcaacatatattcaaatgaatactctcagcaaatttggaacagaatggaatgactcactctagataaagtctgtctacaaaaaaagaagagtgaataggatggcgaaatgttgaaatttttcggtttctcatcagggataagacaaggatgtccactgtcaccattgtaacgggtgggtctgcgcaatgccataaaatcagaaaaggaaataaaactctttacaatggcaacgacgggcccgccacggtggcccacgccagtaatcccagcactgtgggaggtgacgtgggtgcatcacttgcactcaaaagttcaacaacagcccgggaaacatggcaaaaccccgtctctacaaaaaaatacaaaagggaaaagaaaaaaaaatggcggaaacaaaactgctcttattccaggatgatatgtttctgtatattgaagactgaaaacgacctagaagtaaactttagaattcacaagcatatttcacaaggccgctggatagaaaaccaatatgtaagaattatgtctccaccgggcgcggaggctcatgcctgtaatcccagcactttgggaggccaaggcaggtgaatcacgaggtcaggagttcaagagcaccccggccaagatggcgaaagcccatctctagtaaaaacacaaaacttagccaggcgtgctggtgggtgcctataatcccagc

SEQ ID NO: 1563645 - DNA, 4001 bp, Homo sapiens
tctctcattcataaagtcgagatcttttaccatagtgagggatttgcctaagctaagctgcgaactacatagcctcctcgcttttccagtcaatttcaggcattctttccattgttttctttcctcctcttcctcctatgtgacaatgcctaacacacacacacacacgtgcacacacacacacacgaacacacacacacgcacacaccagcagacgttcttcttccctttccctcaccttgacctgcagatgctccctcatcctctccctcctgagcagctgcaggatcctgacgttgagttgctggttccccttcttcaggtgttgctggttccacttcatcactgaactgctcgggctggggaatacgtgtgggtgtgcaaataaaaaataagtttcgttattgatacaaaattttacatatatacacagaatacatagctatttctggtcctaactaagcctaaagacatttctccaactctatgctctatgcccaataaggttactccacccacagggaggttactgtgagaaaagtgacgcacgaggactttgggggctattatactctgtgttggaatacatgtgtacaatctgtcattaacaaacaaagccggagaaagaagtcatgggcaaaagctgaagaacacgagaggaaaaaaaaaatcctccagaatcaatgtttccttcatgagatgccatcctcattttttatgagcaggaaagacctttatcagcatttccacactaatgcaacgacgctatcacaaaaattaatttctactaatagaaaacatcgaattaacgtttaagcactcacccgcataggcccaatcatttcaggaggctgtacatagcgccttggtctaggccaataataggtcgatcttcctcgccaactcatatttcacactgaaaacagacaaccgtgattgggaacgtgcgctccagagggctgctatattcgatcacttccatggataaatgttaacttgccgttttacttttgaaaatactctcaaaataagtcccagagttaagcatacgtgtgtacgctgtctgagtgcctacaaagccacttctgctggccaggctggcagagcaatcatcttaaggcgtgtggcaaaaggcagaggacatttttttctaaatttcttttggacacgcggtctcgctgtgttgctcaggctggagtgcagcggcgtgatcacagctcactgcagcctcgacctcccgctcaagggatcctcccacctcagtgtccccagtaactgggaatacgtaggcgagcgccactgcgccccgcagacagaggtcatttctgatgaggtttagtttcacaagtgcactccccacgaaaaccctagtgaatcacaattctcgtgattgctgctttgggcacactcccacttcctagagccattcacccccactcacaacaagtttggttggaccgcactgcctcgcccactccttcccactgttttcggaccttccatggcggaggtgagaccttgcagtgcttctcactcgggcgctccgcactccacaccgctgagggggcgctcgccaggccgcagccttcccaggtgccaggccccttcttcaccgcccgcctcgcccccgccgggggccccattcagggaatctgccctgtgtcgtcggggatcccggcacctcgggacttccatccccccaacagcactcaccccgtcttcacctgagcccctgaccgcctcccctccacggcccaccttcctccccgtccaggccccttcacgaccacgaagccgccggtggcctcgcagcctgtgaagggaaggaggacgacctcgtggcccttctccctcggaggccacagaccaggaagcgggacccgcctgacccacccgaggccctctccaccctcactcacacttcagcccccgggatgactggcctgcacacctaccagatgaatctcagtagaggaaaaagagtccggacggcaggaaccacacagcactgcctcacagctccctggcgttcttcacgtgggcgaaggggccgggcagaagacgcccagtgaacatgcgcactgaggcgggagcccagggagcatgcgcggctgtgggctggggagggctgccgttcccagcgccacgccccaaaccctccatgcccatcctcattgaggataagggaatcccacctccctctgctgtttcctatgcctctgggactcaagtagtgctcccctcaaaactcaccccatcttcaactgaaccccacccccaacccagggccctctcttgccccggacccaccatggggacaaggaccactgtgactggctgggaagacaggtaaaccacctgcgaaaacagaaatagcaacctatcccaaaaggaaattgttcaatgtgaacaagtcagagaaagagactgaaagaaaaatgaatagaatcgctaggacccgtaagaaaatgctaaaacgatatctatcatttgtagcatcagaatcgcagagggtgaagtgacagtattagggaaacaggacagccagagtgacaccacgtgaaaatatactccgtcttgaaagcagcaagatacatagtcctaccagtcacaacccatggtcctaagatgtttggagttgagaaaacagatgaaaggtacctccaaggacatgctcccacagcagcggaaagtgcacggttcccaacacccattaacaatatatgctttcaacagaattatgctttcatggacttacacactggtaagtcaaggacagttttctttaaatcaatagaatgataaaagtcatcatgctcttagcccacccgcacaaaggcacagattaactttagtctttatatagataagacccctatataagaaaaaccagaccaggccaaggctcacgcctgtaatcctagtattttgggaggctgagctggccagatcacctgagctcaggacttcgagaccagcctaagcaacatcagaaaatctcatcactacaaaaaacaaacaaaaaaccatcgaaaaattagctgggcatggtggcatgtacctatactcacagctcctcaggaggctgaggtgggaggcgcgcttgagcccaggaggtcaaggctgcagcgagctctgataacaccaccgcactccagcctcggtgacagagtgagacgctgtctcaagttttaataatcgaacctaaaaacgtacaaatttatcaatcgaattcactatattaacacatgaatgggaaaaaacgctgtggtaatcgaaatagatgcactgtttgatgaaaatcaacatatattcaaatgaatactctcagcaaatttggaacagaatgcaatgactcactctgataaagtccgtctacaaaaaaaggagagtgaataggatggtgaaatgttgaaatttttcggtttctcatcagggataagacaaggatgtccactgtcaccattgtaacgggtgggtctgcgcaatgccataaaatcagaaaaggaaataaaactctttacaatggcaacgacgggcccgccacggtggcccacgccagtaatcccagcactgtgggaggtgaggtgggtgcatcacttgcactcaaaagttcaacaacagcccgggaaacatggcaaaaccccgtctctacaaaaaaatacaaaagggaaaagaaaaaaatatggcggaaacaaaactgctcttattccaggatgatatgtttctgtatattgaagactgaaaacgacctagaagtaaactttagaattcacaagcatatttcacaaggccgctggatagaaaaccaatatgtaagaattatgtctccaccgggcgcggaggctcatgcctgtaatcccagcactttgggaggccaaggcaggtgaatcacgaggtcaggagttcaagagcaccccggccaagatggcgaaagcccatctctagtaaaaacacaaaacttagccaggcgtgctggtgggtgcctataatcccagcta

SEQ ID NO: 1563646 - DNA, 4001 bp, Homo sapiens
ctccattctctcattcataaagtcgagaacttttatcatagtgagggatttgcctaagctaagctgcaaactacatagcctcctcgcttttccagtcaatttcaggcattctttccattgttttctttcctcctcttcctcctatgtgacaatgcctaacacacacacacgtgcacacacacacacgaacacacacacacgcacacaccagcagacgttcttcttccctttccctcaccttgacctgcagatgctccctcatcctctccctcctgagcagctgcaggatcctgacgttgagttgctggttccccttcttcaggtgttgctggttccacttcatcactgaactgctcgggctggggaatacgtgtgggtgtgcaaatagaaaataagtttcgttattgatacaaaattttacatatatacacagaatacatagctatttctggtcctaactaagcctaaagacatttctccaactctatgctctatgcccaataaggttactccacccacagggaggttactgtgagaaaagtgacgcacgaggactttgggggctattatactctgtgttggaatacatgtgtacaatctgtcattaacaaacaaagccggagaaagaagtcatgggcaaaagctgaagaacacgagaggaaaaaaaaaatcctccagaatcaatgtttccttcatgagatgccatcctcattttttatgagcaggaaagacctttatcagcatttccacactaatgcaacgacgctatcacaaaaattaatttctactaatagaaaacatcgaattaacgtttaagcactcacccgcataggcccaatcatttcaggaggctgtacatagcgccttggtctaggccaataataggtcgatcttcctcgccaactcatatttcacactgaaaacagacaaccgtgattgggaacgtgcgctccagagggctgctatattcgatcacttccatggataaatgttaacttgccgttttacttttgaaaatactctcaaaataagtcccagagttaagcatacgtgtgtacgctgtctgagtgcctacaaagccacttctgctggccaggctggcagagcaatcatcttaaggcgtgtggcaaaaggcagaggacatttttttctaaatttcttttggacacgcggtctcgctgtgttgctcaggctggagtgcagcggcgtgatcacagctcactgcagcctcgacctcccgctcaagggatcctcccacctcagtgtccccagtaactgggaatacgtaggcgagcgccactgcgccccgcagacagaggtcatttctgatgaggtttagtttcacaagtgcactccccacgaaaaccctagtgaatcacaattctcgtgattgctgctttgggcacactcccacttcctagagccattcacccccactcacaacaagtttggttggaccgcactgcctcgcccactccttcccactgttttcggaccttccatggcggaggtgagaccttgcagtgcttctcactcgggcgctccgcactccacaccgctgagggggcgctcgccaggccgcagccttcccaggtgccaggccccttcttcaccgcccgcctcgcccccgccgggggccccattcagggaatctgccctgtgtcgtcggggatcccggcacctcgggacttccatccccccaacagcactcaccccgtcttcacctgagcccctgaccgcctcccctccacggcccaccttcctccccgtccaggccccttcacgaccacgaagccgccggtggcctcgcagcctgtgaagggaaggaggacgacctcgtggcccttctccctcggaggccacagaccaggaagcgggacccgcctgacccacccgaggccctctccaccctcactcacacttcagcccccgggatgactggcctgcacacctaccagatgaatctcagtagaggaaaaagagtccggacggcaggaaccacacagcactgcctcacagctccctggcgttcttcacgtgggcgaaggggccgggcagaagacgcccagtgaacatgcgcactgaggcgggagcccagggagcatgcgcggctgtgggctggggagggctgccgttcccagcgccacgccccaaaccctccatgcccatcctcattgaggataagggaatcccacctccctctgctgtttcctatgcctctgggactcaagtagtgctcccctcaaaactcaccccatcttcaactgaaccccacccccaacccagggccctctcttgccccggacccaccatggggacaaggaccactgtgactggctgggaagacaggtaaaccacctgcgaaaacagaaatagcaacctatcccaaaaggaaattgttcaatgtgaacaagtcagagaaagagactgaaagaaaaatgaatagaatcgctaggacccgtaagaaaatgctaaaacgatatctatcatttgtagcatcagaatcgcagagggtgaagtgacagtattagggaaacaggacagccagagtgacaccacgtgaaaatatactccgtcttgaaagcagcaagatacatagtcctaccagtcacaacccatggtcctaagatgtttggagttgagaaaacagatgaaaggtacctccaaggacatgctcccacagcagcggaaagtgcacggttcccaacacccattaacaatatatgctttcaacagaattatgctttcatggacttacacactggtaagtcaaggacagttttctttaaatcaatagaatgataaaagtcatcatgctcttagcccacccgcacaaaggcacagattaactttagtctttatatagataagacccctatataagaaaaaccagaccaggccaaggctcacgcctgtaatcctagtattttgggaggctgagctggccagatcacctgagctcaggacttcgagaccagcctaagcaacatcagaaaatctcatcactacaaaaaacaaacaaaaaaccatcgaaaaattagctgggcatggtggcatgtacctatactcacagctcctcaggaggctgaggtgggaggcgcgcttgagcccagcaggtcaaggctgcagcgagctctgataacaccaccgcactccagcctcggtgacagagtgagacgctgtctcaagttttaataatcgaacctaaaaacgtacaaatttatcaatcgaattcactatattaacacatgaatgggaaaaaacgctgtggtaatcgaaatagatgcactgtttgatgaaaatcaacatatattcaaatgaatactctcagcaaatttggaacagaatgcaatgactcactctgataaagtccgtctacaaaaaaaggagagtgaataggatggtgaaatgttgaaatttttcggtttctcatcagggataagacaaggatgtccactgtcaccattgtaacgggtgggtctgcgcaatgccataaaatcagaaaaggaaataaaactctttacaatggcaatgacgggcccgccacggtggcccacgccagtaatcccagcactgtgggaggtgaggtgggtgcatcacttgcactcaaaagttcaacaacagcccgggaaacatggcaaaaccccgtctctacaaaaaaatacaaaagggaaaagaaaaaaatatggcggaaacaaaactgctcttattccaggatgatatgtttctgtatattgaagactgaaaacgacctagaagtaaactttagaattcacaagcatatttcacaaggccgctggatagaaaaccaatatgtaagaattatgtctccaccgggcacggaggctcatgcctgtaatcccagcactttgggaggccaaggcaggtgaatcacgaggtcaggagttcaagagcaccccggccaagatggcgaaagcccatctctagtaaaaacacaaaacttagccaggcgtgctggtgggtgcctataatcccagcta

SEQ ID NO: 1563647 - DNA, 4001 bp, Homo sapiens
ttttccagtcaatttcaggcattctttccattgttttctttcctcctcttcctcctatgtgacaatgcctaacacacacacacacacacacacacacacatgcacacacacacacgaacacacacacacgcacacaccagcagacgttcttcttccctttccctcaccttgacctgcagatgctccctcatcctctccctcctgagcagctgcaggatcctgacgttgagttgctggttccccttcttcaggtgttgctggttccacttcatcactgaactgctcgggctggggaatacgtgtgggtgtgcaaataaaaaataagtttcgttattgatacaaaattttacatatatacacagaatacatagctatttctggtcctaactaagcctaaagacatttctccaactctatgctctatgcccaataaggttactccacccacagggaggttactgtgagaaaagtgacgcacgaggactttggaggctattgtactctgtgttggaatacatgtgtacaatctgtcattaacaaacaaagccggagaaagaagtcatgggcaaaagctgaagaacacgagaggaaaaaaaaaatcctccagaatcaatgtttccttcatgagatgccatcatcattttttatgagcaggaaagacctttatcagcatttccacactaatgcaacaacgctatcacaaaaattaatttctactaatagaaaacatcgaattaacgttcaagcactcacccgcataggcccaatcatttcaggaggctgtacatagggtcttggtctaggccaataataggtcgatcttcctcgccaactcatatttcacactgaaaacagacaaccgtgattgggaacgtgcgctccacagggctgctatattcgatcacttccatggataaatgtaaacttgccgttttacttttgaaaatactctcaagataagtcccagagttaagcatacgtgtgtacgctgtctgagtgcctacaaagccacttctgctggccaggctggcagagcaatcatcttaaggcatgtggcaaaaggcagaggacatttttttctaaatttcttttggacacgcggtctcgctgtgttgctcaggctggagtgcagcggcgtgatcacagctcactgcagcctcgacctcccgctcaagggatcctcccacctcagtgtcccgagtaactgggactacgtaggcgagcgccactgcgccccgcagacagaggtcatttctgatgaggtttagtttcacaagtgcactccccacgaaaaccctagtgaatcacaattctcgtgattgctgctttgggcacactcccacttcctagagccattcaccccccctcacaacaagtttggttggaccgcactgcctcgcccactccttcccactgttttcggaccttccatggcggaggtgagaccttgcagtgcttctcactcaggcgctccgcactccacaccgctggggggggcgctcaccaggccgcagccttcccaggtgccaggccccttcttcaccgcccgcctcgcccccgccggaggccccattcagggaatctgccctgtgtcgtcgggggttcccggcacctcgggacttccatccccccaacagcactcaccccatcttcacctgagcccctgaccgcctcccctccacggcccaccttcctccccgtccaggccccttcacgaccacgaagccgccggtggcctcgcagcctgtgaagggaaggaggacgacctcgtggcccttctccctcggaggccacagaccaggaagcgggacccgcctgacccacccaaggccctctccaccctcactcacacttcagcccccgggatgactggcctgcagacctaccagatgaatctcagtagaggaaaaagagtccggacggcaggaaccacacagcactgcctcacagctccctggcgttcttcacgtgggcgaaggggccgggcagaagacgcccagtgaacatgcgcactgaggcgggagcccagggagcatgcgcggctgtgggctggggagggctgccgttcccagcgccacgccccaaaccctccatgcccatcctcattgaggataagggaatcccacctccctctgctgtttcctatgcctctgggactcaagtagtgctcccctcaaaactcaccccatcttcaactgaaccccacccccaacccagggccctctcttgccccggacccaccatggggacaaggaccactgtgactggctgggaagacaggtaaaccacctgcgaaaacagaaatagcaacctatcccaaaaggaaattgttcattgtgaacaagtcagagaaagagactgaaagaaaaatgaatagaatcgctaggacccgtaagaaaatgctaaaacgatatctatcatttgtagcatcagaatcacagagggtgaagtgacagtattagggaaacaggacagccagagtgaaaccacgtgaaaatatactccgtcttgaaagcagcaagatacatagtcctaccagtcacaacccatggtcctaagatgtttggagttgagaaaacagatgaaaggtacctccaaggacatgctcccacagcagcggaaagtgcacggttcccaacacccattaacaatatatgctttcaacagaattatgctttcatggccttacacactggtaagtcaaggatagttttctttaaatcaatagaatgataaaagtcatcatgctcttagcccacccgcacaaaggcacagattaactttagtctttatatagataagacccctatataagaaaaaccagaccaggccaaggctcacgcctgtaatcctagtattttgggaggctgagctggccagatcacctgagctcaggacttcgagaccagcctaagcaacatcagaaaatctcatcactacaaaaaacaaacaaaaaaccatcgaaaaattagctgggcatggtggcatgtacctatactcacagctactcaggaggctgaggtgggaggagcgcctgagcccaggaggtcaaggctgcagcgagctctgataacaccactgcactccagcctcggtgacagagtgagacgctgtctcaagttttaataatcgaacctaaaaacgtacaaatttatcaatcgaattcactatattaacacatgaatgggaaaaaacgctgtggtaatcgaaatagatgcactgtttgatgaaaatcaacatatattcaaatgaatactctcagcaaatttggaacagaatggaatgactcactctgataaagtccatctacaaaaaaaggagagtgaataggatggtgaaatgttgaaatttttcggtttctcatcagggataagacaaggatgtccactgtcaccattgtaacgggtgggtctgcgcaatgccataaaatcagaaaaggaaataaaactctttacaatggcaacgacgggcccgccacggtggcccacgccagtaatcccagcactgtgggagatgacgtgggtgcatcacttgcactcaaaagttcaacaacagcccgggaaacatggcaaaaccccgtctctacaaaaaaatacaaaagggaaaagaaaaaaaaatggcggaaacaaaactgctcttattccaggatgatatgtttctgtatattgaagactgaaaacgacctagaagtaaactttagaattcacaagcatatttcacaaggccgctggatagaaaaccaatatgtaagaattatgtctccaccgggcgcggaggctcatgcctgtaatcccagcactttgggaggccaaggcaggtgaatcacgaggtcaggagttcaagagcaccccggccaagatggcgaaagcccatctctagtaaaaacacaaaacttagccaggcgtgctggtgggtgcctataatcccagctactcgggaggctgaggcagacaattgcttgaatccgggaggcggggttgcagtgagcagagatcgcgcca

SEQ ID NO: 1563648 - DNA, 4001 bp, Homo sapiens
ctaagctgcaaactacatagcctcctcgcttttccagtcaatttcaggcattctttccattgttttctttcctcctcttcctcctatgtgacaatgcctcacacacacacacacacacacacacacacgtgcacacacacacacgaacacacacacacgcacacaccagcagacgttcttcttccctttccctcaccttgacctgcagatgctccctcatcctctccctcctgagcagctgcaggatcctgacgttgagttgctggttccccttcttcaggtgttgctggttccacttcatcactgaactgctcgggctggggaatacgtgtgggtgtgcaaatagaaaataagtttcgttattgatacaaaattttacatatatacacagaatacatagctatttctggtcataactaagcctaaagacatttctccaactctatgctctatgcccaataaggttactccacccacagggaggttactgtgagaaaagtgacgcacgaggactttggaggctattgtactctgtgttggaatacatgtgtacaatctgtcattaacaaacaaagccggagaaagaagtcatgggcaaaagctgaagaacacgagaggaaaaaaaaaatcctccagaatcaatgtttccttcatgagatgccatcatcattttttatgagcaggaaagacctttatcagcatttccacactaatgcaacaacgctatcacaaaaattaatttctactaatagaaaacatcgaattaacgtttaagcactcacccgcataggcccaatcatttcaggaggctctacgtagcgtcttggtctaggccaataataggtcgatcttcctcgccaactcatatttcacactgaaaacagacaaccgtgattgggaacgtgcgctccacagggctgctatattcgatcacttccatggataaatgtaaacttgccgttttacttttgaaaatactctcaagataagtcccagagttaagcatacgtgtgtacgctgtctgagtgcctacaaagccacttctgctggccaggctggcagagcaatcatcttaaggcgtgtggcaaaaggcagaggacatttttttctaaatttcttttggacacgcggtctcgctgtgttgctcaggctggagtgcagcggcgtgatcacagctcactgcagcctcgacctcccgctcaagggatcctcccacctcagtgtcccgagtaactgggactacgtaggcgagcgccactgcgccccgcagacagaggtcatttctgatgaggtttagtttcacaagtgcactccccacgaaaaccctagtgaatcacaattctcgtgattgctgctttgggcacactcccacttcctagagccattcaccccccctcacaacaagtttggttggaccgcactgcctcgcccactccttcccactgttttcggaccttccatggcggaggtgagaccttgcagtgcttctcactcgggcgctccgcactccacaccgctgcgggggcgctcaccaggccgcagccttcccaggtgccaggccccttcttcaccgcccgcctcgcccccgccggggaccccattcagggaatctgccctgtgtcgtcgggggttcccggcacctcgggacttccatccccccaacagcactcaccccgtcttcacctgagcccctgaccgcctcccctccacggcccaccttcctccccgtccaggccccttcacaaccacgaagccgctggtggcctcgcagcctgtgaagggaaggaggacgacctcgtggcccttctccctcggaggccacagaccaggaagcgggacccgcctgacccacccgaggccctctccaccctcactcacacttcagcccccgggatgactggcctgcacacctaccagatgaatctcagtagaggaaaaagagtccggacggcaggaaccacacagcactgcctcacagctccctggcgttcttcacgtgggcgaaggggccgggcagaaggcgcccagtgaacatgcgcactgaggcgggagcccagggagcatgcgcggctgtgggctggggagggctgccgttcccagcgccacgccccaaaccctccatgcccatcctcattgaggataagggaatcccacctccctctgctgtttcctatgcctctgggactcaagtagtgctcccctcaaaactcaccccatcttcaactgaaccccacccccaacccagggccctctcttgccccggacccaccatggggacaaggaccactgtgactggctgggaagacaggtaaaccacctgcgaaaacagaaatagcaacctatcccaaaaggaaattgttcaatgtgaacaagtcagagaaagagactgaaagaaaaatgaatagaatcgctaggacccgtaagaaaatgctaaaacgatatctatcatttgtagcatcagaatcgcagagggtgaagtgacagtattagggaaacaggacagccagagtgacaccacgtgaaaatatactccgtcttgaaagcagcaagatacatagtcctaccagtcacaacccatggtcctaagatgtttggagttgagaaaacagatgaaaggtacctccaaggacatgctcccacagcagcggaaagtgcacggttcccaacacccattaacaatatatgctttcaacagaattatgctttcatggacttacacactggtaagtcaaggacagttttctttaaatcaatagaatgataaaagtcatcatgctcttagcccacccgcacaaaggcacagattaactttagtctttatatagataagacccctatataagaaaaaccagaccaggccaaggctcacgcctgtaatcctagtattttgggaggctgagctggccagatcacctgagctcaggacttcgagaccagcctaagcaacatcagaaaatctcatcactacaaaaaacaaacaaaaaaaccatcgaaaaattagctgggcatggtggcatgtacctatactcacagctactcaggaggctgaggtgggaggagcgcttgagcccaggaggtcaaggctgcagcgagctctgataacaccaccgcactccagcctcggtgacagagtgagacgctgtctcaagttttaataatcgaacctaaaaacgtacaaatttatcaatcgaattcactatattaacacatgaatgggaaaaaacgctgtggtaatcgaaatagatgcactgtttgatgaaaatcaacatatattcaaatgaatactctcagcaaatttggaacagaatggaatgactcactctgataaagtccgtctacaaaaaaaggagagtgaataggatggcgaaatgttgaaatttttcggtttctcatcagggataagacaaggatgtccactgtcaccattgtaacgggtgggtctgcgcaatgccataaaatcagaaaaggaaataaaactctttacaatggcaacgacgggcccgccacggtggcccacgccagtaatcccagcactgtgggaggtgacgtgggtgcatcacttgcactcaaaagttcaacaacagcccgggaaacatggcaaaaccccgtctctacaaaaaaatacaaaagggaaaagaaaaaaaaatggcggaaacaaaactgctcttattccaggatgatatgtttctgtatattgaagactgaaaacgacctagaagtaaactttagaattcacaagcatatttcacaaggccgctggatagaaaaccaatatgtaagaattatgtctccaccgggcgcggaggctcatgcctgtaatcccagcactttgggaggccaaggcaggtgaatcacgaggtcaggagttcaagagcaccccggccaagatggcgaaagcccatctctagtaaaaacacaaaacttagccaggcgtgctggtgggtgcctataatcccagctactcgggaggctgaggcagacaattgcttgaatccgggagg

SEQ ID NO: 1563649 - DNA, 4001 bp, Homo sapiens
tttgcctaagctaagctgcaaactacatagcctcctcgcttttccactcaatttcaggcattctttccattgttttctttcctcctcttcctcctatgtgacaatgcctaacacacacacacacacacgtgcacacacacacacacgaacacacacacacgcacacaccagcagacgttcttcttccctttccctcaccttgacctgcagatgctccctcatcctgtccctcctgagcagctgcaggatcctgacgttgagttgctggttccccttcttcaggtgttgctggttccacttcatcactgaactgctcgggctggggaatacgtgtgggtgtgcaaataaaaaataagtttcgttattgatacaaaattttacatatatacacagaatacatagctatttctggtcctaactaagcctaaagacatttctccaactctatgctctatgcccaataaggttactccacccacagggaggatactgtgagaaaagtgacgcacgaggactttggaggctattatactctgtgttggaatacatgtgtacaatctgtcattaacaaacaaagccggagaaagaagtcatgggcaaaagctgaagaacacgagaggaaaaaaaaaatcctccagaatcaatgtttccttcatgagatgccatcctcattttttatgagcaggaaagacctttatcagcatttccacactaatgcaacaacgctatcacaaaaattaatttctactaatagaaaacatcgaattaacgtttaagcactcacccgcataggcccaatcatttcaggaggctctacgtagcgtcttggtctaggccgataggtcgatcttcctcgccaactcatatttcacactgaaaacagacaaccgtgattgggaacgtgcgctccacagggctgctatattcgatcacttccatcgataaatgtaaacttgccgttttacttttgaaaatactctcaagataagtcccagagttaagcatacgtgtgtacgctgtctgagtgcctacaaagccacttctgctggccaggctggcagagcaatcatcttaaggcgtgtggcaaaaggcagaggacatttttttctaaatttcttttggacacgcggtctcgctgtgttgctcaggctggagtgcagcggcgtgatcacagctcactgcagcctcgacctcccgctcaagggatcctcccacctcagtgtccccagtaactgggactacgtaggcgagcgccactgcgccccgcagacagaggtcatttctgatgaggtttagtttcacaagtgcactccccacgaaaaccctagtgaatcacaattctcgtgattgctgctttgggcacactcccacttcctagagccattcaccccccctcacaacaagtttggttggaccgcactgcctcgcccactccttcccactgttttcggaccttccatggcggaggtgagaccttgcagtgcttctcactcgggcgctccgcactccacaccgctgggggggggctcgccaggccccagccttcccaggtgccaggccccttcttcaccgcctgcctcgcccccgccgggggccccattcagggaatctgccctgtgtcgtcggggatcccggcacctcgggacttccatccccccaacagcactcaccccgtcttcacctgagcccctgaccgcctcccctccacggcccaccttcctccccgtccaggccccttcacgaccacgaagccgccggtggcctcgcagcctgtgaagggaaggaggacgacctcgtggcccttctccctcggaggccacagaccaggaagcgggacccgcctgacccacccgaggccctctccaccctcactcacacttcagcccccgggatgactggcctgcacacctaccagatgaatctcagtagaggaaaaagagtccggacggcaggaaccacacagcactgcctcacagctccctggcgttcttcacgtgggcgaaggggccgggcagaagacgcccagtgaacatgcgcactgaggcgggagcccagggagcatgcgcggctgtgggctggggagggctgccgttcccagcgccacgccccaaaccctccatgcccatcctcattgaggataagggaatcccacctccctctgctgtttcctatgcctctgggactcaagtagtgctcccctcaaaactcaccccatcttcaactgaaccccacccccaacccagggccctctcttgccccggacccaccatggggacaaggaccactgtgactggctgggaagacaggtaaaccacctgcgaaaacagaaatagcaacctatcccaaaaggaaattgttcaatgtgaacaagtcagagaaagagactgaaagaaaaatgaatagaatcgctaggacccgtaagaaaatgctaaaacgatatctatcatttgtagcatcagaatcgcagagggtgaagtgacagtattagggaaacaggacagccagagtgacaccacgtgaaaatatactccgtcttgaaagcagcaagatacatagtcctaccagtcacaacccatggtcctaagatgtttggagttgagaaaacagatgaaaggtacctccaaggacatgctcccacagcagcggaaagtgcacggttcccaacacccattaacaatatatgctttcaacagaattatgctttcatggacttacacactggtaagtcaaggacagttttctttaaatcaatagaatgataaaagtcatcatgctcttagcccacccgcacaaaggcacagattaactttagtctttatatagataagacccctatataagaaaaaccagaccaggccaaggctcacgcctgtaatcctagtattttgggaggctgagctggccagatcacctgagctcaggacttcgagaccagcctaagcaacatcagaaaatctcatcactacaaaaaacaaacaaaaaaccatcgaaaaattagctgggcatggtggcatgtacctatactcacagctcctcaggaggctgaggtgggaggcgcgcttgagcccaggaggtcaaggctgcagcgagctctgataacaccaccgcactccagcctcggtgacagagtgagacgctgtctcaagttttaataatcgaacctaaaaacgtacaaatttatcaatcgaattcactatattaacacatgaatgggaaaaaacgctgtggtaatcgaaatagatgcactgtttgatgaaaatcaacatatattcaaatgaatactctcagcaaatttggaacagaatgcaatgactcactctgataaagtccgtctacaaaaaaaggagagtgaataggatggcgaaatgttgaaatttttcggtttctcatcagggagaagacaaggatgtccactgtcaccattgtaacgggtgggtctgcacaatgccataaaatcagaaaaggaaataaaactctttacaatgccaacgacgggcccgccacggtggcccacgccagtaatcccagcactgtgggaggtgaggtgggtgcatcacttgcactcaaaagttcaacaacagcccgggaaacatggcaaaaccccgtctctacaaaaaaatacaaaagggaaaagaaaaaaatatggcggaaacaaaactgctcttattccaggatgatatgtttctgtatattgaagactgaaaacgacctagaagtaaactttagaattcacaagcatatttcacaaggccgctggatagaaaaccaatatgtaagaattatgtctccaccgggcacggaggctcatgcctgtaatcccagcactttgggaggccaaggcaggtgaatcacgaggtcaggagttcaagagcaccccggccaagatggcgaaagcccatctctagtaaaaacacaaaacttagccaggcgtgctggtgggtgcctataatcccagctactcgggaggctgaggcagacaattgcttgaatccgggaggcgg

SEQ ID NO: 1563650 - DNA, 4001 bp, Homo sapiens
atcatagtgagggatttgcctaagctaagctgcaaactacatagcctcctcgcttttccactcaatttcaggcattctttccattgttttctttcctcctcttcctcctatgtgacaatgcctaacacacacacacacacacgtgcacacacacacacacgaacacacacacacgcacacaccagcagacgttcttcttccctttccctcaccttgacctgcagatgctccctcatcctgtccctcctgagcagctgcaggatcctgacgttgagttgctggttccccttcttcaggtgttgctggttccacttcatcactgaactgctcgggctggggaatacgtgtgggtgtgcaaataaaaaataagtttcgttattgatacaaaattttacatatatacacagaatacatagctatttctggtcctaactaagcctaaagacatttctccaactctatgctctatgcccaataaggttactccacccacagggaggatactgtgagaaaagtgacgcacgaggactttggaggctattatactctgtgttggaatacatgtgtacaatctgtcattaacaaacaaagccggagaaagaagtcatgggcaaaagctgaagaacacgagaggaaaaaaaaaatcctccagaatcaatgtttccttcatgagatgccatcctcattttttatgagcaggaaagacctttatcagcatttccacactaatgcaacaacgctatcacaaaaattaatttctactaatagaaaacatcgaattaacgtttaagcactcacccgcataggcccaatcatttcaggaggctctacgtagcgtcttggtctaggccgataggtcgatcttcctcgccaactcatatttcacactgaaaacagacaaccgtgattgggaacgtgcgctccacagggctgctatattcgatcacttccatcgataaatgtaaacttgccgttttacttttgaaaatactctcaagataagtcccagagttaagcatacgtgtgtacgctgtctgagtgcctacaaagccacttctgctggccaggctggcagagcaatcatcttaaggcgtgtggcaaaaggcagaggacatttttttctaaatttcttttggacacgcggtctcgctgtgttgctcaggctggagtgcagcggcgtgatcacagctcactgcagcctcgacctcccgctcaagggatcctcccacctcagtgtccccagtaactgggactacgtaggcgagcgccactgcgccccgcagacagaggtcatttctgatgaggtttagtttcacaagtgcactccccacgaaaaccctagtgaatcacaattctcgtgattgctgctttgggcacactcccacttcctagagccattcaccccccctcacaacaagtttggttggaccgcactgcctcgcccactccttcccactgttttcggaccttccatggcggaggtgagaccttgcagtgcttctcactcgggcgctccgcactccacaccgctgggggggggctcgccaggccccagccttcccaggtgccaggccccttcttcaccgcctgcctcgcccccgccgggggccccattcagggaatctgccctgtgtcgtcggggatcccggcacctcgggacttccatccccccaacagcactcaccccgtcttcacctgagcccctgaccgcctcccctccacggcccaccttcctccccgtccaggccccttcacgaccacgaagccgccggtggcctcgcagcctgtgaagggaaggaggacgacctcgtggcccttctccctcggaggccacagaccaggaagcgggacccgcctgacccacccgaggccctctccaccctcactcacacttcagcccccgggatgactggcctgcacacctaccagatgaatctcagtagaggaaaaagagtccggacggcaggaaccacacagcactgcctcacagctccctggcgttcttcacgtgggcgaaggggccgggcagaagacgcccagtgaacatgcgcactgaggcgggagcccagggagcatgcgcggctgtgggctggggagggctgccgttcccagcgccacgccccaaaccctccatgcccatcctcattgaggataagggaatcccacctccctctgctgtttcctatgcctctgggactcaagtagtgctcccctcaaaactcaccccatcttcaactgaaccccacccccaacccagggccctctcttgccccggacccaccatggggacaaggaccactgtgactggctgggaagacaggtaaaccacctgcgaaaacagaaatagcaacctatcccaaaaggaaattgttcaatgtgaacaagtcagagaaagagactgaaagaaaaatgaatagaatcgctaggacccgtaagaaaatgctaaaacgatatctatcatttgtagcatcagaatcgcagagggtgaagtgacagtattagggaaacaggacagccagagtgacaccacgtgaaaatatactccgtcttgaaagcagcaagatacatagtcctaccagtcacaacccatggtcctaagatgtttggagttgagaaaacagatgaaaggtacctccaaggacatgctcccacagcagcggaaagtgcacggttcccaacacccattaacaatatatgctttcaacagaattatgctttcatggacttacacactggtaagtcaaggacagttttctttaaatcaatagaatgataaaagtcatcatgctcttagcccacccgcacaaaggcacagattaactttagtctttatatagataagacccctatataagaaaaaccagaccaggccaaggctcacgcctgtaatcctagtattttgggaggctgagctggccagatcacctgagctcaggacttcgagaccagcctaagcaacatcagaaaatctcatcactacaaaaaacaaacaaaaaaccatcgaaaaattagctgggcatggtggcatgtacctatactcacagctcctcaggaggctgaggtgggaggcgcgcttgagcccaggaggtcaaggctgcagcgagctctgataacaccaccgcactccagcctcggtgacagagtgagacgctgtctcaagttttaataatcgaacctaaaaacgtacaaatttatcaatcgaattcactatattaacacatgaatgggaaaaaacgctgtggtaatcgaaatagatgcactgtttgatgaaaatcaacatatattcaaatgaatactctcagcaaatttggaacagaatgcaatgactcactctgataaagtccgtctacaaaaaaaggagagtgaataggatggcgaaatgttgaaatttttcggtttctcatcagggagaagacaaggatgtccactgtcaccattgtaacgggtgggtctgcacaatgccataaaatcagaaaaggaaataaaactctttacaatgccaacgacgggcccgccacggtggcccacgccagtaatcccagcactgtgggaggtgaggtgggtgcatcacttgcactcaaaagttcaacaacagcccgggaaacatggcaaaaccccgtctctacaaaaaaatacaaaagggaaaagaaaaaaatatggcggaaacaaaactgctcttattccaggatgatatgtttctgtatattgaagactgaaaacgacctagaagtaaactttagaattcacaagcatatttcacaaggccgctggatagaaaaccaatatgtaagaattatgtctccaccgggcacggaggctcatgcctgtaatcccagcactttgggaggccaaggcaggtgaatcacgaggtcaggagttcaagagcaccccggccaagatggcgaaagcccatctctagtaaaaacacaaaacttagccaggcgtgctggtgggtgcctataatcccagctactcgggaggctgaggcagacaattgcttg

SEQ ID NO: 1563651 - DNA, 4001 bp, Homo sapiens; identical to SEQ ID NO: 1563650

SEQ ID NO: 1563652 - DNA, 4001 bp, Homo sapiens
ctcctcgcttttccagtcaatttcaggcattctttccattgttttctttcctcctcttcctcctatgtgacaatgcctcacacacacacacacacacacacacacacgtgcacacacacacacgaacacacacacacgcacacaccagcagacgttcttcttccctttccctcaccttgacctgcagatgctccctcatcctctccctcctgagcagctgcaggatcctgacgttgagttgctggttccccttcttcaggtgttgctggttccacttcatcactgaactgctcgggctggggaatacgtgtgggtgtgcaaatagaaaataagtttcgttattgatacaaaattttacatatatacacagaatacatagctatttctggtcataactaagcctaaagacatttctccaactctatgctctatgcccaataaggttactccacccacagggaggttactgtgagaaaagtgacgcacgaggactttggaggctattgtactctgtgttggaatacatgtgtacaatctgtcattaacaaacaaagccggagaaagaagtcatgggcaaaagctgaagaacacgagaggaaaaaaaaaatcctccagaatcaatgtttccttcatgagatgccatcatcattttttatgagcaggaaagacctttatcagcatttccacactaatgcaacaacgctatcacaaaaattaatttctactaatagaaaacatcgaattaacgtttaagcactcacccgcataggcccaatcatttcaggaggctctacgtagcgtcttggtctaggccaataataggtcgatcttcctcgccaactcatatttcacactgaaaacagacaaccgtgattgggaacgtgcgctccacagggctgctatattcgatcacttccatggataaatgtaaacttgccgttttacttttgaaaatactctcaagataagtcccagagttaagcatacgtgtgtacgctgtctgagtgcctacaaagccacttctgctggccaggctggcagagcaatcatcttaaggcgtgtggcaaaaggcagaggacatttttttctaaatttcttttggacacgcggtctcgctgtgttgctcaggctggagtgcagcggcgtgatcacagctcactgcagcctcgacctcccgctcaagggatcctcccacctcagtgtcccgagtaactgggactacgtaggcgagcgccactgcgccccgcagacagaggtcatttctgatgaggtttagtttcacaagtgcactccccacgaaaaccctagtgaatcacaattctcgtgattgctgctttgggcacactcccacttcctagagccattcaccccccctcacaacaagtttggttggaccgcactgcctcgcccactccttcccactgttttcggaccttccatggcggaggtgagaccttgcagtgcttctcactcgggcgctccgcactccacaccgctgcgggggcgctcaccaggccgcagccttcccaggtgccaggccccttcttcaccgcccgcctcgcccccgccggggaccccattcagggaatctgccctgtgtcgtcgggggttcccggcacctcgggacttccatccccccaacagcactcaccccgtcttcacctgagcccctgaccgcctcccctccacggcccaccttcctccccgtccaggccccttcacaaccacgaagccgctggtggcctcgcagcctgtgaagggaaggaggacgacctcgtggcccttctccctcggaggccacagaccaggaagcgggacccgcctgacccacccgaggccctctccaccctcactcacacttcagcccccgggatgactggcctgcacacctaccagatgaatctcagtagaggaaaaagagtccggacggcaggaaccacacagcactgcctcacagctccctggcgttcttcacgtgggcgaaggggccgggcagaaggcgcccagtgaacatgcgcactgaggcgggagcccagggagcatgcgcggctgtgggctggggagggctgccgttcccagcgccacgccccaaaccctccatgcccatcctcattgaggataagggaatcccacctccctctgctgtttcctatgcctctgggactcaagtagtgctcccctcaaaactcaccccatcttcaactgaaccccacccccaacccagggccctctcttgccccggacccaccatggggacaaggaccactgtgactggctgggaagacaggtaaaccacctgcgaaaacagaaatagcaacctatcccaaaaggaaattgttcaatgtgaacaagtcagagaaagagactgaaagaaaaatgaatagaatcgctaggacccgtaagaaaatgctaaaacgatatctatcatttgtagcatcagaatcgcagagggtgaagtgacagtattagggaaacaggacagccagagtgacaccacgtgaaaatatactccgtcttgaaagcagcaagatacatagtcctaccagtcacaacccatggtcctaagatgtttggagttgagaaaacagatgaaaggtacctccaaggacatgctcccacagcagcggaaagtgcacggttcccaacacccattaacaatatatgctttcaacagaattatgctttcatggacttacacactggtaagtcaaggacagttttctttaaatcaatagaatgataaaagtcatcatgctcttagcccacccgcacaaaggcacagattaactttagtctttatatagataagacccctatataagaaaaaccagaccaggccaaggctcacgcctgtaatcctagtattttgggaggctgagctggccagatcacctgagctcaggacttcgagaccagcctaagcaacatcagaaaatctcatcactacaaaaaacaaacaaaaaaaccatcgaaaaattagctgggcatggtggcatgtacctatactcacagctactcaggaggctgaggtgggaggagcgcttgagcccaggaggtcaaggctgcagcgagctctgataacaccaccgcactccagcctcggtgacagagtgagacgctgtctcaagttttaataatcgaacctaaaaacgtacaaatttatcaatcgaattcactatattaacacatgaatgggaaaaaacgctgtggtaatcgaaatagatgcactgtttgatgaaaatcaacatatattcaaatgaatactctcagcaaatttggaacagaatggaatgactcactctgataaagtccgtctacaaaaaaaggagagtgaataggatggcgaaatgttgaaatttttcggtttctcatcagggataagacaaggatgtccactgtcaccattgtaacgggtgggtctgcgcaatgccataaaatcagaaaaggaaataaaactctttacaatggcaacgacgggcccgccacggtggcccacgccagtaatcccagcactgtgggaggtgacgtgggtgcatcacttgcactcaaaagttcaacaacagcccgggaaacatggcaaaaccccgtctctacaaaaaaatacaaaagggaaaagaaaaaaaaatggcggaaacaaaactgctcttattccaggatgatatgtttctgtatattgaagactgaaaacgacctagaagtaaactttagaattcacaagcatatttcacaaggccgctggatagaaaaccaatatgtaagaattatgtctccaccgggcgcggaggctcatgcctgtaatcccagcactttgggaggccaaggcaggtgaatcacgaggtcaggagttcaagagcaccccggccaagatggcgaaagcccatctctagtaaaaacacaaaacttagccaggcgtgctggtgggtgcctataatcccagctactcgggaggctgaggcagacaattgcttgaatccgggaggcggggttgcagtgagcagaga

SEQ ID NO: 1563653 - DNA, 4001 bp, Homo sapiens
tcatagtgagggatttgcctaagctaagctgcaaactacatagcctcctcgcttttccagtcaatttcaggcattctttccattgttttctttcctcctcttcctcctatgtgacaatgcctcacacacacacacacacacacacacacacgtgcacacacacacacgaacacacacacacgcacacaccagcagacgttcttcttccctttccctcaccttgacctgcagatgctccctcatcctctccctcctgagcagctgcaggatcctgacgttgagttgctggttccccttcttcaggtgttgctggttccacttcatcactgaactgctcgggctggggaatacgtgtgggtgtgcaaatagaaaataagtttcgttattgatacaaaattttacatatatacacagaatacatagctatttctggtcataactaagcctaaagacatttctccaactctatgctctatgcccaataaggttactccacccacagggaggttactgtgagaaaagtgacgcacgaggactttggaggctattgtactctgtgttggaatacatgtgtacaatctgtcattaacaaacaaagccggagaaagaagtcatgggcaaaagctgaagaacacgagaggaaaaaaaaaatcctccagaatcaatgtttccttcatgagatgccatcatcattttttatgagcaggaaagacctttatcagcatttccacactaatgcaacaacgctatcacaaaaattaatttctactaatagaaaacatcgaattaacgtttaagcactcacccgcataggcccaatcatttcaggaggctctacgtagcgtcttggtctaggccaataataggtcgatcttcctcgccaactcatatttcacactgaaaacagacaaccgtgattgggaacgtgcgctccacagggctgctatattcgatcacttccatggataaatgtaaacttgccgttttacttttgaaaatactctcaagataagtcccagagttaagcatacgtgtgtacgctgtctgagtgcctacaaagccacttctgctggccaggctggcagagcaatcatcttaaggcgtgtggcaaaaggcagaggacatttttttctaaatttcttttggacacgcggtctcgctgtgttgctcaggctggagtgcagcggcgtgatcacagctcactgcagcctcgacctcccgctcaagggatcctcccacctcagtgtcccgagtaactgggactacgtaggcgagcgccactgcgccccgcagacagaggtcatttctgatgaggtttagtttcacaagtgcactccccacgaaaaccctagtgaatcacaattctcgtgattgctgctttgggcacactcccacttcctagagccattcaccccccctcacaacaagtttggttggaccgcactgcctcgcccactccttcccactgttttcggaccttccatggcggaggtgagaccttgcagtgcttctcactcgggcgctccgcactccacaccgctgcgggggcgctcaccaggccgcagccttcccaggtgccaggccccttcttcaccgcccgcctcgcccccgccggggaccccattcagggaatctgccctgtgtcgtcgggggttcccggcacctcgggacttccatccccccaacagcactcaccccgtcttcacctgagcccctgaccgcctcccctccacggcccaccttcctccccgtccaggccccttcacaaccacgaagccgctggtggcctcgcagcctgtgaagggaaggaggacgacctcgtggcccttctccctcggaggccacagaccaggaagcgggacccgcctgacccacccgaggccctctccaccctcactcacacttcagcccccgggatgactggcctgcacacctaccagatgaatctcagtagaggaaaaagagtccggacggcaggaaccacacagcactgcctcacagctccctggcgttcttcacgtgggcgaaggggccgggcagaaggcgcccagtgaacatgcgcactgaggcgggagcccagggagcatgcgcggctgtgggctggggagggctgccgttcccagcgccacgccccaaaccctccatgcccatcctcattgaggataagggaatcccacctccctctgctgtttcctatgcctctgggactcaagtagtgctcccctcaaaactcaccccatcttcaactgaaccccacccccaacccagggccctctcttgccccggacccaccatggggacaaggaccactgtgactggctgggaagacaggtaaaccacctgcgaaaacagaaatagcaacctatcccaaaaggaaattgttcaatgtgaacaagtcagagaaagagactgaaagaaaaatgaatagaatcgctaggacccgtaagaaaatgctaaaacgatatctatcatttgtagcatcagaatcgcagagggtgaagtgacagtattagggaaacaggacagccagagtgacaccacgtgaaaatatactccgtcttgaaagcagcaagatacatagtcctaccagtcacaacccatggtcctaagatgtttggagttgagaaaacagatgaaaggtacctccaaggacatgctcccacagcagcggaaagtgcacggttcccaacacccattaacaatatatgctttcaacagaattatgctttcatggacttacacactggtaagtcaaggacagttttctttaaatcaatagaatgataaaagtcatcatgctcttagcccacccgcacaaaggcacagattaactttagtctttatatagataagacccctatataagaaaaaccagaccaggccaaggctcacgcctgtaatcctagtattttgggaggctgagctggccagatcacctgagctcaggacttcgagaccagcctaagcaacatcagaaaatctcatcactacaaaaaacaaacaaaaaaaccatcgaaaaattagctgggcatggtggcatgtacctatactcacagctactcaggaggctgaggtgggaggagcgcttgagcccaggaggtcaaggctgcagcgagctctgataacaccaccgcactccagcctcggtgacagagtgagacgctgtctcaagttttaataatcgaacctaaaaacgtacaaatttatcaatcgaattcactatattaacacatgaatgggaaaaaacgctgtggtaatcgaaatagatgcactgtttgatgaaaatcaacatatattcaaatgaatactctcagcaaatttggaacagaatggaatgactcactctgataaagtccgtctacaaaaaaaggagagtgaataggatggcgaaatgttgaaatttttcggtttctcatcagggataagacaaggatgtccactgtcaccattgtaacgggtgggtctgcgcaatgccataaaatcagaaaaggaaataaaactctttacaatggcaacgacgggcccgccacggtggcccacgccagtaatcccagcactgtgggaggtgacgtgggtgcatcacttgcactcaaaagttcaacaacagcccgggaaacatggcaaaaccccgtctctacaaaaaaatacaaaagggaaaagaaaaaaaaatggcggaaacaaaactgctcttattccaggatgatatgtttctgtatattgaagactgaaaacgacctagaagtaaactttagaattcacaagcatatttcacaaggccgctggatagaaaaccaatatgtaagaattatgtctccaccgggcgcggaggctcatgcctgtaatcccagcactttgggaggccaaggcaggtgaatcacgaggtcaggagttcaagagcaccccggccaagatggcgaaagcccatctctagtaaaaacacaaaacttagccaggcgtgctggtgggtgcctataatcccagctactcgggaggctgaggca

SEQ ID NO: 1563654 - DNA, 4001 bp, Homo sapiens
cttttatcatagtgagggatttgcctaagctaagctgcaaactacatagcctcctcgcttttccagtcaatttcaggcattctttccattgttttctttcctcctcttcctcctatgtgacaatgcctaacacacacacacgtgcacacacacacacgaacacacacacacgcacacaccagcagacgttcttcttccctttccctcaccttgacctgcagatgctccctcatcctctccctcctgagcagctgcaggatcctgacgttgagttgctggttccccttcttcaggtgttgctggttccacttcatcactgaactgctcgggctggggaatacgtgtgggtgtgcaaataaaaaataagtttcgttattgatacaaaattttacatatatacacagaatacatagctatttctggtcataactaagcctaaagacatttctccaactctatgctctatgcccaataaggttactccaaccacagggaggttactgtgagaaaagtgacacacgaggactttgggggctattatactctgtgttggaatacatgtgtacaatctgtcattaacaaacaaagccggagaaagaagtcatgggcaaaagctgaagaacacgagaggaaaaaaaaaatcctccagaatcaatgtttccttcatgagatgccatcctcattttttatgagcaggaaagacctttatcagcatttccacactaatgcaacgacgctatcacaaaaattaatttctactaatagaaaacatcgaattaacgtttaagcactcacccgcataggcccaatcatttcaggaggctgtacatagcgccttggtctaggccaataataggtcgatcttcctcgccaactcatatttcacactgaaaacagacaaccgtgattgggaacgtgcgctccagagggctgctatattcgatcacttccatggataaatgttaacttgccgttttacttttgaaaatactctcaaaataagtcccagagttaagcatacgtgtgtacgctgtctgagtgcctacaaagccacttctgctggccaggctggcagagcaatcatcttaaggcgtgtggcaaaaggcagaggacatttttttctaaatttcttttggacacgcggtctcgctgtgttgctcaggctggagtgcagcggcgtgatcacagctcactgcagcctcgacctcccgctcaagggatcctcccacctcagtgtccccagtaactgggaatacgtaggcgagcgccactgcgccccgcagacagaggtcatttctgatgaggtttagtttcacaagtgcactccccacgaaaaccctagtgaatcacaattctcgtgattgctgctttgggcacactcccacttcctagagccattcaccccccctcacaacaagtttggttggaccgcactgcctcgcccactccttcccactgttttcggaccttccatggcggaggtgagaccttgcagtgcttctcactcgggcgctccgcactccacaccgctggggggggcgctcgccaggccgcagccttcccaggtgccaggccccttcttcaccgcccgcctcgcccccgccgggggccccattcagggaatctgccctgtgtcgtcggggatcccggcacctcgggacttccatccccccaacagcactcaccccgtcttcacctgagcccctgaccgcctcccctccacggcccaccttcctccccgtccaggccccttcacgaccacgaagccgccggtggcctcgcagcctgtgaagggaaggaggacgacctcgtggcccttctccctcggaggccacagaccaggaagcgggacccgcctgacccacccgaggccctctccaccctcactcacacttcagcccccgggatgactggcctgcacacctaccagatgaatctcagtagaggaaaaagagtccggacggcaggaaccacacagcactgcctcacagctccctggcgttcttcacgtgggcgaaggggccgggcagaaggcgcccagtgaacatgcgcactgaggcgggagcccagggagcatgcgcggctgtgggctggggagggctgccgttcccagcgccacgccccaaaccctccatgcccatcctcattgaggataagggaatcccacctccctctgctgtttcctatgcctctgggactcaagtagtgctcccctcaaaactcaccccatcttcaactgaaccccacccccaacccagggccctctcttgccccggacccaccatggggacaaggaccactgtgactggctgggaagacaggtaaaccacctgcgaaaacagaaatagcaacctatcccaaaaggaaattgttcaatgtgaacaagtcagagaaagagactgaaagaaaaatgaatagaatcgctaggacccgtaagaaaatgctaaaacgatatctatcatttgtagcatcagaatcgcagagggtgaagtgacagtattagggaaacaggacagccagagtgacaccacgtgaaaatatactccgtcttgaaagcagcaagatacatagtcctaccagtcacaacccatggtcctaagatgtttggagttgagaaaacagatgaaaggtacctccaaggacatgctcccacagcagcggaaagtgcacggttcccaacacccattaacaatatatgctttcaacagaattatgctttcatggacttacacactggtaagtcaaggacagttttctttaaatcaatagaatgataaaagtcatcatgctcttagcccacccgcacaaaggaacagattaactttagtctttatatagataagacccctatataagaaaaaccagaccaggccaaggctcacgcctgtaatcctagtattttgggaggctgagctggccagatcacctgagctcaggacttcgagaccagcctaagcaacatcagaaaatctcatcactacaaaaaacaaacaaaaaaaccatcaaaaaattagctgggcatggtggcatgtacctatactcacagctactcaggaggctgaggtgggaggagcgcttgagcccaggaggtcaaggctgcagcgagctctgataacaccaccgcactccagcctcggtgacagagtgagacgctgtctcaagttttaataatcgaacctaaaaacgtacaaatttatcaatcgaattcactatattaacccatgaatgggaaaaaacgctgtggtaatcgaaatagatgcactgtttgatgaaaatcaacatatattcaaatgaatactctcagcaaatttggaacagaatggaatgactcactctagataaagtctgtctacaaaaaaagaagagtgaataggatggcgaaatgttgaaatttttcggtttctcatcagggataagacaaggatgtccactgtcaccattgtaacgggtgggtctgcgcaatgccataaaatcagaaaaggaaataaaactctttacaatggcaacgacgggcccgccacggtggcccacgccagtaatcccagcactgtgggaggtgacgtgggtgcatcacttgcactcaaaagttcaacaacagcccgggaaacatggcaaaaccccgtctctacaaaaaaatacaaaagggaaaagaaaaaaaaatggcggaaacaaaactgctcttattccaggatgatatgtttctgtatattgaagactgaaaacgacctagaagtaaactttagaattcacaagcatatttcacaaggccgctggatagaaaaccaatatgtaagaattatgtctccaccgggcgcggaggctcatgcctgtaatcccagcactttgggaggccaaggcaggtgaatcacgaggtcaggagttcaagagcaccccggccaagatggcgaaagcccatctctagtaaaaacacaaaacttagccaggcgtgctggtgggtgcctataatcccagctactcgggaggctgaggcagacaattgc

SEQ ID NO: 1563655 - DNA, 4001 bp, Homo sapiens
accatagtgagggatttgcctaagctaagctgcgaactacatagcctcctcgcttttccagtcaatttcaggcattctttccattgttttctttcctcctcttcctcctatgtgacaatgcctaacacacacacacacacgtgcacacacacacacacgaacacacacacacgcacacaccagcagacgttcttcttccctttccctcaccttgacctgcagatgctccctcatcctctccctcctgagcagctgcaggatcctgacgttgagttgctggttccccttcttcaggtgttgctggttccacttcatcactgaactgctcgggctggggaatacgtgtgggtgtgcaaataaaaaataagtttcgttattgatacaaaattttacatatatacacagaatacatagctatttctggtcctaactaagcctaaagacatttctccaactctatgctctatgcccaataaggttactccacccacagggaggttactgtgagaaaagtgacgcacgaggactttgggggctattatactctgtgttggaatacatgtgtacaatctgtcattaacaaacaaagccggagaaagaagtcatgggcaaaagctgaagaacacgagaggaaaaaaaaaatcctccagaatcaatgtttccttcatgagatgccatcctcattttttatgagcaggaaagacctttatcagcatttccacactaatgcaacgacgctatcacaaaaattaatttctactaatagaaaacatcgaattaacgtttaagcactcacccgcataggcccaatcatttcaggaggctgtacatagcgccttggtctaggccaataataggtcgatcttcctcgccaactcatatttcacactgaaaacagacaaccgtgattgggaacgtgcgctccagagggctgctatattcgatcacttccatggataaatgttaacttgccgttttacttttgaaaatactctcaaaataagtcccagagttaagcatacgtgtgtacgctgtctgagtgcctacaaagccacttctgctggccaggctggcagagcaatcatcttaaggcgtgtggcaaaaggcagaggacatttttttctaaatttcttttggacacgcggtctcgctgtgttgctcaggctggagtgcagcggcgtgatcacagctcactgcagcctcgacctcccgctcaagggatcctcccacctcagtgtccccagtaactgggaatacgtaggcgagcgccactgcgccccgcagacagaggtcatttctgatgaggtttagtttcacaagtgcactccccacgaaaaccctagtgaatcacaattctcgtgattgctgctttgggcacactcccacttcctagagccattcacccccactcacaacaagtttggttggaccgcactgcctcgcccactccttcccactgttttcggaccttccatggcggaggtgagaccttgcagtgcttctcactcgggcgctccgcactccacaccgctgagggggcgctcgccaggccgcagccttcccaggtgccaggccccttcttcaccgcccgcctcgcccccgccgggggccccattcagggaatctgccctgtgtcgtcggggatcccggcacctcgggacttccatccccccaacagcactcaccccgtcttcacctgagcccctgaccgcctcccctccacggcccaccttcctccccgtccaggccccttcacgaccacgaagccgccggtggcctcgcagcctgtgaagggaaggaggacgacctcgtggcccttctccctcggaggccacagaccaggaagcgggacccgcctgacccacccgaggccctctccaccctcactcacacttcagcccccgggatgactggcctgcacacctaccagatgaatctcagtagaggaaaaagagtccggacggcaggaaccacacagcactgcctcacagctccctggcgttcttcacgtgggcgaaggggccgggcagaagacgcccagtgaacatgcgcactgaggcgggagcccagggagcatgcgcggctgtgggctggggagggctgccgttcccagcgccacgccccaaaccctccatgcccatcctcattgaggataagggaatcccacctccctctgctgtttcctatgcctctgggactcaagtagtgctcccctcaaaactcaccccatcttcaactgaaccccacccccaacccagggccctctcttgccccggacccaccatggggacaaggaccactgtgactggctgggaagacaggtaaaccacctgcgaaaacagaaatagcaacctatcccaaaaggaaattgttcaatgtgaacaagtcagagaaagagactgaaagaaaaatgaatagaatcgctaggacccgtaagaaaatgctaaaacgatatctatcatttgtagcatcagaatcgcagagggtgaagtgacagtattagggaaacaggacagccagagtgacaccacgtgaaaatatactccgtcttgaaagcagcaagatacatagtcctaccagtcacaacccatggtcctaagatgtttggagttgagaaaacagatgaaaggtacctccaaggacatgctcccacagcagcggaaagtgcacggttcccaacacccattaacaatatatgctttcaacagaattatgctttcatggacttacacactggtaagtcaaggacagttttctttaaatcaatagaatgataaaagtcatcatgctcttagcccacccgcacaaaggcacagattaactttagtctttatatagataagacccctatataagaaaaaccagaccaggccaaggctcacgcctgtaatcctagtattttgggaggctgagctggccagatcacctgagctcaggacttcgagaccagcctaagcaacatcagaaaatctcatcactacaaaaaacaaacaaaaaaccatcgaaaaattagctgggcatggtggcatgtacctatactcacagctcctcaggaggctgaggtgggaggcgcgcttgagcccaggaggtcaaggctgcagcgagctctgataacaccaccgcactccagcctcggtgacagagtgagacgctgtctcaagttttaataatcgaacctaaaaacgtacaaatttatcaatcgaattcactatattaacacatgaatgggaaaaaacgctgtggtaatcgaaatagatgcactgtttgatgaaaatcaacatatattcaaatgaatactctcagcaaatttggaacagaatgcaatgactcactctgataaagtccgtctacaaaaaaaggagagtgaataggatggtgaaatgttgaaatttttcggtttctcatcagggataagacaaggatgtccactgtcaccattgtaacgggtgggtctgcgcaatgccataaaatcagaaaaggaaataaaactctttacaatggcaacgacgggcccgccacggtggcccacgccagtaatcccagcactgtgggaggtgaggtgggtgcatcacttgcactcaaaagttcaacaacagcccgggaaacatggcaaaaccccgtctctacaaaaaaatacaaaagggaaaagaaaaaaatatggcggaaacaaaactgctcttattccaggatgatatgtttctgtatattgaagactgaaaacgacctagaagtaaactttagaattcacaagcatatttcacaaggccgctggatagaaaaccaatatgtaagaattatgtctccaccgggcgcggaggctcatgcctgtaatcccagcactttgggaggccaaggcaggtgaatcacgaggtcaggagttcaagagcaccccggccaagatggcgaaagcccatctctagtaaaaacacaaaacttagccaggcgtgctggtgggtgcctataatcccagctactcgggaggctgaggcagacaattgctt

SEQ ID NO: 1563656 - DNA, 4001 bp, Homo sapiens
acttttatcatagtgagggatttgcctaagctaagctgcaaactacatagcctcctcgcttttccagtcaatttcaggcattctttccattgttttctttcctcctcttcctcctatgtgacaatgcctaacacacacacacgtgcacacacacacacgaacacacacacacgcacacaccagcagacgttcttcttccctttccctcaccttgacctgcagatgctccctcatcctctccctcctgagcagctgcaggatcctgacgttgagttgctggttccccttcttcaggtgttgctggttccacttcatcactgaactgctcgggctggggaatacgtgtgggtgtgcaaatagaaaataagtttcgttattgatacaaaattttacatatatacacagaatacatagctatttctggtcctaactaagcctaaagacatttctccaactctatgctctatgcccaataaggttactccacccacagggaggttactgtgagaaaagtgacgcacgaggactttgggggctattatactctgtgttggaatacatgtgtacaatctgtcattaacaaacaaagccggagaaagaagtcatgggcaaaagctgaagaacacgagaggaaaaaaaaaatcctccagaatcaatgtttccttcatgagatgccatcctcattttttatgagcaggaaagacctttatcagcatttccacactaatgcaacgacgctatcacaaaaattaatttctactaatagaaaacatcgaattaacgtttaagcactcacccgcataggcccaatcatttcaggaggctgtacatagcgccttggtctaggccaataataggtcgatcttcctcgccaactcatatttcacactgaaaacagacaaccgtgattgggaacgtgcgctccagagggctgctatattcgatcacttccatggataaatgttaacttgccgttttacttttgaaaatactctcaaaataagtcccagagttaagcatacgtgtgtacgctgtctgagtgcctacaaagccacttctgctggccaggctggcagagcaatcatcttaaggcgtgtggcaaaaggcagaggacatttttttctaaatttcttttggacacgcggtctcgctgtgttgctcaggctggagtgcagcggcgtgatcacagctcactgcagcctcgacctcccgctcaagggatcctcccacctcagtgtccccagtaactgggaatacgtaggcgagcgccactgcgccccgcagacagaggtcatttctgatgaggtttagtttcacaagtgcactccccacgaaaaccctagtgaatcacaattctcgtgattgctgctttgggcacactcccacttcctagagccattcacccccactcacaacaagtttggttggaccgcactgcctcgcccactccttcccactgttttcggaccttccatggcggaggtgagaccttgcagtgcttctcactcgggcgctccgcactccacaccgctgagggggcgctcgccaggccgcagccttcccaggtgccaggccccttcttcaccgcccgcctcgcccccgccgggggccccattcagggaatctgccctgtgtcgtcggggatcccggcacctcgggacttccatccccccaacagcactcaccccgtcttcacctgagcccctgaccgcctcccctccacggcccaccttcctccccgtccaggccccttcacgaccacgaagccgccggtggcctcgcagcctgtgaagggaaggaggacgacctcgtggcccttctccctcggaggccacagaccaggaagcgggacccgcctgacccacccgaggccctctccaccctcactcacacttcagcccccgggatgactggcctgcacacctaccagatgaatctcagtagaggaaaaagagtccggacggcaggaaccacacagcactgcctcacagctccctggcgttcttcacgtgggcgaaggggccgggcagaagacgcccagtgaacatgcgcactgaggcgggagcccagggagcatgcgcggctgtgggctggggagggctgccgttcccagcgccacgccccaaaccctccatgcccatcctcattgaggataagggaatcccacctccctctgctgtttcctatgcctctgggactcaagtagtgctcccctcaaaactcaccccatcttcaactgaaccccacccccaacccagggccctctcttgccccggacccaccatggggacaaggaccactgtgactggctgggaagacaggtaaaccacctgcgaaaacagaaatagcaacctatcccaaaaggaaattgttcaatgtgaacaagtcagagaaagagactgaaagaaaaatgaatagaatcgctaggacccgtaagaaaatgctaaaacgatatctatcatttgtagcatcagaatcgcagagggtgaagtgacagtattagggaaacaggacagccagagtgacaccacgtgaaaatatactccgtcttgaaagcagcaagatacatagtcctaccagtcacaacccatggtcctaagatgtttggagttgagaaaacagatgaaaggtacctccaaggacatgctcccacagcagcggaaagtgcacggttcccaacacccattaacaatatatgctttcaacagaattatgctttcatggacttacacactggtaagtcaaggacagttttctttaaatcaatagaatgataaaagtcatcatgctcttagcccacccgcacaaaggcacagattaactttagtctttatatagataagacccctatataagaaaaaccagaccaggccaaggctcacgcctgtaatcctagtattttgggaggctgagctggccagatcacctgagctcaggacttcgagaccagcctaagcaacatcagaaaatctcatcactacaaaaaacaaacaaaaaaccatcgaaaaattagctgggcatggtggcatgtacctatactcacagctcctcaggaggctgaggtgggaggcgcgcttgagcccagcaggtcaaggctgcagcgagctctgataacaccaccgcactccagcctcggtgacagagtgagacgctgtctcaagttttaataatcgaacctaaaaacgtacaaatttatcaatcgaattcactatattaacacatgaatgggaaaaaacgctgtggtaatcgaaatagatgcactgtttgatgaaaatcaacatatattcaaatgaatactctcagcaaatttggaacagaatgcaatgactcactctgataaagtccgtctacaaaaaaaggagagtgaataggatggtgaaatgttgaaatttttcggtttctcatcagggataagacaaggatgtccactgtcaccattgtaacgggtgggtctgcgcaatgccataaaatcagaaaaggaaataaaactctttacaatggcaatgacgggcccgccacggtggcccacgccagtaatcccagcactgtgggaggtgaggtgggtgcatcacttgcactcaaaagttcaacaacagcccgggaaacatggcaaaaccccgtctctacaaaaaaatacaaaagggaaaagaaaaaaatatggcggaaacaaaactgctcttattccaggatgatatgtttctgtatattgaagactgaaaacgacctagaagtaaactttagaattcacaagcatatttcacaaggccgctggatagaaaaccaatatgtaagaattatgtctccaccgggcacggaggctcatgcctgtaatcccagcactttgggaggccaaggcaggtgaatcacgaggtcaggagttcaagagcaccccggccaagatggcgaaagcccatctctagtaaaaacacaaaacttagccaggcgtgctggtgggtgcctataatcccagctactcgggaggctgaggcagacaattgctt

SEQ ID NO: 1563657 - DNA, 4001 bp, Homo sapiens
gtcgagaacttttatcatagtgagggatttgcctaagctaagctgcaaactacatagcctcctcgcttttccagtcaatttcaggcattctttccattgttttctttcctcctcttcctcctatgtgacaatgcctaacacacacacacgtgcacacacacacacgaacacacacacacgcacacaccagcagacgttcttcttccctttccctcaccttgacctgcagatgctccctcatcctctccctcctgagcagctgcaggatcctgacgttgagttgctggttccccttcttcaggtgttgctggttccacttcatcactgaactgctcgggctggggaatacgtgtgggtgtgcaaataaaaaataagtttcgttattgatacaaaattttacatatatacacagaatacatagctatttctggtcataactaagcctaaagacatttctccaactctatgctctatgcccaataaggttactccaaccacagggaggttactgtgagaaaagtgacacacgaggactttgggggctattatactctgtgttggaatacatgtgtacaatctgtcattaacaaacaaagccggagaaagaagtcatgggcaaaagctgaagaacacgagaggaaaaaaaaaatcctccagaatcaatgtttccttcatgagatgccatcctcattttttatgagcaggaaagacctttatcagcatttccacactaatgcaacgacgctatcacaaaaattaatttctactaatagaaaacatcgaattaacgtttaagcactcacccgcataggcccaatcatttcaggaggctgtacatagcgccttggtctaggccaataataggtcgatcttcctcgccaactcatatttcacactgaaaacagacaaccgtgattgggaacgtgcgctccagagggctgctatattcgatcacttccatggataaatgttaacttgccgttttacttttgaaaatactctcaaaataagtcccagagttaagcatacgtgtgtacgctgtctgagtgcctacaaagccacttctgctggccaggctggcagagcaatcatcttaaggcgtgtggcaaaaggcagaggacatttttttctaaatttcttttggacacgcggtctcgctgtgttgctcaggctggagtgcagcggcgtgatcacagctcactgcagcctcgacctcccgctcaagggatcctcccacctcagtgtccccagtaactgggaatacgtaggcgagcgccactgcgccccgcagacagaggtcatttctgatgaggtttagtttcacaagtgcactccccacgaaaaccctagtgaatcacaattctcgtgattgctgctttgggcacactcccacttcctagagccattcaccccccctcacaacaagtttggttggaccgcactgcctcgcccactccttcccactgttttcggaccttccatggcggaggtgagaccttgcagtgcttctcactcgggcgctccgcactccacaccgctggggggggcgctcgccaggccgcagccttcccaggtgccaggccccttcttcaccgcccgcctcgcccccgccgggggccccattcagggaatctgccctgtgtcgtcggggatcccggcacctcgggacttccatccccccaacagcactcaccccgtcttcacctgagcccctgaccgcctcccctccacggcccaccttcctccccgtccaggccccttcacgaccacgaagccgccggtggcctcgcagcctgtgaagggaaggaggacgacctcgtggcccttctccctcggaggccacagaccaggaagcgggacccgcctgacccacccgaggccctctccaccctcactcacacttcagcccccgggatgactggcctgcacacctaccagatgaatctcagtagaggaaaaagagtccggacggcaggaaccacacagcactgcctcacagctccctggcgttcttcacgtgggcgaaggggccgggcagaaggcgcccagtgaacatgcgcactgaggcgggagcccagggagcatgcgcggctgtgggctggggagggctgccgttcccagcgccacgccccaaaccctccatgcccatcctcattgaggataagggaatcccacctccctctgctgtttcctatgcctctgggactcaagtagtgctcccctcaaaactcaccccatcttcaactgaaccccacccccaacccagggccctctcttgccccggacccaccatggggacaaggaccactgtgactggctgggaagacaggtaaaccacctgcgaaaacagaaatagcaacctatcccaaaaggaaattgttcaatgtgaacaagtcagagaaagagactgaaagaaaaatgaatagaatcgctaggacccgtaagaaaatgctaaaacgatatctatcatttgtagcatcagaatcgcagagggtgaagtgacagtattagggaaacaggacagccagagtgacaccacgtgaaaatatactccgtcttgaaagcagcaagatacatagtcctaccagtcacaacccatggtcctaagatgtttggagttgagaaaacagatgaaaggtacctccaaggacatgctcccacagcagcggaaagtgcacggttcccaacacccattaacaatatatgctttcaacagaattatgctttcatggacttacacactggtaagtcaaggacagttttctttaaatcaatagaatgataaaagtcatcatgctcttagcccacccgcacaaaggaacagattaactttagtctttatatagataagacccctatataagaaaaaccagaccaggccaaggctcacgcctgtaatcctagtattttgggaggctgagctggccagatcacctgagctcaggacttcgagaccagcctaagcaacatcagaaaatctcatcactacaaaaaacaaacaaaaaaaccatcaaaaaattagctgggcatggtggcatgtacctatactcacagctactcaggaggctgaggtgggaggagcgcttgagcccaggaggtcaaggctgcagcgagctctgataacaccaccgcactccagcctcggtgacagagtgagacgctgtctcaagttttaataatcgaacctaaaaacgtacaaatttatcaatcgaattcactatattaacccatgaatgggaaaaaacgctgtggtaatcgaaatagatgcactgtttgatgaaaatcaacatatattcaaatgaatactctcagcaaatttggaacagaatggaatgactcactctagataaagtctgtctacaaaaaaagaagagtgaataggatggcgaaatgttgaaatttttcggtttctcatcagggataagacaaggatgtccactgtcaccattgtaacgggtgggtctgcgcaatgccataaaatcagaaaaggaaataaaactctttacaatggcaacgacgggcccgccacggtggcccacgccagtaatcccagcactgtgggaggtgacgtgggtgcatcacttgcactcaaaagttcaacaacagcccgggaaacatggcaaaaccccgtctctacaaaaaaatacaaaagggaaaagaaaaaaaaatggcggaaacaaaactgctcttattccaggatgatatgtttctgtatattgaagactgaaaacgacctagaagtaaactttagaattcacaagcatatttcacaaggccgctggatagaaaaccaatatgtaagaattatgtctccaccgggcgcggaggctcatgcctgtaatcccagcactttgggaggccaaggcaggtgaatcacgaggtcaggagttcaagagcaccccggccaagatggcgaaagcccatctctagtaaaaacacaaaacttagccaggcgtgctggtgggtgcctataatcccagctactcgggaggctgaggcag

SEQ ID NO: 1563658 - DNA, 4001 bp, Homo sapiens
gatcttttaccatagtgagggatttgcctaagctaagctgcgaactacatagcctcctcgcttttccagtcaatttcaggcattctttccattgttttctttcctcctcttcctcctatgtgacaatgcctaacacacacacacacacgtgcacacacacacacacgaacacacacacacgcacacaccagcagacgttcttcttccctttccctcaccttgacctgcagatgctccctcatcctctccctcctgagcagctgcaggatcctgacgttgagttgctggttccccttcttcaggtgttgctggttccacttcatcactgaactgctcgggctggggaatacgtgtgggtgtgcaaataaaaaataagtttcgttattgatacaaaattttacatatatacacagaatacatagctatttctggtcctaactaagcctaaagacatttctccaactctatgctctatgcccaataaggttactccacccacagggaggttactgtgagaaaagtgacgcacgaggactttgggggctattatactctgtgttggaatacatgtgtacaatctgtcattaacaaacaaagccggagaaagaagtcatgggcaaaagctgaagaacacgagaggaaaaaaaaaatcctccagaatcaatgtttccttcatgagatgccatcctcattttttatgagcaggaaagacctttatcagcatttccacactaatgcaacgacgctatcacaaaaattaatttctactaatagaaaacatcgaattaacgtttaagcactcacccgcataggcccaatcatttcaggaggctgtacatagcgccttggtctaggccaataataggtcgatcttcctcgccaactcatatttcacactgaaaacagacaaccgtgattgggaacgtgcgctccagagggctgctatattcgatcacttccatggataaatgttaacttgccgttttacttttgaaaatactctcaaaataagtcccagagttaagcatacgtgtgtacgctgtctgagtgcctacaaagccacttctgctggccaggctggcagagcaatcatcttaaggcgtgtggcaaaaggcagaggacatttttttctaaatttcttttggacacgcggtctcgctgtgttgctcaggctggagtgcagcggcgtgatcacagctcactgcagcctcgacctcccgctcaagggatcctcccacctcagtgtccccagtaactgggaatacgtaggcgagcgccactgcgccccgcagacagaggtcatttctgatgaggtttagtttcacaagtgcactccccacgaaaaccctagtgaatcacaattctcgtgattgctgctttgggcacactcccacttcctagagccattcacccccactcacaacaagtttggttggaccgcactgcctcgcccactccttcccactgttttcggaccttccatggcggaggtgagaccttgcagtgcttctcactcgggcgctccgcactccacaccgctgagggggcgctcgccaggccgcagccttcccaggtgccaggccccttcttcaccgcccgcctcgcccccgccgggggccccattcagggaatctgccctgtgtcgtcggggatcccggcacctcgggacttccatccccccaacagcactcaccccgtcttcacctgagcccctgaccgcctcccctccacggcccaccttcctccccgtccaggccccttcacgaccacgaagccgccggtggcctcgcagcctgtgaagggaaggaggacgacctcgtggcccttctccctcggaggccacagaccaggaagcgggacccgcctgacccacccgaggccctctccaccctcactcacacttcagcccccgggatgactggcctgcacacctaccagatgaatctcagtagaggaaaaagagtccggacggcaggaaccacacagcactgcctcacagctccctggcgttcttcacgtgggcgaaggggccgggcagaagacgcccagtgaacatgcgcactgaggcgggagcccagggagcatgcgcggctgtgggctggggagggctgccgttcccagcgccacgccccaaaccctccatgcccatcctcattgaggataagggaatcccacctccctctgctgtttcctatgcctctgggactcaagtagtgctcccctcaaaactcaccccatcttcaactgaaccccacccccaacccagggccctctcttgccccggacccaccatggggacaaggaccactgtgactggctgggaagacaggtaaaccacctgcgaaaacagaaatagcaacctatcccaaaaggaaattgttcaatgtgaacaagtcagagaaagagactgaaagaaaaatgaatagaatcgctaggacccgtaagaaaatgctaaaacgatatctatcatttgtagcatcagaatcgcagagggtgaagtgacagtattagggaaacaggacagccagagtgacaccacgtgaaaatatactccgtcttgaaagcagcaagatacatagtcctaccagtcacaacccatggtcctaagatgtttggagttgagaaaacagatgaaaggtacctccaaggacatgctcccacagcagcggaaagtgcacggttcccaacacccattaacaatatatgctttcaacagaattatgctttcatggacttacacactggtaagtcaaggacagttttctttaaatcaatagaatgataaaagtcatcatgctcttagcccacccgcacaaaggcacagattaactttagtctttatatagataagacccctatataagaaaaaccagaccaggccaaggctcacgcctgtaatcctagtattttgggaggctgagctggccagatcacctgagctcaggacttcgagaccagcctaagcaacatcagaaaatctcatcactacaaaaaacaaacaaaaaaccatcgaaaaattagctgggcatggtggcatgtacctatactcacagctcctcaggaggctgaggtgggaggcgcgcttgagcccaggaggtcaaggctgcagcgagctctgataacaccaccgcactccagcctcggtgacagagtgagacgctgtctcaagttttaataatcgaacctaaaaacgtacaaatttatcaatcgaattcactatattaacacatgaatgggaaaaaacgctgtggtaatcgaaatagatgcactgtttgatgaaaatcaacatatattcaaatgaatactctcagcaaatttggaacagaatgcaatgactcactctgataaagtccgtctacaaaaaaaggagagtgaataggatggtgaaatgttgaaatttttcggtttctcatcagggataagacaaggatgtccactgtcaccattgtaacgggtgggtctgcgcaatgccataaaatcagaaaaggaaataaaactctttacaatggcaacgacgggcccgccacggtggcccacgccagtaatcccagcactgtgggaggtgaggtgggtgcatcacttgcactcaaaagttcaacaacagcccgggaaacatggcaaaaccccgtctctacaaaaaaatacaaaagggaaaagaaaaaaatatggcggaaacaaaactgctcttattccaggatgatatgtttctgtatattgaagactgaaaacgacctagaagtaaactttagaattcacaagcatatttcacaaggccgctggatagaaaaccaatatgtaagaattatgtctccaccgggcgcggaggctcatgcctgtaatcccagcactttgggaggccaaggcaggtgaatcacgaggtcaggagttcaagagcaccccggccaagatggcgaaagcccatctctagtaaaaacacaaaacttagccaggcgtgctggtgggtgcctataatcccagctactcgggaggctgaggcagac

SEQ ID NO: 1563659 - DNA, 4001 bp, Homo sapiens
agtcgagaacttttatcatagtgagggatttgcctaagctaagctgcaaactacatagcctcctcgcttttccagtcaatttcaggcattctttccattgttttctttcctcctcttcctcctatgtgacaatgcctaacacacacacacgtgcacacacacacacgaacacacacacacgcacacaccagcagacgttcttcttccctttccctcaccttgacctgcagatgctccctcatcctctccctcctgagcagctgcaggatcctgacgttgagttgctggttccccttcttcaggtgttgctggttccacttcatcactgaactgctcgggctggggaatacgtgtgggtgtgcaaatagaaaataagtttcgttattgatacaaaattttacatatatacacagaatacatagctatttctggtcctaactaagcctaaagacatttctccaactctatgctctatgcccaataaggttactccacccacagggaggttactgtgagaaaagtgacgcacgaggactttgggggctattatactctgtgttggaatacatgtgtacaatctgtcattaacaaacaaagccggagaaagaagtcatgggcaaaagctgaagaacacgagaggaaaaaaaaaatcctccagaatcaatgtttccttcatgagatgccatcctcattttttatgagcaggaaagacctttatcagcatttccacactaatgcaacgacgctatcacaaaaattaatttctactaatagaaaacatcgaattaacgtttaagcactcacccgcataggcccaatcatttcaggaggctgtacatagcgccttggtctaggccaataataggtcgatcttcctcgccaactcatatttcacactgaaaacagacaaccgtgattgggaacgtgcgctccagagggctgctatattcgatcacttccatggataaatgttaacttgccgttttacttttgaaaatactctcaaaataagtcccagagttaagcatacgtgtgtacgctgtctgagtgcctacaaagccacttctgctggccaggctggcagagcaatcatcttaaggcgtgtggcaaaaggcagaggacatttttttctaaatttcttttggacacgcggtctcgctgtgttgctcaggctggagtgcagcggcgtgatcacagctcactgcagcctcgacctcccgctcaagggatcctcccacctcagtgtccccagtaactgggaatacgtaggcgagcgccactgcgccccgcagacagaggtcatttctgatgaggtttagtttcacaagtgcactccccacgaaaaccctagtgaatcacaattctcgtgattgctgctttgggcacactcccacttcctagagccattcacccccactcacaacaagtttggttggaccgcactgcctcgcccactccttcccactgttttcggaccttccatggcggaggtgagaccttgcagtgcttctcactcgggcgctccgcactccacaccgctgagggggcgctcgccaggccgcagccttcccaggtgccaggccccttcttcaccgcccgcctcgcccccgccgggggccccattcagggaatctgccctgtgtcgtcggggatcccggcacctcgggacttccatccccccaacagcactcaccccgtcttcacctgagcccctgaccgcctcccctccacggcccaccttcctccccgtccaggccccttcacgaccacgaagccgccggtggcctcgcagcctgtgaagggaaggaggacgacctcgtggcccttctccctcggaggccacagaccaggaagcgggacccgcctgacccacccgaggccctctccaccctcactcacacttcagcccccgggatgactggcctgcacacctaccagatgaatctcagtagaggaaaaagagtccggacggcaggaaccacacagcactgcctcacagctccctggcgttcttcacgtgggcgaaggggccgggcagaagacgcccagtgaacatgcgcactgaggcgggagcccagggagcatgcgcggctgtgggctggggagggctgccgttcccagcgccacgccccaaaccctccatgcccatcctcattgaggataagggaatcccacctccctctgctgtttcctatgcctctgggactcaagtagtgctcccctcaaaactcaccccatcttcaactgaaccccacccccaacccagggccctctcttgccccggacccaccatggggacaaggaccactgtgactggctgggaagacaggtaaaccacctgcgaaaacagaaatagcaacctatcccaaaaggaaattgttcaatgtgaacaagtcagagaaagagactgaaagaaaaatgaatagaatcgctaggacccgtaagaaaatgctaaaacgatatctatcatttgtagcatcagaatcgcagagggtgaagtgacagtattagggaaacaggacagccagagtgacaccacgtgaaaatatactccgtcttgaaagcagcaagatacatagtcctaccagtcacaacccatggtcctaagatgtttggagttgagaaaacagatgaaaggtacctccaaggacatgctcccacagcagcggaaagtgcacggttcccaacacccattaacaatatatgctttcaacagaattatgctttcatggacttacacactggtaagtcaaggacagttttctttaaatcaatagaatgataaaagtcatcatgctcttagcccacccgcacaaaggcacagattaactttagtctttatatagataagacccctatataagaaaaaccagaccaggccaaggctcacgcctgtaatcctagtattttgggaggctgagctggccagatcacctgagctcaggacttcgagaccagcctaagcaacatcagaaaatctcatcactacaaaaaacaaacaaaaaaccatcgaaaaattagctgggcatggtggcatgtacctatactcacagctcctcaggaggctgaggtgggaggcgcgcttgagcccagcaggtcaaggctgcagcgagctctgataacaccaccgcactccagcctcggtgacagagtgagacgctgtctcaagttttaataatcgaacctaaaaacgtacaaatttatcaatcgaattcactatattaacacatgaatgggaaaaaacgctgtggtaatcgaaatagatgcactgtttgatgaaaatcaacatatattcaaatgaatactctcagcaaatttggaacagaatgcaatgactcactctgataaagtccgtctacaaaaaaaggagagtgaataggatggtgaaatgttgaaatttttcggtttctcatcagggataagacaaggatgtccactgtcaccattgtaacgggtgggtctgcgcaatgccataaaatcagaaaaggaaataaaactctttacaatggcaatgacgggcccgccacggtggcccacgccagtaatcccagcactgtgggaggtgaggtgggtgcatcacttgcactcaaaagttcaacaacagcccgggaaacatggcaaaaccccgtctctacaaaaaaatacaaaagggaaaagaaaaaaatatggcggaaacaaaactgctcttattccaggatgatatgtttctgtatattgaagactgaaaacgacctagaagtaaactttagaattcacaagcatatttcacaaggccgctggatagaaaaccaatatgtaagaattatgtctccaccgggcacggaggctcatgcctgtaatcccagcactttgggaggccaaggcaggtgaatcacgaggtcaggagttcaagagcaccccggccaagatggcgaaagcccatctctagtaaaaacacaaaacttagccaggcgtgctggtgggtgcctataatcccagctactcgggaggctgaggcagac

SEQ ID NO: 1563660 - DNA, 4001 bp, Homo sapiens
acttttatcatagtgagggatttgcctaagctaagctgcaaactacatagcctcctcgcttttccagtcaatttcaggcattctttccattgttttctttcctcctcttcctcctatgtgacaatgcctaacacacacacacgtgcacacacacacacgaacacacacacacgcacacaccagcagacgttcttcttccctttccctcaccttgacctgcagatgctccctcatcctctccctcctgagcagctgcaggatcctgacgttgagttgctggttccccttcttcaggtgttgctggttccacttcatcactgaactgctcgggctggggaatacgtgtgggtgtgcaaataaaaaataagtttcgttattgatacaaaattttacatatatacacagaatacatagctatttctggtcataactaagcctaaagacatttctccaactctatgctctatgcccaataaggttactccaaccacagggaggttactgtgagaaaagtgacacacgaggactttgggggctattatactctgtgttggaatacatgtgtacaatctgtcattaacaaacaaagccggagaaagaagtcatgggcaaaagctgaagaacacgagaggaaaaaaaaaatcctccagaatcaatgtttccttcatgagatgccatcctcattttttatgagcaggaaagacctttatcagcatttccacactaatgcaacgacgctatcacaaaaattaatttctactaatagaaaacatcgaattaacgtttaagcactcacccgcataggcccaatcatttcaggaggctgtacatagcgccttggtctaggccaataataggtcgatcttcctcgccaactcatatttcacactgaaaacagacaaccgtgattgggaacgtgcgctccagagggctgctatattcgatcacttccatggataaatgttaacttgccgttttacttttgaaaatactctcaaaataagtcccagagttaagcatacgtgtgtacgctgtctgagtgcctacaaagccacttctgctggccaggctggcagagcaatcatcttaaggcgtgtggcaaaaggcagaggacatttttttctaaatttcttttggacacgcggtctcgctgtgttgctcaggctggagtgcagcggcgtgatcacagctcactgcagcctcgacctcccgctcaagggatcctcccacctcagtgtccccagtaactgggaatacgtaggcgagcgccactgcgccccgcagacagaggtcatttctgatgaggtttagtttcacaagtgcactccccacgaaaaccctagtgaatcacaattctcgtgattgctgctttgggcacactcccacttcctagagccattcaccccccctcacaacaagtttggttggaccgcactgcctcgcccactccttcccactgttttcggaccttccatggcggaggtgagaccttgcagtgcttctcactcgggcgctccgcactccacaccgctggggggggcgctcgccaggccgcagccttcccaggtgccaggccccttcttcaccgcccgcctcgcccccgccgggggccccattcagggaatctgccctgtgtcgtcggggatcccggcacctcgggacttccatccccccaacagcactcaccccgtcttcacctgagcccctgaccgcctcccctccacggcccaccttcctccccgtccaggccccttcacgaccacgaagccgccggtggcctcgcagcctgtgaagggaaggaggacgacctcgtggcccttctccctcggaggccacagaccaggaagcgggacccgcctgacccacccgaggccctctccaccctcactcacacttcagcccccgggatgactggcctgcacacctaccagatgaatctcagtagaggaaaaagagtccggacggcaggaaccacacagcactgcctcacagctccctggcgttcttcacgtgggcgaaggggccgggcagaaggcgcccagtgaacatgcgcactgaggcgggagcccagggagcatgcgcggctgtgggctggggagggctgccgttcccagcgccacgccccaaaccctccatgcccatcctcattgaggataagggaatcccacctccctctgctgtttcctatgcctctgggactcaagtagtgctcccctcaaaactcaccccatcttcaactgaaccccacccccaacccagggccctctcttgccccggacccaccatggggacaaggaccactgtgactggctgggaagacaggtaaaccacctgcgaaaacagaaatagcaacctatcccaaaaggaaattgttcaatgtgaacaagtcagagaaagagactgaaagaaaaatgaatagaatcgctaggacccgtaagaaaatgctaaaacgatatctatcatttgtagcatcagaatcgcagagggtgaagtgacagtattagggaaacaggacagccagagtgacaccacgtgaaaatatactccgtcttgaaagcagcaagatacatagtcctaccagtcacaacccatggtcctaagatgtttggagttgagaaaacagatgaaaggtacctccaaggacatgctcccacagcagcggaaagtgcacggttcccaacacccattaacaatatatgctttcaacagaattatgctttcatggacttacacactggtaagtcaaggacagttttctttaaatcaatagaatgataaaagtcatcatgctcttagcccacccgcacaaaggaacagattaactttagtctttatatagataagacccctatataagaaaaaccagaccaggccaaggctcacgcctgtaatcctagtattttgggaggctgagctggccagatcacctgagctcaggacttcgagaccagcctaagcaacatcagaaaatctcatcactacaaaaaacaaacaaaaaaaccatcaaaaaattagctgggcatggtggcatgtacctatactcacagctactcaggaggctgaggtgggaggagcgcttgagcccaggaggtcaaggctgcagcgagctctgataacaccaccgcactccagcctcggtgacagagtgagacgctgtctcaagttttaataatcgaacctaaaaacgtacaaatttatcaatcgaattcactatattaacccatgaatgggaaaaaacgctgtggtaatcgaaatagatgcactgtttgatgaaaatcaacatatattcaaatgaatactctcagcaaatttggaacagaatggaatgactcactctagataaagtctgtctacaaaaaaagaagagtgaataggatggcgaaatgttgaaatttttcggtttctcatcagggataagacaaggatgtccactgtcaccattgtaacgggtgggtctgcgcaatgccataaaatcagaaaaggaaataaaactctttacaatggcaacgacgggcccgccacggtggcccacgccagtaatcccagcactgtgggaggtgacgtgggtgcatcacttgcactcaaaagttcaacaacagcccgggaaacatggcaaaaccccgtctctacaaaaaaatacaaaagggaaaagaaaaaaaaatggcggaaacaaaactgctcttattccaggatgatatgtttctgtatattgaagactgaaaacgacctagaagtaaactttagaattcacaagcatatttcacaaggccgctggatagaaaaccaatatgtaagaattatgtctccaccgggcgcggaggctcatgcctgtaatcccagcactttgggaggccaaggcaggtgaatcacgaggtcaggagttcaagagcaccccggccaagatggcgaaagcccatctctagtaaaaacacaaaacttagccaggcgtgctggtgggtgcctataatcccagctactcgggaggctgaggcagacaattg

SEQ ID NO: 1563661 - DNA, 4001 bp, Homo sapiens
taccatagtgagggatttgcctaagctaagctgcgaactacatagcctcctcgcttttccagtcaatttcaggcattctttccattgttttctttcctcctcttcctcctatgtgacaatgcctaacacacacacacacacgtgcacacacacacacacgaacacacacacacgcacacaccagcagacgttcttcttccctttccctcaccttgacctgcagatgctccctcatcctctccctcctgagcagctgcaggatcctgacgttgagttgctggttccccttcttcaggtgttgctggttccacttcatcactgaactgctcgggctggggaatacgtgtgggtgtgcaaataaaaaataagtttcgttattgatacaaaattttacatatatacacagaatacatagctatttctggtcctaactaagcctaaagacatttctccaactctatgctctatgcccaataaggttactccacccacagggaggttactgtgagaaaagtgacgcacgaggactttgggggctattatactctgtgttggaatacatgtgtacaatctgtcattaacaaacaaagccggagaaagaagtcatgggcaaaagctgaagaacacgagaggaaaaaaaaaatcctccagaatcaatgtttccttcatgagatgccatcctcattttttatgagcaggaaagacctttatcagcatttccacactaatgcaacgacgctatcacaaaaattaatttctactaatagaaaacatcgaattaacgtttaagcactcacccgcataggcccaatcatttcaggaggctgtacatagcgccttggtctaggccaataataggtcgatcttcctcgccaactcatatttcacactgaaaacagacaaccgtgattgggaacgtgcgctccagagggctgctatattcgatcacttccatggataaatgttaacttgccgttttacttttgaaaatactctcaaaataagtcccagagttaagcatacgtgtgtacgctgtctgagtgcctacaaagccacttctgctggccaggctggcagagcaatcatcttaaggcgtgtggcaaaaggcagaggacatttttttctaaatttcttttggacacgcggtctcgctgtgttgctcaggctggagtgcagcggcgtgatcacagctcactgcagcctcgacctcccgctcaagggatcctcccacctcagtgtccccagtaactgggaatacgtaggcgagcgccactgcgccccgcagacagaggtcatttctgatgaggtttagtttcacaagtgcactccccacgaaaaccctagtgaatcacaattctcgtgattgctgctttgggcacactcccacttcctagagccattcacccccactcacaacaagtttggttggaccgcactgcctcgcccactccttcccactgttttcggaccttccatggcggaggtgagaccttgcagtgcttctcactcgggcgctccgcactccacaccgctgagggggcgctcgccaggccgcagccttcccaggtgccaggccccttcttcaccgcccgcctcgcccccgccgggggccccattcagggaatctgccctgtgtcgtcggggatcccggcacctcgggacttccatccccccaacagcactcaccccgtcttcacctgagcccctgaccgcctcccctccacggcccaccttcctccccgtccaggccccttcacgaccacgaagccgccggtggcctcgcagcctgtgaagggaaggaggacgacctcgtggcccttctccctcggaggccacagaccaggaagcgggacccgcctgacccacccgaggccctctccaccctcactcacacttcagcccccgggatgactggcctgcacacctaccagatgaatctcagtagaggaaaaagagtccggacggcaggaaccacacagcactgcctcacagctccctggcgttcttcacgtgggcgaaggggccgggcagaagacgcccagtgaacatgcgcactgaggcgggagcccagggagcatgcgcggctgtgggctggggagggctgccgttcccagcgccacgccccaaaccctccatgcccatcctcattgaggataagggaatcccacctccctctgctgtttcctatgcctctgggactcaagtagtgctcccctcaaaactcaccccatcttcaactgaaccccacccccaacccagggccctctcttgccccggacccaccatggggacaaggaccactgtgactggctgggaagacaggtaaaccacctgcgaaaacagaaatagcaacctatcccaaaaggaaattgttcaatgtgaacaagtcagagaaagagactgaaagaaaaatgaatagaatcgctaggacccgtaagaaaatgctaaaacgatatctatcatttgtagcatcagaatcgcagagggtgaagtgacagtattagggaaacaggacagccagagtgacaccacgtgaaaatatactccgtcttgaaagcagcaagatacatagtcctaccagtcacaacccatggtcctaagatgtttggagttgagaaaacagatgaaaggtacctccaaggacatgctcccacagcagcggaaagtgcacggttcccaacacccattaacaatatatgctttcaacagaattatgctttcatggacttacacactggtaagtcaaggacagttttctttaaatcaatagaatgataaaagtcatcatgctcttagcccacccgcacaaaggcacagattaactttagtctttatatagataagacccctatataagaaaaaccagaccaggccaaggctcacgcctgtaatcctagtattttgggaggctgagctggccagatcacctgagctcaggacttcgagaccagcctaagcaacatcagaaaatctcatcactacaaaaaacaaacaaaaaaccatcgaaaaattagctgggcatggtggcatgtacctatactcacagctcctcaggaggctgaggtgggaggcgcgcttgagcccaggaggtcaaggctgcagcgagctctgataacaccaccgcactccagcctcggtgacagagtgagacgctgtctcaagttttaataatcgaacctaaaaacgtacaaatttatcaatcgaattcactatattaacacatgaatgggaaaaaacgctgtggtaatcgaaatagatgcactgtttgatgaaaatcaacatatattcaaatgaatactctcagcaaatttggaacagaatgcaatgactcactctgataaagtccgtctacaaaaaaaggagagtgaataggatggtgaaatgttgaaatttttcggtttctcatcagggataagacaaggatgtccactgtcaccattgtaacgggtgggtctgcgcaatgccataaaatcagaaaaggaaataaaactctttacaatggcaacgacgggcccgccacggtggcccacgccagtaatcccagcactgtgggaggtgaggtgggtgcatcacttgcactcaaaagttcaacaacagcccgggaaacatggcaaaaccccgtctctacaaaaaaatacaaaagggaaaagaaaaaaatatggcggaaacaaaactgctcttattccaggatgatatgtttctgtatattgaagactgaaaacgacctagaagtaaactttagaattcacaagcatatttcacaaggccgctggatagaaaaccaatatgtaagaattatgtctccaccgggcgcggaggctcatgcctgtaatcccagcactttgggaggccaaggcaggtgaatcacgaggtcaggagttcaagagcaccccggccaagatggcgaaagcccatctctagtaaaaacacaaaacttagccaggcgtgctggtgggtgcctataatcccagctactcgggaggctgaggcagacaattgct

SEQ ID NO: 1563662 - DNA, 4001 bp, Homo sapiens
aacttttatcatagtgagggatttgcctaagctaagctgcaaactacatagcctcctcgcttttccagtcaatttcaggcattctttccattgttttctttcctcctcttcctcctatgtgacaatgcctaacacacacacacgtgcacacacacacacgaacacacacacacgcacacaccagcagacgttcttcttccctttccctcaccttgacctgcagatgctccctcatcctctccctcctgagcagctgcaggatcctgacgttgagttgctggttccccttcttcaggtgttgctggttccacttcatcactgaactgctcgggctggggaatacgtgtgggtgtgcaaatagaaaataagtttcgttattgatacaaaattttacatatatacacagaatacatagctatttctggtcctaactaagcctaaagacatttctccaactctatgctctatgcccaataaggttactccacccacagggaggttactgtgagaaaagtgacgcacgaggactttgggggctattatactctgtgttggaatacatgtgtacaatctgtcattaacaaacaaagccggagaaagaagtcatgggcaaaagctgaagaacacgagaggaaaaaaaaaatcctccagaatcaatgtttccttcatgagatgccatcctcattttttatgagcaggaaagacctttatcagcatttccacactaatgcaacgacgctatcacaaaaattaatttctactaatagaaaacatcgaattaacgtttaagcactcacccgcataggcccaatcatttcaggaggctgtacatagcgccttggtctaggccaataataggtcgatcttcctcgccaactcatatttcacactgaaaacagacaaccgtgattgggaacgtgcgctccagagggctgctatattcgatcacttccatggataaatgttaacttgccgttttacttttgaaaatactctcaaaataagtcccagagttaagcatacgtgtgtacgctgtctgagtgcctacaaagccacttctgctggccaggctggcagagcaatcatcttaaggcgtgtggcaaaaggcagaggacatttttttctaaatttcttttggacacgcggtctcgctgtgttgctcaggctggagtgcagcggcgtgatcacagctcactgcagcctcgacctcccgctcaagggatcctcccacctcagtgtccccagtaactgggaatacgtaggcgagcgccactgcgccccgcagacagaggtcatttctgatgaggtttagtttcacaagtgcactccccacgaaaaccctagtgaatcacaattctcgtgattgctgctttgggcacactcccacttcctagagccattcacccccactcacaacaagtttggttggaccgcactgcctcgcccactccttcccactgttttcggaccttccatggcggaggtgagaccttgcagtgcttctcactcgggcgctccgcactccacaccgctgagggggcgctcgccaggccgcagccttcccaggtgccaggccccttcttcaccgcccgcctcgcccccgccgggggccccattcagggaatctgccctgtgtcgtcggggatcccggcacctcgggacttccatccccccaacagcactcaccccgtcttcacctgagcccctgaccgcctcccctccacggcccaccttcctccccgtccaggccccttcacgaccacgaagccgccggtggcctcgcagcctgtgaagggaaggaggacgacctcgtggcccttctccctcggaggccacagaccaggaagcgggacccgcctgacccacccgaggccctctccaccctcactcacacttcagcccccgggatgactggcctgcacacctaccagatgaatctcagtagaggaaaaagagtccggacggcaggaaccacacagcactgcctcacagctccctggcgttcttcacgtgggcgaaggggccgggcagaagacgcccagtgaacatgcgcactgaggcgggagcccagggagcatgcgcggctgtgggctggggagggctgccgttcccagcgccacgccccaaaccctccatgcccatcctcattgaggataagggaatcccacctccctctgctgtttcctatgcctctgggactcaagtagtgctcccctcaaaactcaccccatcttcaactgaaccccacccccaacccagggccctctcttgccccggacccaccatggggacaaggaccactgtgactggctgggaagacaggtaaaccacctgcgaaaacagaaatagcaacctatcccaaaaggaaattgttcaatgtgaacaagtcagagaaagagactgaaagaaaaatgaatagaatcgctaggacccgtaagaaaatgctaaaacgatatctatcatttgtagcatcagaatcgcagagggtgaagtgacagtattagggaaacaggacagccagagtgacaccacgtgaaaatatactccgtcttgaaagcagcaagatacatagtcctaccagtcacaacccatggtcctaagatgtttggagttgagaaaacagatgaaaggtacctccaaggacatgctcccacagcagcggaaagtgcacggttcccaacacccattaacaatatatgctttcaacagaattatgctttcatggacttacacactggtaagtcaaggacagttttctttaaatcaatagaatgataaaagtcatcatgctcttagcccacccgcacaaaggcacagattaactttagtctttatatagataagacccctatataagaaaaaccagaccaggccaaggctcacgcctgtaatcctagtattttgggaggctgagctggccagatcacctgagctcaggacttcgagaccagcctaagcaacatcagaaaatctcatcactacaaaaaacaaacaaaaaaccatcgaaaaattagctgggcatggtggcatgtacctatactcacagctcctcaggaggctgaggtgggaggcgcgcttgagcccagcaggtcaaggctgcagcgagctctgataacaccaccgcactccagcctcggtgacagagtgagacgctgtctcaagttttaataatcgaacctaaaaacgtacaaatttatcaatcgaattcactatattaacacatgaatgggaaaaaacgctgtggtaatcgaaatagatgcactgtttgatgaaaatcaacatatattcaaatgaatactctcagcaaatttggaacagaatgcaatgactcactctgataaagtccgtctacaaaaaaaggagagtgaataggatggtgaaatgttgaaatttttcggtttctcatcagggataagacaaggatgtccactgtcaccattgtaacgggtgggtctgcgcaatgccataaaatcagaaaaggaaataaaactctttacaatggcaatgacgggcccgccacggtggcccacgccagtaatcccagcactgtgggaggtgaggtgggtgcatcacttgcactcaaaagttcaacaacagcccgggaaacatggcaaaaccccgtctctacaaaaaaatacaaaagggaaaagaaaaaaatatggcggaaacaaaactgctcttattccaggatgatatgtttctgtatattgaagactgaaaacgacctagaagtaaactttagaattcacaagcatatttcacaaggccgctggatagaaaaccaatatgtaagaattatgtctccaccgggcacggaggctcatgcctgtaatcccagcactttgggaggccaaggcaggtgaatcacgaggtcaggagttcaagagcaccccggccaagatggcgaaagcccatctctagtaaaaacacaaaacttagccaggcgtgctggtgggtgcctataatcccagctactcgggaggctgaggcagacaattgct

SEQ ID NO: 1563663 - DNA, 4001 bp, Homo sapiens
ctccattctctcattcataaagtcgagaacttttatcatagtgagggatttgcctaagctaagctgcaaactacatagcctcctcgcttttccagtcaatttcaggcattctttccattgttttctttcctcctcttcctcctatgtgacaatgcctaacacacacacacgtgcacacacacacacgaacacacacacacgcacacaccagcagacgttcttcttccctttccctcaccttgacctgcagatgctccctcatcctctccctcctgagcagctgcaggatcctgacgttgagttgctggttccccttcttcaggtgttgctggttccacttcatcactgaactgctcgggctggggaatacgtgtgggtgtgcaaataaaaaataagtttcgttattgatacaaaattttacatatatacacagaatacatagctatttctggtcataactaagcctaaagacatttctccaactctatgctctatgcccaataaggttactccaaccacagggaggttactgtgagaaaagtgacacacgaggactttgggggctattatactctgtgttggaatacatgtgtacaatctgtcattaacaaacaaagccggagaaagaagtcatgggcaaaagctgaagaacacgagaggaaaaaaaaaatcctccagaatcaatgtttccttcatgagatgccatcctcattttttatgagcaggaaagacctttatcagcatttccacactaatgcaacgacgctatcacaaaaattaatttctactaatagaaaacatcgaattaacgtttaagcactcacccgcataggcccaatcatttcaggaggctgtacatagcgccttggtctaggccaataataggtcgatcttcctcgccaactcatatttcacactgaaaacagacaaccgtgattgggaacgtgcgctccagagggctgctatattcgatcacttccatggataaatgttaacttgccgttttacttttgaaaatactctcaaaataagtcccagagttaagcatacgtgtgtacgctgtctgagtgcctacaaagccacttctgctggccaggctggcagagcaatcatcttaaggcgtgtggcaaaaggcagaggacatttttttctaaatttcttttggacacgcggtctcgctgtgttgctcaggctggagtgcagcggcgtgatcacagctcactgcagcctcgacctcccgctcaagggatcctcccacctcagtgtccccagtaactgggaatacgtaggcgagcgccactgcgccccgcagacagaggtcatttctgatgaggtttagtttcacaagtgcactccccacgaaaaccctagtgaatcacaattctcgtgattgctgctttgggcacactcccacttcctagagccattcaccccccctcacaacaagtttggttggaccgcactgcctcgcccactccttcccactgttttcggaccttccatggcggaggtgagaccttgcagtgcttctcactcgggcgctccgcactccacaccgctggggggggcgctcgccaggccgcagccttcccaggtgccaggccccttcttcaccgcccgcctcgcccccgccgggggccccattcagggaatctgccctgtgtcgtcggggatcccggcacctcgggacttccatccccccaacagcactcaccccgtcttcacctgagcccctgaccgcctcccctccacggcccaccttcctccccgtccaggccccttcacgaccacgaagccgccggtggcctcgcagcctgtgaagggaaggaggacgacctcgtggcccttctccctcggaggccacagaccaggaagcgggacccgcctgacccacccgaggccctctccaccctcactcacacttcagcccccgggatgactggcctgcacacctaccagatgaatctcagtagaggaaaaagagtccggacggcaggaaccacacagcactgcctcacagctccctggcgttcttcacgtgggcgaaggggccgggcagaaggcgcccagtgaacatgcgcactgaggcgggagcccagggagcatgcgcggctgtgggctggggagggctgccgttcccagcgccacgccccaaaccctccatgcccatcctcattgaggataagggaatcccacctccctctgctgtttcctatgcctctgggactcaagtagtgctcccctcaaaactcaccccatcttcaactgaaccccacccccaacccagggccctctcttgccccggacccaccatggggacaaggaccactgtgactggctgggaagacaggtaaaccacctgcgaaaacagaaatagcaacctatcccaaaaggaaattgttcaatgtgaacaagtcagagaaagagactgaaagaaaaatgaatagaatcgctaggacccgtaagaaaatgctaaaacgatatctatcatttgtagcatcagaatcgcagagggtgaagtgacagtattagggaaacaggacagccagagtgacaccacgtgaaaatatactccgtcttgaaagcagcaagatacatagtcctaccagtcacaacccatggtcctaagatgtttggagttgagaaaacagatgaaaggtacctccaaggacatgctcccacagcagcggaaagtgcacggttcccaacacccattaacaatatatgctttcaacagaattatgctttcatggacttacacactggtaagtcaaggacagttttctttaaatcaatagaatgataaaagtcatcatgctcttagcccacccgcacaaaggaacagattaactttagtctttatatagataagacccctatataagaaaaaccagaccaggccaaggctcacgcctgtaatcctagtattttgggaggctgagctggccagatcacctgagctcaggacttcgagaccagcctaagcaacatcagaaaatctcatcactacaaaaaacaaacaaaaaaaccatcaaaaaattagctgggcatggtggcatgtacctatactcacagctactcaggaggctgaggtgggaggagcgcttgagcccaggaggtcaaggctgcagcgagctctgataacaccaccgcactccagcctcggtgacagagtgagacgctgtctcaagttttaataatcgaacctaaaaacgtacaaatttatcaatcgaattcactatattaacccatgaatgggaaaaaacgctgtggtaatcgaaatagatgcactgtttgatgaaaatcaacatatattcaaatgaatactctcagcaaatttggaacagaatggaatgactcactctagataaagtctgtctacaaaaaaagaagagtgaataggatggcgaaatgttgaaatttttcggtttctcatcagggataagacaaggatgtccactgtcaccattgtaacgggtgggtctgcgcaatgccataaaatcagaaaaggaaataaaactctttacaatggcaacgacgggcccgccacggtggcccacgccagtaatcccagcactgtgggaggtgacgtgggtgcatcacttgcactcaaaagttcaacaacagcccgggaaacatggcaaaaccccgtctctacaaaaaaatacaaaagggaaaagaaaaaaaaatggcggaaacaaaactgctcttattccaggatgatatgtttctgtatattgaagactgaaaacgacctagaagtaaactttagaattcacaagcatatttcacaaggccgctggatagaaaaccaatatgtaagaattatgtctccaccgggcgcggaggctcatgcctgtaatcccagcactttgggaggccaaggcaggtgaatcacgaggtcaggagttcaagagcaccccggccaagatggcgaaagcccatctctagtaaaaacacaaaacttagccaggcgtgctggtgggtgcctataatcccag

SEQ ID NO: 1563664 - DNA, 4001 bp, Homo sapiens
ttctctcattcataaagtcgagatcttttaccatagtgagggatttgcctaagctaagctgcgaactacatagcctcctcgcttttccagtcaatttcaggcattctttccattgttttctttcctcctcttcctcctatgtgacaatgcctaacacacacacacacacgtgcacacacacacacacgaacacacacacacgcacacaccagcagacgttcttcttccctttccctcaccttgacctgcagatgctccctcatcctctccctcctgagcagctgcaggatcctgacgttgagttgctggttccccttcttcaggtgttgctggttccacttcatcactgaactgctcgggctggggaatacgtgtgggtgtgcaaataaaaaataagtttcgttattgatacaaaattttacatatatacacagaatacatagctatttctggtcctaactaagcctaaagacatttctccaactctatgctctatgcccaataaggttactccacccacagggaggttactgtgagaaaagtgacgcacgaggactttgggggctattatactctgtgttggaatacatgtgtacaatctgtcattaacaaacaaagccggagaaagaagtcatgggcaaaagctgaagaacacgagaggaaaaaaaaaatcctccagaatcaatgtttccttcatgagatgccatcctcattttttatgagcaggaaagacctttatcagcatttccacactaatgcaacgacgctatcacaaaaattaatttctactaatagaaaacatcgaattaacgtttaagcactcacccgcataggcccaatcatttcaggaggctgtacatagcgccttggtctaggccaataataggtcgatcttcctcgccaactcatatttcacactgaaaacagacaaccgtgattgggaacgtgcgctccagagggctgctatattcgatcacttccatggataaatgttaacttgccgttttacttttgaaaatactctcaaaataagtcccagagttaagcatacgtgtgtacgctgtctgagtgcctacaaagccacttctgctggccaggctggcagagcaatcatcttaaggcgtgtggcaaaaggcagaggacatttttttctaaatttcttttggacacgcggtctcgctgtgttgctcaggctggagtgcagcggcgtgatcacagctcactgcagcctcgacctcccgctcaagggatcctcccacctcagtgtccccagtaactgggaatacgtaggcgagcgccactgcgccccgcagacagaggtcatttctgatgaggtttagtttcacaagtgcactccccacgaaaaccctagtgaatcacaattctcgtgattgctgctttgggcacactcccacttcctagagccattcacccccactcacaacaagtttggttggaccgcactgcctcgcccactccttcccactgttttcggaccttccatggcggaggtgagaccttgcagtgcttctcactcgggcgctccgcactccacaccgctgagggggcgctcgccaggccgcagccttcccaggtgccaggccccttcttcaccgcccgcctcgcccccgccgggggccccattcagggaatctgccctgtgtcgtcggggatcccggcacctcgggacttccatccccccaacagcactcaccccgtcttcacctgagcccctgaccgcctcccctccacggcccaccttcctccccgtccaggccccttcacgaccacgaagccgccggtggcctcgcagcctgtgaagggaaggaggacgacctcgtggcccttctccctcggaggccacagaccaggaagcgggacccgcctgacccacccgaggccctctccaccctcactcacacttcagcccccgggatgactggcctgcacacctaccagatgaatctcagtagaggaaaaagagtccggacggcaggaaccacacagcactgcctcacagctccctggcgttcttcacgtgggcgaaggggccgggcagaagacgcccagtgaacatgcgcactgaggcgggagcccagggagcatgcgcggctgtgggctggggagggctgccgttcccagcgccacgccccaaaccctccatgcccatcctcattgaggataagggaatcccacctccctctgctgtttcctatgcctctgggactcaagtagtgctcccctcaaaactcaccccatcttcaactgaaccccacccccaacccagggccctctcttgccccggacccaccatggggacaaggaccactgtgactggctgggaagacaggtaaaccacctgcgaaaacagaaatagcaacctatcccaaaaggaaattgttcaatgtgaacaagtcagagaaagagactgaaagaaaaatgaatagaatcgctaggacccgtaagaaaatgctaaaacgatatctatcatttgtagcatcagaatcgcagagggtgaagtgacagtattagggaaacaggacagccagagtgacaccacgtgaaaatatactccgtcttgaaagcagcaagatacatagtcctaccagtcacaacccatggtcctaagatgtttggagttgagaaaacagatgaaaggtacctccaaggacatgctcccacagcagcggaaagtgcacggttcccaacacccattaacaatatatgctttcaacagaattatgctttcatggacttacacactggtaagtcaaggacagttttctttaaatcaatagaatgataaaagtcatcatgctcttagcccacccgcacaaaggcacagattaactttagtctttatatagataagacccctatataagaaaaaccagaccaggccaaggctcacgcctgtaatcctagtattttgggaggctgagctggccagatcacctgagctcaggacttcgagaccagcctaagcaacatcagaaaatctcatcactacaaaaaacaaacaaaaaaccatcgaaaaattagctgggcatggtggcatgtacctatactcacagctcctcaggaggctgaggtgggaggcgcgcttgagcccaggaggtcaaggctgcagcgagctctgataacaccaccgcactccagcctcggtgacagagtgagacgctgtctcaagttttaataatcgaacctaaaaacgtacaaatttatcaatcgaattcactatattaacacatgaatgggaaaaaacgctgtggtaatcgaaatagatgcactgtttgatgaaaatcaacatatattcaaatgaatactctcagcaaatttggaacagaatgcaatgactcactctgataaagtccgtctacaaaaaaaggagagtgaataggatggtgaaatgttgaaatttttcggtttctcatcagggataagacaaggatgtccactgtcaccattgtaacgggtgggtctgcgcaatgccataaaatcagaaaaggaaataaaactctttacaatggcaacgacgggcccgccacggtggcccacgccagtaatcccagcactgtgggaggtgaggtgggtgcatcacttgcactcaaaagttcaacaacagcccgggaaacatggcaaaaccccgtctctacaaaaaaatacaaaagggaaaagaaaaaaatatggcggaaacaaaactgctcttattccaggatgatatgtttctgtatattgaagactgaaaacgacctagaagtaaactttagaattcacaagcatatttcacaaggccgctggatagaaaaccaatatgtaagaattatgtctccaccgggcgcggaggctcatgcctgtaatcccagcactttgggaggccaaggcaggtgaatcacgaggtcaggagttcaagagcaccccggccaagatggcgaaagcccatctctagtaaaaacacaaaacttagccaggcgtgctggtgggtgcctataatcccagct

SEQ ID NO: 1563665 - DNA, 4001 bp, Homo sapiens
cctccattctctcattcataaagtcgagaacttttatcatagtgagggatttgcctaagctaagctgcaaactacatagcctcctcgcttttccagtcaatttcaggcattctttccattgttttctttcctcctcttcctcctatgtgacaatgcctaacacacacacacgtgcacacacacacacgaacacacacacacgcacacaccagcagacgttcttcttccctttccctcaccttgacctgcagatgctccctcatcctctccctcctgagcagctgcaggatcctgacgttgagttgctggttccccttcttcaggtgttgctggttccacttcatcactgaactgctcgggctggggaatacgtgtgggtgtgcaaatagaaaataagtttcgttattgatacaaaattttacatatatacacagaatacatagctatttctggtcctaactaagcctaaagacatttctccaactctatgctctatgcccaataaggttactccacccacagggaggttactgtgagaaaagtgacgcacgaggactttgggggctattatactctgtgttggaatacatgtgtacaatctgtcattaacaaacaaagccggagaaagaagtcatgggcaaaagctgaagaacacgagaggaaaaaaaaaatcctccagaatcaatgtttccttcatgagatgccatcctcattttttatgagcaggaaagacctttatcagcatttccacactaatgcaacgacgctatcacaaaaattaatttctactaatagaaaacatcgaattaacgtttaagcactcacccgcataggcccaatcatttcaggaggctgtacatagcgccttggtctaggccaataataggtcgatcttcctcgccaactcatatttcacactgaaaacagacaaccgtgattgggaacgtgcgctccagagggctgctatattcgatcacttccatggataaatgttaacttgccgttttacttttgaaaatactctcaaaataagtcccagagttaagcatacgtgtgtacgctgtctgagtgcctacaaagccacttctgctggccaggctggcagagcaatcatcttaaggcgtgtggcaaaaggcagaggacatttttttctaaatttcttttggacacgcggtctcgctgtgttgctcaggctggagtgcagcggcgtgatcacagctcactgcagcctcgacctcccgctcaagggatcctcccacctcagtgtccccagtaactgggaatacgtaggcgagcgccactgcgccccgcagacagaggtcatttctgatgaggtttagtttcacaagtgcactccccacgaaaaccctagtgaatcacaattctcgtgattgctgctttgggcacactcccacttcctagagccattcacccccactcacaacaagtttggttggaccgcactgcctcgcccactccttcccactgttttcggaccttccatggcggaggtgagaccttgcagtgcttctcactcgggcgctccgcactccacaccgctgagggggcgctcgccaggccgcagccttcccaggtgccaggccccttcttcaccgcccgcctcgcccccgccgggggccccattcagggaatctgccctgtgtcgtcggggatcccggcacctcgggacttccatccccccaacagcactcaccccgtcttcacctgagcccctgaccgcctcccctccacggcccaccttcctccccgtccaggccccttcacgaccacgaagccgccggtggcctcgcagcctgtgaagggaaggaggacgacctcgtggcccttctccctcggaggccacagaccaggaagcgggacccgcctgacccacccgaggccctctccaccctcactcacacttcagcccccgggatgactggcctgcacacctaccagatgaatctcagtagaggaaaaagagtccggacggcaggaaccacacagcactgcctcacagctccctggcgttcttcacgtgggcgaaggggccgggcagaagacgcccagtgaacatgcgcactgaggcgggagcccagggagcatgcgcggctgtgggctggggagggctgccgttcccagcgccacgccccaaaccctccatgcccatcctcattgaggataagggaatcccacctccctctgctgtttcctatgcctctgggactcaagtagtgctcccctcaaaactcaccccatcttcaactgaaccccacccccaacccagggccctctcttgccccggacccaccatggggacaaggaccactgtgactggctgggaagacaggtaaaccacctgcgaaaacagaaatagcaacctatcccaaaaggaaattgttcaatgtgaacaagtcagagaaagagactgaaagaaaaatgaatagaatcgctaggacccgtaagaaaatgctaaaacgatatctatcatttgtagcatcagaatcgcagagggtgaagtgacagtattagggaaacaggacagccagagtgacaccacgtgaaaatatactccgtcttgaaagcagcaagatacatagtcctaccagtcacaacccatggtcctaagatgtttggagttgagaaaacagatgaaaggtacctccaaggacatgctcccacagcagcggaaagtgcacggttcccaacacccattaacaatatatgctttcaacagaattatgctttcatggacttacacactggtaagtcaaggacagttttctttaaatcaatagaatgataaaagtcatcatgctcttagcccacccgcacaaaggcacagattaactttagtctttatatagataagacccctatataagaaaaaccagaccaggccaaggctcacgcctgtaatcctagtattttgggaggctgagctggccagatcacctgagctcaggacttcgagaccagcctaagcaacatcagaaaatctcatcactacaaaaaacaaacaaaaaaccatcgaaaaattagctgggcatggtggcatgtacctatactcacagctcctcaggaggctgaggtgggaggcgcgcttgagcccagcaggtcaaggctgcagcgagctctgataacaccaccgcactccagcctcggtgacagagtgagacgctgtctcaagttttaataatcgaacctaaaaacgtacaaatttatcaatcgaattcactatattaacacatgaatgggaaaaaacgctgtggtaatcgaaatagatgcactgtttgatgaaaatcaacatatattcaaatgaatactctcagcaaatttggaacagaatgcaatgactcactctgataaagtccgtctacaaaaaaaggagagtgaataggatggtgaaatgttgaaatttttcggtttctcatcagggataagacaaggatgtccactgtcaccattgtaacgggtgggtctgcgcaatgccataaaatcagaaaaggaaataaaactctttacaatggcaatgacgggcccgccacggtggcccacgccagtaatcccagcactgtgggaggtgaggtgggtgcatcacttgcactcaaaagttcaacaacagcccgggaaacatggcaaaaccccgtctctacaaaaaaatacaaaagggaaaagaaaaaaatatggcggaaacaaaactgctcttattccaggatgatatgtttctgtatattgaagactgaaaacgacctagaagtaaactttagaattcacaagcatatttcacaaggccgctggatagaaaaccaatatgtaagaattatgtctccaccgggcacggaggctcatgcctgtaatcccagcactttgggaggccaaggcaggtgaatcacgaggtcaggagttcaagagcaccccggccaagatggcgaaagcccatctctagtaaaaacacaaaacttagccaggcgtgctggtgggtgcctataatcccagct

SEQ ID NO: 1563666 - DNA, 4001 bp, Homo sapiens; identical to SEQ ID NO: 1563653

SEQ ID NO: 1563667 - DNA, 4001 bp, Homo sapiens
gatgggccacaagtgtgcccaccgccaacaccttctcagccccagggtgcctgctgttgctctctgaagagagtgttttgcttccccatcttggtctccatctctttcctctctgtctctaattctgtgttagtctctgcctcttcacagtgctacctgcgtgtatctctgcatttctatctccttttctgctcccgggtctttccttctttttctccggccatctgtctgtctctgtctcttactcgttgagtttctctctctctgtttttcctttctcttcatgtctcttttgtctcttgctctttgtctctgtgtctctgtctctctcttcccatctctccctgtttctccctctcttccctgtctcattgtgtgtcttctgctcactctttcaccactattccctcatcccctcaactccaccttacccaccatgatctccctccagccccactgcccccaacccctgcacctcacacgttggtgagtccagggctgcccacccctcccatggcaggggcccagcctcctcacccccagttatcactctccggacagagataaagtttatctcgaggctgggggatatgaaagctccttatcagctgccccactagagtaagtgttgccccaacggcggcagcaggcagcagctggcaccctccactctccctcggccccagcccctcaccccaggtaacgttccaatcccagccctcaagggagggtctcaccgggctgaagggagcagatataaggtctagggggcagatatggggcttagggggagatagaggtggaatttgaaggtcagatatggggttaagtcagagaggtttggggtgtagccatggagtttgtggggaggcagatatgggcggggttgtggagcagagacgagcttggaagttcagagacacattttgggctcaggaataggttgtgaaaacagacgaggttgggggatcggggcgaagtttgagagtcagaaataaagttgagaagtagtgtgggagtcagattctgagggtcatagaaaagtctggggagttcaagggtttttctggaggagagatggagtttaggagtcaaagatctgtttgggcagacagaatgtggctagtaaaggggagtttgagaagccaagatagaattggagtagagaaaggcttggagctggagagattcagggagacaatgagatgtgttttagggctgagatacggtttggggaaggcagacatgagggttcatgcggcagaacagattttggggagttgacttggtgtttgaagtgacaaagatattttactgagcaggcagggagttgggagagataaatggtttgcggagatcagagagaagtcattgggaacaaagagtgggtttgaaaggcagagatggtggtaagaggatggagctagggtttggcagatcagagacaggtttgggggctcagagagagtggggcaaagacaaggcgttgtagagcagataaggggtttgggagcagaaaagtgaggtttggaggagaagtcagggagacagagacaagtttgggtgagtggaaatcagatatgggacagggaaaggatttggggagataaagtcatgttttgggagacagagttagtgtttaggggagacagacctaggggtatagcgagcaaagtgaagggatccagaggatatagatatcttggacggagtggatgagagggcagaaagaggtggggtttagggggtagatttggggtagaaatgggagttggaaagacaggtgggttggaggagctgtaaagggattcagggctggctgacactttggggaccagctgtgggttggggagcctggagcaagcataagggtaggggcagcaggcccagggttgccttggtgggggctctctgggggctgagactgacctgggctggtggttgcggagggttcggccgccttggggatgtggcaagctcagtgtgatcccagggggtgtcctggctggccttggcctttgaggctcccttcctccctccctccctccctcccttctccctcctccctcctccccagggagtggctggtgccccagtgggtggggcagtccaggggagggggcgggtcccatgcttgtggggcacctcttgggcactggaggccctcttccaccctccctgcccaccctggggattcttggacctcgctcgacctaggctcccgtggactgtagtgtccagacaagcaaaataggctgaaaccaagataaatgaaaatagcagatatggtttcatgacttcactgggcttttcagagagtaaagcccttaatttgtgcggggccggtgtgggctagactcctgtgtatgtgcgtcttcctggctgcagggagagaagggatgtggctgtacccattttgcaggtgagaagagtgaggctcagagaggttctgctggatttgaactagagcctgtgggataccttgatgacccaggctaagcctgcaggccaggccagtgctggcgggaggcaggggcacactcacttagcgccccactggggcttacgccagctccggcctgccctggggcagcagataagtcttatcagatgtaggcgaccgtggctgttggcgccgcagtaacaggctgtcttggggtgagggtgtgggggtaggaacacccagggacagtggcctcaacttcttgcccgccatgctgccttggaggcgggaaactgaggtgggagccagggatgattcctcgaggagtggtatagggtaggaaaggaaaggggtggagtgggagagacagaggcagagagacaaacaaaaacagagataggcggagagagatggaaatggggagaaagagagtgacagagatgaatagagaaggagacagacgtggaaagaggcagagagagggcacaaaagaaaaggagagacaaagagggcgagacacccggggagaaccagagaccattaaagacatatagagagaggcaaagagagaatgagagacagagatggacagaagtgacagataaaacctgaaagggaaagaggccaaagacagaagtggagaactgagaagggagacagagacagagggatattcagagacagactcagaagaaggtccaggcagactggatcacaccctgggcatgtggtgcccatgcaggtaggatgggaggatgtggattgatgtagcctgtggctctgccctcagccctcagcaggggacaaccagaatgtggctaggcctccgcaccccagtccccacactcttgccctgccccacctcctccaaatattaatgacaacaaccacagtgtctcatagacctcacatagacttgtacctaacctgagcactttttctatatgaaagcatctgacacacatgcacacgtgggacaaggagctgtcctgcccacctagtctacagatggggagactgagacctacaaagggcagaggccaagggtggagccccaggtcagtggggtcagcttgcccactggcccaccctggagggatcttaccattcttatctcactcctctgagcctcagtgtcctcatatgcaatgggagatttgaggaggaaagagagcaagcccatgaattcctatttattgagctcctgctggtgtgccacgccccatgctgaaccctcatcagtaataaggagaacgaatacaaagacacctctgacttaagtggcagtggtttcaggagatggtctctagagccagctcatcctcgttcatagactgccctaaccactaatggatcaggtgaccttgggagagttaccatcccctctggaatttagctcctcatctgtaaaaatggggtaataatataccccaataagccactccatgcagtgactggggagactaaatgagttttaacccatgttacatgatcttaacttacttgaatctgaaatctcaataaatattaagtacccctatttatttattgagtacct

SEQ ID NO: 1563668 - DNA, 4001 bp, Homo sapiens
ggtcttccctatcacccccgacctgcaatacctccttcctgtccctcaccgttagccatgaggaatttgggaatcaggtcaacattccagtctcggcctcggcccatcgactcagggggcccctccagcaactgaaaacgcttatacagctgtaagcagaagggagagagagagacacctcagggaccacctcctcctgctccaggcacctggggagctacttccaccctgtgccgctatgtgggaggttaacagggataggcttgggcctgggcagcctcacctcctccaggggtgtgatggaggagctctcgcccccgtagtaggggttccggtccatgtgcagcaccttcttcccgttcacagacatgatgcccgacaggatgcattcctgggggagggtgacaccatccgctgcactcccacctgcctccgctcctaccagcagacctgatttgttccccacccaaacctgcctcagtggacagctccttccacccaccatccccactggctagttgcctcgcctaaaattggggtgatggcttcatccgaccacactctccattgcaaccttgctgggcaaaggagtcccgtccccctcacaaggcggagagtgaaataacggaggctttgagggaggcagggcatccagcagacacaggatggccttccagtaccaacacgccgagaggcatctacctacgcagagccgcacaaaaaggcggataaaacacaataaggcacagagaagacccagctggactgcaaaggacactcgaaagggaggaaaagaaaggcttagcacagtccttgaaattgtaggccccaccctggactgctctttcttcaaatagcaggagcccctgccgctgaggaggggcatctgggcctggaccgaggaagaagagtctctgaggggagtaggccaacggggttttcggggaaagggggaagataaacaccctcaccagtcactgtcactagcccaaggacaaaggctgcagatgctacccagcctgaggtctccatgggcaaccgaggtggggttgcgggaatgtgcttactgcccccactgctgttccttctggaacattccctggatcccctggccccagaagacgatgaggaggcgggctgagggcccactctggcgaggccccctgaccccaggtccttctacttcatccccaccgggattagcgcaagatgggaacggacgctgagaggcaacgctaggcgggcaatgggtgcgggcgacgggtggatgccgtgatgggtgggggcgatgggtgggcggggtcgtgggcatcgggccgagtgggggtgcgttttccggtccagcgggcaggggtagggaagatgggagggcgccgggggtcggacccgggtagcccaggaggcggccaggaagggggcctcttcggggagatggggtcatggcaacgagcagaggcgacgtcgctgggggagcagcggggtgggcacggcgccggcttttcggggagcggagcgcagaagatggcagtgaccagaggatgggccggcggccgcatcatcgcgggggatggcgagggcacgacgcagggccaggggcgccggggccgcacttacggtgagaccggtccccagcacgatcacatcgtattcctcgtccatggtcaggcctcggtgccagcgcccgctcggctcctcctcctccttcaccgcagcagtcgccgccgccaccgccgccgccgccaccgcactggaccaaagatggcggcgcgtcggccgtcgcccgacccctccgccgcgtcaaagagtcccgcctcttcccgcgccccgccgcaaccggcaggggccaccgcctccccggctcgcctcccgggagggctgccagggcccgggccacagcaccagcgcggctccgcgggcgacgctgctcgccgagagtctagagaggcgcggggcggggcgggcggggcgggccggcggccggtgctgcggcccaggaagaatccgtgcgcgggagccgcgcgcgccccgccccacccgccgcgccccgccccgccccgccccgcgcgcgcccgcccacctccccacccccgcccacccccccgggagtctcggcgcggccccgcggccgggcgcgcgccgctgcggcagcctggggcggccccctcacgacgcgaaggctgccattgtcacgacggcctcctgagacgccgaagcgcaccgggactcggcccgaccgcccctccctaccctgagcggttagggcccagcttgctaaagcccctcccggtctccgcggatgcctcttcgcctccccctcgccaggctccatcctcccgcatccctccggcgagcacgcgcctaaagcccagcgcagaaatgagcgacaagaggcccaacgcatggcgacccgcgtttattttattaggaaggaaacaaccaagcaccccatgctcctgcccggcactcccggtgggaacatgccaaacagccggcgatcgcacccagcccacctgtcgtggaggtcccttccttctcaggccacagaaataaacccgtgtacttcttattgttagcacaacatcaccagaaaacgataacgacagccaagcaggacagacagttaagtagtacttccacactcccaaactcagggagccctataaccttaaggagggagcatttgctacacaaaagcactatccacagccagggatgatgtagccacaagaataaataaggagaaaggagaccctagaattcatgtcccttacgcctcacagcgacgaaccctgggaagctggttggtctagcatctacgcagaatatgtacaccttgttgggagagatgggggcagcccaagaaagctcctcagcgggctgaagagggagcaagatgggctgaggggagcttgcagttcatgctgcagtaggaagagggaagctcttcagtccagtgcgctgcagggtgggaaagcaacaacacggacaccgtcccaccctcaacccccccactggcacagggtcacacaatctgggtcaaagaaatagtggggcccttgtggtcatcaaagcgatccatggtcttgaggctgaggatcatgtgcaggccataggtgaagatgaagagcatgaacagggaggtgagcagccccatccagatgccgggggagaagaagctggcacagtcgctggcgtaggagaactgctcccccattacgttgaaagcctggatctggcagacacacagacacgggtcagaaaggaccgttgggaggcccagcaagaactgggacaggggcagcgcagggacaggactctcaactacatgcccaagcccaagcctctcttcgtctctcaaccactagcctgggctcccccacctgaagctgggccacgcccgctccatacctggaagtcctgaagcatcatctgccagggagagggctgcgtgcgggccacgaggagactacccttcttgctcaggctgctgacatactcgcagtggaaggagtagatgctgggccctgtgacctgggaagcattgaagtaggcgacggagccattgctgtggacttcgaggcgctccatggtaaaccagtgccgggcagacactgggtagaggcggttggccagaatgaacctggggaaggtggcagggatgtcaggtgagctggggaggctggggccacaccagcccacccatacctcaaccacccccaggactcacttgaatgtcactgtggtaccaaagagtcgttcataggtcagtgagagcctgtggggccagagaaagaggcgcactgtgaggctctgggagggcctttggcatcttagaggaacaagttcctcagctctgctcctacctaagctgccttgggtccttgcagccacctgaagaagcagtgtccccacttgacagataggaaaactgaggatccagtcacattgcaaggtcggaacagagctggaagccaggacccaggtcccccttgccaccagca

SEQ ID NO: 1563669 - DNA, 4001 bp, Homo sapiens
tggaggcagcgggcccagacggagcagcagccgggggactcggccatggtgaaggcctgggggaagggacactcgaccatcagggaccctggcagagggcagatcccagtctccctcctagtgtatctgaggagcccgggggagaggcagaggcctgggccgctgctcagcaacggaggtcacggggcaggcccagagtgccagagtggatgaggcgagcagccccagctgcaagcctggcaatgggagacagtctccagagccttcgtttccctttaatcttgttacctggagagtcagtgggacacccaagaggtccagcctcttttcgggcaggattcatatccactctctccagctcctccccatttaacagcacacacctctggggatggagtgcttgccctgggggtaagaactcaagagaaactgcccagggtgggacaaactcagttcagcaagttaaagcaggtttggccaagctggaggcaaccccatgttgaattgctttccagcccaggaagcaggagtaacctgaagcaaaggttacagttctgacctggggctaaggaaggcccagctagttggccagttgctatggttatagagattattcagatcacaaatccctgaaagattctctgtgtccacctctcaggggacaaagggcactgccaaaaagagaaagacttgaggtgaacatgttgcctgggtcactcccagtcttctaaaggaatctttggattttcaaaatacagagcctcccctcaagtcctgccctttcctgcccagtcatcccccaaccccaaccagaagcccagactcgcctttaggagccccaccctctaagttagctttggtgaaagtacaacaaacgcagggcaaaggtgtgtatgcggggtgtggttgtcttggggcaggggacccctgtaccttatgcttctgggtttggctgactgagctgatccccagacttggctgggtacgtgactgattctacgcgagacggtatgtgatttgtgtcagcatttgcacgcgacagcacaactggctgtcggtacaatatgattttaggtgactttgagtatgtaaaggagcccctggatacacccaaagtgtgtgagcatgtgtgcgtgcgggctgagggacaggacctcttgtcctcagagctctcccgaggctatggagtcttagaggggtgcacagtgggtgggtccggtaagcaggaaggtgtggctgcttctgaactgccctctttatgctgccttgggaaaggagggttagggtaggggtgaggagctggagctgggggaaggaaacccctcccctctacgagacccttcccggtaaaaagccaacccaaagggaagcccttgcctctgcccatcttggagctggtttgatagcctgctctaagctcttgcctcccctggggtcctacccctgcaccccagacactgccttccagagtcccctcccttcaggagctgcctgtaggatgggatcagggtctgagcagcctgaaaaccccaagtagggttgctgacaggggtgccattcaatcccccggcccaatcccagtgggatggagctggtctctgctccacagctcccacctgtagccccccagccttcccgaaccctcacacctttgctcagcggcagctccgctccgctctcctctctgcactgcttcccagctcctctccgagtggtctgcctcctccctttttcagtcctcggttcagccctatgagtcaaacaggtggcactgttgccacctacaggaggctgtgtgggtcctctcccaaggcctgcagctgctctgtggcctgggcacagcccgggtgggaagatgggagggaggaagcgggagggagagcaaatctgcttctttactcgctggcggtcagggggcttggggtgaggaattcctttgtgcaggctttcccatccctctgtccctcctcctgttcccctcccagtcactgccggggctttgtcctggctcagggaggcgagggctgagggcacaggctggcgggaagctggtgtgtgtgggggggggaggtgaccacacaactttgcaacttggcagtgaggagaagaggcccagccagcccactggaaaggcgtgtgtgtgtgtgtgtgtgtgcgtgtgtgtaagcctaacatcaagtctcaagctccctggaaatacagccttgattcattaggctccctcccctattgagctcctacttctaattcagcaaggtgcatgtataagaagctgcagcctggcgcggtgtcttacacctgtaaccccaacactttgggaggccgaggcgggtggatcacctgaggtcaggagttcaagaccagcctggccaacatggtgaaaccctgtctctacaaaaaatacaaaaattagccaggcatgatggtgtgcacctaccaaagactaggtagttgcatgggacatctcacaaggccaggtttaaagcaaagacaagccttggtcatttgtcccagctacttgggaggctgatgtgggaggattgcttgagcccaggacgtcgaggctgcagtgagttgagattgtgctactgtgctccagcctgggcaacagaagctgcaagctacttcctgaactctggatagcaagttgccgtttctggaccagaggtccccatgggccttgtggatcctgggtgacactagcagttctcccaccttccctcatcaccccagacaggagatgctcattcaggacttgtgtcatttctgctgccttgtccctaaggcatatgagtctctttccaagaatcttttgaggagtgtagagtatattggggtcacaggcttttggaagatgaacacatagaaaagatgctgttactatagcatcagcatcagcagggaagggctggctagcacactatagtttgcttagtgctaaagcacaggggtctgggtgggatgggggccaggggctggcttggttgacctctccctctacattacgcctgatgtggtgactcgaggtctgggggctattagtgcagtgttggtgggaaaggatgttttctctggggataagcctgcttacccctcccccaacacacactggatttcaaacagtgagaaggaagactggctctcttatgccaagagctggcccccctcccactcaggcttcccattgtatccagaggctctagttggcaatggcagaggctcccttgctccctcggcattaaaatgcaaagagaagcagggctgcttgctggcaggaggccagggaggaccagcaggtcacctagtccatggcaggcttcattctaggcagattgttgctcaatttcttttgcttgggctctggtggattctagaggagtcttggcttttgagtgtttggggatggtttgggagcttttttggggagaagggttttgggattcagaatgcatggatatgaagcgcagggcttgtgagcatctacctcagaaggctacaaggccagtcagcagcttgtgtatggcattccagggctggcccccttttagctttaagcagagatagagaacactgatagactgtaaggcgtaagcatctttcaaaggagaatgcaaggagccagtgctgttctgtcctgggactggacagcagtgtggtgcaacgcccctcctacactaagaaattaggctgcagggcattagaagtggctgctgctggcactctagagagttggctagagtgaagcttggatggtagctctgcgttcaggtcctagctctattgctcactagctttgtgactttgggtaagttacttctttataccccagtttcctcatctgcaaaataaggacatctatctatgttgacctttttgtgtgtgtatgaagaacaaataaaactgtagcaagaacatggagatggttagtaaatgcggtttcttcctcccaaatctggaagccaggcaggttctacagtggaggtcaggccactggccttgct

SEQ ID NO: 1563670 - DNA, 4001 bp, Homo sapiens
aagcatgtccttcataagcaaaacctagtgtgaccataaggtaataagggttgaataggcaggttctgcaaattaagagcataacagcaaaaaccatggctagtttaaagtagttaagatcgctagtacatttcaggcgtcttatttcaaatttacttttttctataaacatattcacggtaattccatgttaatctctcttttctgaatttataggcactcactatgcctcatttacttgggcacttactcagttacctgtaggcatggattctacaatctactccttttaagtttcctattttccttccagcataaaaataatagctaatatttcatgctcttagatgctgctgaaattgttgagcttgtctgttgtttcctgataacgttctctcctcctgcatctactccccaaaatctctgaggacctagtaactcaaaaaactgactataaagcaccaaatcttttcaggaagcaaatatttaaatacattatgttttcaaagatcttttcaattcatctgatatttgatcaactacattcttttttcacttgtccagctgttccgtggctgaatttcctcttgtagagaagttgttcaaaaaaagttctgtacctactttgcaaactctccaatttacactctagccttaactgttcaaaactttcccccgtcattctcatctcaccctatcctttaaaaaaaaacccaaaatgattaatcaccatctatagaacagtttcagaatgaacatttctctctggaactttagtttgtatacttccccagcacagcaatgaacacacagaggggatttatacacctgtgaacttgctttcagttatgcttattccaagttactaaccagcagtctttaaaaatatatggtttctgttcacattgaaattacaaagagactgttattccgataaattatgctagcaaaaatagtatttttaaagggtagctctcatcctacaattcatgggggctgtgagcataaataatcctagaagtgttgcgttactaatctttagtctagattttttaagtaatattgttctgatttgagatgaagaacagctgaatacacagcctagcctgtcaaacgagtttaaaaacatcattcctgaaaaaaataaaattgttcagaaccatctgatctgtactaagggaacatcaagatttcagagctaaaatgcacttcgttggccactggttcaattacagctcattactgataagtgggcagagacacaaggcccataaactgtaggcgccagatgtctcaagataactcccaccaaaagctgacctcctgcagaggttaaagtgcaagagaaaagaaagaaacccgaatttttgagcagagagggcaatatcctagacatccttcaagtatgtggctgtcctgggcgatcttctattcagatactggactggatgggcaaaatccgaattcacctacagaccttaacacggtggttctcggcaccccagaatcacctgggcagctttaaaaactaccgatgccagggccccactattagagattctgatttcattggtccgggatgggggcccggggatcagaattcttaaagagtcgtccagtgattcggaagcactgcagagctgagagcctctgggactggtcccctctcacaattaacctgcaatgatttaggaatctcatgggcctccggccccaccttttgtcgcgggattaagataattatgagagcaacgtgacgtccaagacctcggctctctgcgcatcagaagaagccagggcccggggcgtctaagctcctccctcactccccaaaggaaacccagccgtccccgaagtcacctcgtgggcgcgcagcttgcggatcctgggcgttggccgcgcaggggcctagttttccttggagagacagagggggagtgggggacgcgagggaggcggctgttgccggggcgactggaagcgcgcttccggtgcggaacacgtggcgtggcgcggcgcgccggaagtccccccctgtgtcgcggacgtcacgttcgcaccgcaggcggtgcagtgctggaggccggaagctgcctgctaatcggctaccccgagtggagcgccggggcggcaggcgtgggatggctgcgggtggcggggccggcggagagggagctgcaccgggcggggcactgggactgtggcgggcacccgcgccgggggtcggacggtgcttctgcaccggcgagataagggtcgcttctgcaccgcccgggtttccagcctttaactttttgtcctttcctcagctttcttcgttttccttcccttgtctttacttagccttttctttcttcctttctgttttctttcttaactaaaacagttttagtttcttaatttgtcccagcgtaaaacacccagtctttgaaaatagattaacccagatctcagtttgagtgcgagtccagtgctaagtttgtaacttccccaagcctcgtgtgtctcatctataagatatgcataacctaatgcagagtgcctgatgcattgcagcagacaaaacattagtactaatatgtttgtaattataaccatcacagcaatacctgccctgttaacattacaagagtcattaacaagaaccaagcataaacaattagaagtcttacgtgacatatcatttctggggcaattaccatatttaatactttctgggaatttattccaaggaaaaacaggtacgaaccagatagatgtttattacagaattattttaaaaagtgaaaattggaaaagacctaaatgcccaacaaggaaatggctaagtcaattgggtggtattaatgacgtgacattactgtattattcctggactacagaagaattaaaatggtatagaagaatattaactttaacaaatatttactggatgccggctatgtgccaagtattctatgttagcgctgtccattgtaaccactacatgtggccctgagaacctgaattgtagtagtctgaactgagatacactgtaagggtaaattacactctagattttgaagaagaatgagaaaaagaatgtaaaatacctcaatttctttatagtgataacatcttagagaaggactattgaggttaaagactaaaatttgatctttatctttttactttattagtgtggctactagaacatttaaaattatatatgtggcatgcattgcatttctattgtaccgtggtattctatttaccggatacacagtagtaaacaatacagttttggggctcataaaattaaatcttttgtgtagaacatagacaataagcagataaatagaattgtatgttgtggtgagttatatgaagacagtatagcagggtaagggccagaaagtatgtgtatatagagggggattattttagaaaagattattcctccacctcagaaaatggatgtgggaggaaatgagatatctatggatagaagcaggagatggtaggagggtgaagtcttatgggaaaagtcaggtgtggattgagacagataagtcagatggggcctggtgcaatctctacctcaaggaagaagccagcatctagagaggcaggaaagaaagatggagaggggtaagatagggagaaagagcttagggggttcctgggaaaggcagaaggatgcaggcctagagtggatatagttcaggtagagtgattcctggttctatgaatgaaaaaatacaatatatatggtatactatggcattagatagaatattagttggctgctgtcacagagacccagaagaggagtggctcaaactgttgagaagtgtatttctatctcatggcagtctgggtgtaaggagtccagagtatggcagctccacctgtctcatagctccaccctccctggtttcttgccttggcccacatggtccaagatggtgcaccactgcacctttcagccagtgggaaagagaaagccaagggcatgccct

SEQ ID NO: 1563671 - DNA, 4001 bp, Homo sapiens
cctcttcatttactgtaaaatcctgtttaatgtgtaacatttcaggcagagagaggccttggggactagaggcagaggtggccttgaccaacccctgctccaacttatctgcctgcttctctctccctaactccctcaccccagacacctcctccttttccttgtggccagcaagcactattcctcctttactagtgctggccaccctcccttctccacccacatgtccacagcacccctgccctctgctcctcttacccacatccctcctcactgatgtgactccagaaacagggtatctgacagcacagggttaagattagtttcataattggagacgctgtcggagcatcccatctcttgtacccagtggtcccagagagagggagagggaagagggaagggtgcaggcaacaagggcagcccacactcccagtaaccttgagcactggcataggtggcctctagctccccacccctccagctcctcaaaaggaaggccccgggaggaagggaagtagccagggaaggaaggttttgatcgagtaatccccagcaggcagaggcctgtgcaccggcaggggagaaggaggggctcgcccagggcagggtcgggggtgggatgggaggttgcctggtatgtggcatcagcaggccgagcagcggtcgctcttttcagccagcccagccccggtgccagggctgcggcgcagtatgtctttcagggagccatcctgctcactcagcagcttgttgatctcattctgcttgtattcaggtgagaggcggtggccgaagcccgagcccttgcgggaaggtggattggagcggcgctgggctcggcgggcacaggcccggatgatgaggtacaccacctcggccacattgaggatgatgcagatgccagaggcagctagcatgaagacggtgaagacggttttctcggtggggcgggacacgaagcagtccactgtgttggggcaggggtagacgtcgcacttgaccagccgcaccatggcatagccagggtagagcagataaaagacatacatgaagacggcctcaaacaacagccggaacaccacgctgatgacataggtccaccacagtgtccctgagatgtggaccttgtgcctcttcacctcctccaggtgtagggggtccccatggccctcaagccgtagcattttcttctctatgtgttgctggtgagccacgtgcatggccacgaggagagctggggtggaaactaggatgagctgcagggaccacagccgcacatgggagatggggaagaattggtcatagcaaacgctgttgcagccaggctggagtgtgttgcagatgaaggaagatttctcatcaccccacacactctctgcagccaccaccagcaccatgattctgaagatgaagatgaccgagagccatactcggccaatggcagtagaatgccggttcacgccactgagcaaggtgtacaaacctgtccagttcatcctgcctcattcacacctgcaaaacaccagccatgaagcaagctgtcagaaagctggggtggaaagtcgggcgccatagcactgcctgcgcaccccccctcaactcttccaagagccagtagcaggaaaggaaggatggtcatgtctttcctcgtcaccccatctcccttgccagcttctcctcctcctcactcacttgacttgacctccctgagccccatcccccttcttcgctttcatccaacattcttttcccgccagcccctttctttgccaagcccatcttgttccgatatcagccatcccctatggctccctgtcccctagctccttaactccagacctggggcaaactcaacaaagccctcttaccttggggagcgcctatccctgaggccacccagacaggtcccctatggtctcatgtctgtgcagggggagtggtccctgggctccgcgcctgcgtcccaattcatcaccgcccggtgctggggagtcatatgctgctttatacccagtgtctgcacaatgagacctttgtggggctctgaacaacgccctttagaattcagatcaaacgccctgacttccgcccaccctacacacagagcacttgtgtcccagcgccggacacccagcctgcacccacctgttctgtgcccgcccggtccatcgccgcacccgccccatagccccaccagaagaatggccacgggggggcggggggagggagataaaacacaggcaggtggatgtgaagaggggaccccaggggacccagaggctctgggctgaggccctcccccatggccccgtcagaagcttaaggtcaccaggattttccctgaggcttagatcctctccggaatatggagaggaaagaggacaggaaagagagctcatttatgaagccacaaactgtgctgagcgttgttccatacattttttctttcgacccatttaggaagcctgttatcccattttccagatgaagaagctgaagctcagataagtaactcctcaaggtcacaccgttccaaagcggtaggataggtaggatgaaacaatgtatctgagacagaagtctttctacagcaggctccctgtgcttctgcagatagtgtctgtagaaagcaaaggctaaccattaaaaaaaaaaaaaaaaaaaggctgggcgccgttgctcacgcctgtaatcccagcactttaggaggctgaagtgggcagatcacttgaggtcaggagatcaagaccatcctggctaacaatgtgaaaccccatctctactaaaaatacaaaaaattagccgtgtgtggtggcgcatgcctgtaatcccagctgctgggtgggagaatcactggaacccaggaggcagaggttgcagtgggccaagattgcaccactgcactccagtccgggcgacagagcaagactccgtctcaaaaaaaaaaaaaaatcttctcaggaaaagataacaaagttgctttgggggaataaatggtctgtcaaacccaagatctctcctttttctccctaatgctgtgggttgttttttattagagggtggggacaaggtctggctatatcactaaggctagagtgcagtggcacaatcactgctcactgcagccttgacctcctgggctccagcgatcctcccacctcagcctctcaattagctgggaccacaggtatgtgtcaccatgcccagctaatttttcaattttttttttttgtagagatggggggcttgctatgttgcccaggctggtcttgaactcctgggctcaagcgatcttcccacttttgcctcccaaagtgttgggtttacaggtgtgagccaccttgagcagtccccaatgctgttgttgacctatagggtctgtctgagaccccattgctgcccagcccccaaccccaagtgcatattgcaacctcgtggtttcaggagcttgccagttgctctagggaggaaattctcctctatcccttaggcaggctaagaaggcttctcccacctcttgccacttctgccattaagttgcaaggagatcatactagcagcaggaaactgaatgtgaggaggacatgcagccctggaccataggaggtgcagtgatccctggagtcatttcctgaccccagtgcatgctccacagcagagcaactggttgtggaagaagcctcatattcagccctgggtggtcctctatgctgtagaggaaaggggtggggtaacagcaactgcaaaagttgggaaatgggatgaaagaatctggggaaagaaggacagtccacaggacataggttacttctcagaacaaggtttcttcatttagctaaataaataaataaataaataaataaataaataaataaataaaaagccttagtgagttcatgtcatgtgccaaccagcatggggaagcagggctatgggtgccctttctcccaagcctgggattctatatgcaaagctgctgcactaggcaccacagttag

SEQ ID NO: 1563672 - DNA, 4001 bp, Homo sapiens
aaggagtttgcattctgagaccaggcctactattcaaaaacctatacactttcctgcgtgtgctggcacacgcacacacacacacacacacacacacacacacacacattcgtctagtctgtctctgtctctctctgtttctgcccccacctcctccctatccttccaactacaggaaaatccttgtgatttggggtttggggaagaggggtgggctgggatggatgaggttacattcagcctcggactccatgctccctcccccatttcgcaggcagtcactggtcaggaagggacatggggctttctttgagatttccttaggaatttctggctgccttcatcagtttggtgtggctaaggccaaactcctccagctctcttccccttcccctgcttctctctcttgcctccaccctgcagttctgcaatatctcagtcactggacttagcctctccaccctgccatacatattccgtggccaggcttgggtcaggtccagtctagctcattccgatttgttctttccccctctctgctgcggtcttttcagagagcttctgcttatgccagctcccttccccattgtttggacgctactcccttactcctccatcacccacctgacttcctgttgctctctgcttgggttattataacagctgccatttatggagtgccccctgtgtgtatattcacagactctcacgctcacaacaaccccgtgagccaggagctattgtcttcaactcacaggtgaggcaatgaaggctaacagaagctgagtaacttactacacaggtggtaagcaagtgctggagctcagagtaggaatcgtattggcccctcacccaagcctgggtcccttttccattgccaggctgcattctaatctatacttctctccattaaaacccctcttgtctgtattctcctctcctcatttcattttctaagtttacacattctgctgtgccattcccaacagctgcaacaactttcaaacagctggggaacacccctcctttagatctccaaaccggccgggcgtggtggctcatgcctgtaatcccagcactttgggaggccgaagcgggcagatcacctgaggttgggagtttgagaccagcctgaccaacatggagaaaccccgtctctactaaaaatacaaaattagccaggcatggtggtgcatgcctgtaatcccagctactcgggaggctgaggcaggagaatcgcttgaacccgggaggcagaggttgcagtgagccgagattgcgccattgcaccccagccagggcaacaagagtgaaagtccgtctcaaaaaaaaaaaaaaaatctccgaaccatcaattactccaagttcagcttgagtcagtctgcctccttcaagaaagtggaaacacacgctcccaaatccttggccctgttggctagccctctgcagcccgctgagcacgctttattcatccactcgcagccccgtgttgggtgcatgcctggcttgccttgtaatcaaggaaggaaaacagcacctggcagtgcccaacattcccactaaaccctaaccctgtgtggcaggaaatgtctcagagagacaaacttggccaccttgcacctagggggtccctcaagtcttcctgagaatctggccctatgggaataaggggaatctttggccagaggaaaaaaagtgagaggaaaagcaatgttgaacctggaaagaggctgcagagagaggctaagcaagtctggcacctggcaggaggggcctcaccccagcttcagagggaagcatggaagggacctaagtggctgaaggcggaggtcagtagaaggcaagacccggcccctatttccggcccactgtgccacatcagccctccctggcccacctccctcagcccccagtctcctcacctccctgtcactgccacacctggctgctgctgccctttcccagagaatgtctgcaggcgtgtctgccctatgccaccaggtactgtcagcccagcccaggggagggacaacgaacccagggccagagccagaaatggcccacagcccaagaggaaccagacaaacattaaccagccccacctcctcccacatacaatcattaaacaagattgatcctctgagctccctatgggtttggagagacagatcacatagcctggagtcactgccttgtcccagaggaagagaggcatcattgtcacccacccatgtttagtctctctgggagactgagctggacctgtgctcctcagcatccctcaggcttcccccatgccctggccttaggcagatccacagtgcgggcaagctgcagagagggatcctgtacaggctgccatcctggtcaacccttctagctcccagcctctaaaactgtatgacagggccgggcatggtggctcatgcctgtaatcccagcactttggccaaggcgggaggatcacttgaagccaggagtttgagaccagcctgggcaacatagtaagaccccatctctacaaaaagtataaataaataaacacattagatgacaatggggaggaaaaagccatgggtgatgcctgctggcacctgaggtcaaggtgggagctggcagtgcttcccacccatatggcagtaccagggtgccctccggccacttgcttattgtccacatcctgagtggctggggatggacccaagtatttctaatcctatcccagaaccctaaaacctcagaaattgctttctaccctcaaggccaaggcagttgaactgcaaagtgtatcatgttcagtaatgaatcttggcaatcattaaggtaaacagagactgtcaaccattaactgagggatcagtctagtttcaaggtctgcaccactgacggcttacctgaagaccctgctgtgttctgtggcctgaatggcagtggagaaacaagggaagttagcagagaaactggccccctgccttctgttcttcactccagcttgagctcactgctagaaagggagccagggcctcagcttcccttagccaaacctgggcatatggatacatcaatccatgagtattggacacctactaggaacccagcatagggctacgtgctgggtgcaggtggcaaaggaggtgaaaacatcccaactgttcataagagatttatcaacttcttttttttgagactcagtctcactctgtcacccaggctagagtgcagtggcgcaatcttggctcactgcaacctccgcctcccgggttcaagcgattcttctgcctcagcctcacgagtagctgggattacaggcgcctagctaatttttgtatttttagtagagatggggtttcaccacgttggccaggctggtctcgaactcctgacctcaagtgatctgcccgcctcagcctcccaaagcactgggattacaggtgtgagctatcatgccctgccgaacttctggaggagaggggaccaagacccaataaattgttgtgaaaaatatcagtgcgtattcactaactttgattcctgagagagtccagagaagggaatgatgagaataaactgaagtaatcagggaaggcttcctagaggaagtgaggtttgagtggagaagtaaaagacaggtaggagctggaaggggaaggaccgggttagcattccagggaggaggaacagtgtgagtgaaggcacagagtaggaacgagcaaggcatatctgggagccagtaaggaggcaggactgtgttgaggggctgtggaggaaactgtcagtcagttaagaggcttagagtatggaggacatttaaagccagatagggaatcctttagttgtgcctggtaaacttggtaaaaggcaaaactgagctggacatcatggtgggtgggggacaggctgaacaccattcttcccgctgagagtacaagttgtaatggatagagaggactaccgtttcccgtgtacttaatgcattaaaggcaatgttcaaattgttttgt

SEQ ID NO: 1563673 - DNA, 4001 bp, Homo sapiens
cttgaatatggctttaaacatcaacccacagttagttggcacatgtcttaatggtctttcttaagttgggaagatgatgatcgtgtatattatgtattaatcaaatccagttaagcaaactttcttatgattcaggattactctataaacatttctatgaatataagacaaagtgaaacctgccctgggtgatcaaaagataaacagtgcaagagacagtggaactatgcttggcagctcaaaccagggtaagtcattaaataagattcaaaccaaaattagactgaaagcttctcactttagacaaaaaaagatatgtcaggatcaaagcacaaatgcagtttttagtcaagtgccagctctgacagaactttgaaaaaatatatacattgtatgtataatgcctatgtataaatatacacatatgtgtatatatgtacagatatatacatactaaataacacaggaaaacatgatttgcggtaaagtgaagagctaaataatcattaaatatttacatcaacttgccaagttagtcaaatatccattgaaagcatgggcttttatcagcaggcattcatttcaattacttttatttattttttatttatttttatttttttgagacagagtctcgctctgttggctaggctggattgcccaggctggagtgcagtggtgtgatctctgctcactgcaacctccgcctcccgggtccaagtgattctcctgcctcagcctcccgggtaagtaggattacaggcgcccgccaccacgcccagctaatttttgttatgccaggttggccaggctggtctcgaactcctgaccttaggtaatccacccgcctcagcctcccaaactgttgggattacacgtgtaagccaccgcgcccggcctcaattacttttaaattatcttactgaactctgtgctaggtcactttaagagcaagtttactaattgcacaaaaattaatcagcagtcacttaaatagcaatcttttgtggtaaaactgtgctgtcacacatggtaaataaaaagagaaacagaatttccgtgtcgcattatgctgtgaagcacagtaaggacaatcatttgtttgtaatgggcaaagtctcagaactgaaatttgcgagtcttcggaattaaataaagattatggcaaaaccagtgtagtgtgactgtttcctaatttgttctgccaccctccccagtattcaaccctctgcaatttttatgggagaggatgacaacgcatcatcactccaatactttattcgttctactgctggaaaggacgctgtgttagctaccacagccgtgacacagctttccccccatccaaggacgtcctgtgtctcgcaggccaaatgttcctggggaagaccgcggtagccgtcaatgtggccacctgtcccctactgcaagcgggccgctctgcgcggatgctcggagagtccctgctccctttgggggaagagtcaccccattagtaggtgacccagctccgccaccaaaactgcgactgttcaactcggccatgggggtcatgagaggccgaggtcccccaggcctggctggggcatccccagtgtggcaggtcccgttccggcctccctccttgcccagcggccggggcaccgggccggagagatgcgggatggggacacaacagccaccccctccgtcccccgactcccgccccggctcagcgcctcttcacatgtcaccccgggctcaccaaaaagcgcgtcgaactggtgccctggtccaccgcccccaccaatggccccaaaactgccttctttgaggctgccatgaaaccagcttcaggtcggccggcgattgcggccggtttcctgggtgacggcggcgggagggggaggggcaggtgacgagtccagagatcgaggccgcgcgcgtccgctgaacgctcggaccgcgctcgaggcggcccctttacccgcgcgcagccttctcaccccgcccctccggcccaggccccgccccccaccgcgtacccccaaggctccaggggcgtgtcagggggggtgggggtgggcgctgtcacctgggctggccaatcagcaaacgcaaaagagccgaacgctcggacaggcagagggcgatgagacgtcacgggggcggggcctgggcgcggtggaggcggcggcccgcgcagtaggtcacgtgggggcccggcgagcggacagcagagccatccagctgcatggcatggggcggagacgagtactgccctttggcaggcagcgctcctggccggcgaaaagagcgcacttccactagtgtcctggggctcgcctccataggggtctcaaagtgtgtagaactgcttgttccctccagtgggctgtgcagagtcgtgcagcgacgtgagtcgctgtgtggacctacccggcccggccttcccgcgtttcccacgccccgcccacctccctgcatctggcccctggtaatcgtaatcattcctttggctgggattgaccccatatagggtcacctcaaggagcaacgcgaatccttcaccgttgcaagcttttcagggacaagaaacgcggaagttctttcggtttagcatttaaggaaagcacccaaaatcaacctccccaagttcctctatcgaccattcaggcagaaggcgcccggcaccactccgtcctgacgcgcccttgctcctcgtttggcctcactctgcggtcccctcccccacacgccatttcctctccctccattaactgctttggatggcaggggacagaaaagggactctcccttgaccttgaatttaccttgcccggatccttctggatcctgtgttctaagggctttcaaacttggaaccaagacccacactgtgaaacagtttacaaaacaaacccaggctccagtgtgtgtgggcggggagcacatttgtagttacaattgttacacatgtaaatacatgttatatacatctaatatacatttatgtatgtatagaaaaactttccaaaacaatatttgtccttccacagtatgcattctgtatttttattctatggcatatcatttttttttaatgctgattgaaaatcactaaattgcttttgtaacccaccatgctctctatcaattttaaaagcactccgctatacccactgtcatttctttccatccctttcccaaatctctgtgttctggaacatcatttcttttccttttttttttttttcctttcttaccttgctctacaccacgtcacttgtccatctctgtttgtatagttttaccacacatgatctgaaagcaaattttcctaaacaccgtctagacctcacattctaatgttccagatgaagcctgcttatggacatactagatttaataactatcgataaactggcttgctttaatataagagtgaagatgagtcagtatctctgaatttcctggaagaggaaaagagggagacaggcatataagcaaggaaccaggccaacttgcctctaaaaacagtgaaaggcattagttgagtgaatgatatagaaaaggattttcttggttctagaaggcagtaaaaacaaagccaccaaacctaccacatcgatccattaaaaaaaaaaaatccctgaccacgtttgaactttcacatacttttgactctcagattccaacaggacagcaaattatttgtttggcagcacaatgggatcagaattcagacatttcagaataagttgggctagatgtacatgggggattcttaaatttgttgatcctatggttcctacaacaatgtgtattccacatcctcattcctttcaccaaaacaaaactgaaaagccaaaatattggcctttcaggcgtcacatctcagcaccctgttagagatgaggtaaagataaggggaaaggtgttagatggaagagttgagctcagcctatcttaaatatttactgtgaactttttttttttttttttttttttttttgagttgg

SEQ ID NO: 1563674 - DNA, 4001 bp, Homo sapiens
ctaacatggtgaaaccccgtctgtactaaaaaaaaaaaaaaaaaaaaaaagagccaggcgtggtggcaggcgcctgtagtcccagctactcgggaggctgaggcagaagaatggcgtgaacccaggaggcggagcttgcagtgagccgagatcgtgccactgcactccagcctgggcgacagagcgagaccccgtctcaaaaaaaaaaaaaaaaaaaaagtgtaatttacccaatgtcacagggctaagtaacaatgaggcagaatttgagcccagactgggtgccagggtcttgccattagccaaacatgacataaacatgatccattttttatggaaaataatgaaataaagaaatctatgttttcatttatatagaaaacaattgtaaggttgtatattaacatttaaaccatgattatttctgggtggtggaacggtggggggaaatctttattttcattttgctcttctttatctacattttttgcaatgatcatgcattagttttataatcagatgcaaataccaataaaaaaaaatccgtgatgggcaaaattgccacacatactgtaccacagggtcacatgaaacttacaaggccaatttcttctgtgatgtctgaccaacatcctgactttatctataaagatattcataggaataacttatggacacagaaatgtactgtgactgccaccttttaccaacatctatcagtgattcctaaccttttttaaatcacagagccctttgagaatttgaagaaaggtaaatatcctctctccagaaaaatacacatattcattcagatttgtagatttacattcattttcccattgaacatttgctctgtaagcgcagttgaatggtcaagcgctgtgctatgtactttaaataggttatctccttgaaaactcacctgtgtgagataagaactatttttcagattttttttgtcagctccctgaaattaaaaggttgtaatcccaatttacagataaggattgtgagggtcagatatgttcaatacctatctaatccagcctcaaccctcacgcaaaggtgtaaatgtataaagttcctccatgtcaaccttccagcctgatgccacgctcatgggcgaggtgggagagatctcagcgaccttatggtctctctaactccctcgagatactgccgagaaatccacgaccccaaaaggagaaaaaatggcacgaatcttagttccccattcctcctacccaccctagatgttctaacggttagcacccggcagaggaagagcagaagttcacaagaagggtctgaatagaaccgggcagggctactttgggcacactgcctatggggtggccctgctctgcaaggagcagtgaaaaaagagaaccgggcagggagagagagaaagagagaggaaagaagagaaagagaaagagaaggagaacgagagagagagagagagagaaagaaacaggggccgctggccggactcccatcccaggaaaggtcacacagagaaagtttagggctagtcctgattcgggacagtttgctggggataaaaaagcagcagcagagtcgggtgggggagctctccctcgggctcaactgttcccgttgagactctccagttccccaaacacacccaaacacatggaaaagcaaagggaagggagtacccaatatctgatacctgatgcaggaatctggctcttcctggcagtcaaggttgcacatgaagcgctcccagtgcagccagcccatggtaggcgtccttgccaatccattgtccagtgctctagccccagggatgtcccaggaaacgagggccaggaagcgaagcgcaagcgcgcagcccagatgtagttctgggttcctcagctgcattgtcacggtgaccggacagcataaatttccgcgggtaacctgggcttttaagattaacctcaggggcggaccaatcaccgatgacttattaaataatgacgttattgtttctctggcaactgggacggttatccccagaggtagaccaataatcagtcacgtaagacgttccgctaaccaatcaccctcttcctttcttgatattgacccgccctatttccataccagaaggaagtgcggcaccttagtgatcccgagtttaagccgagagttgctcacgtgaccgagatctcacatgacgtaggcgctcacgtgattactcgcttacgtgagcagaagtagttctggtcgtcgtctaccgtctcgctatagccgtttgagggaagaaggaggaaaattacccggtatcgttagaggttggtgtgtgggtgggaactggggacccaggggtggtgatgatgaagaccagagcggggttcgggggccgcctccgcctctttcgttctctgctttcccctcccccctcgcgctctctccctcctcccccccatctcagtgccgggaagccgcctgtgctgcgcctggtggggaaatggtggacgctcatgactgtgtatgtgtttttgtatatctgtctgtctgggccggtctcgggggacccctaagggtgaccgtaaggcgaaaaacgtttgaaaaccacggccctgagttaagaaaaacagatactgaaaatagtggtctgagtgctggtctatccattcaggcactcagtctccactgcctgattgtctgtaaggggaggccccaagtgaattttatctgtagagtcacatctaggcaaatgcgtgcttgacaaaggcgcccaataaattactttactgaatagagtatttgaataatgtttatttttctgctgataacaacaatctacatattcaatttcgaacatttgaaaaataacaatatagtataaaatttaaaaatacacataattcaccacccggagacgactgctcaacctgatgtcgttacagttttttaaaaaatgtgtataacacacatataaatacacaaattcttaactcacaaagagtcctggttcccactttagccagcagtcctgatggccttcccaggagacgcagtaatgaagtagaacctctctgcccctacagaagggctcttaaggaatagagcggtgcagggaattaaatgggacgggttatcccagggataaggcaagcaaaaaaaaaaaaaaaaatcctgcaaaatgaaataaaaaaacagcttgtaaatctgtcactgagaccttaggatggttaataggaaaactgttatcactgcagatgcagtgtgctaggcacataatcggcaatcagtaaatgtttgttaaatcgtttcctcagtgtagttttatggccgttattacactttgtactttgtttccaagaggcccagtgctcccagaccatttcagataaaccatccacatacaaaattagaaaattttataaaatttcctataccaaatcccagaaatgcaaacattttaatttgttttatgttactttttttgctgaagtaaaagtaattatttctgtagaaatttaaggctgcataaaaaaattggaaaaataacatggaaaatccataaacctcccactcagagtaaccactaatatgttctttctaacttaaaaagaaaaaatcccagtacagcaaatgtaaagaattaaaactgtatagaagtatatagggtaaaaagcgaaaagcccacttcacccccccacccttcagttctctcaaaaacaagtttgcttccagatcttttatttatttacatacgtatatacatgcatgccaatcttttactataagtaggatcatactatgtatattcttttatttaatgtattttggagatctttctgggtcaaggcagatagattttttttaaatggctgcattgcattccagtttaaggataaagtataattcattcagccattcctctaatgatggctatttaggtttccaattttctgccattactaacagtgctgcaaggaacatttgtaagtatttctgttgactagattcctggaaggatt

SEQ ID NO: 1563675 - DNA, 4001 bp, Homo sapiens
aaaataaagtcatatgttgaaataaattttattaactttcttttttaattccctttttgagacagggtcttgctttgttgcccagcctggagcatggtggcatgatcacagctcactgcagcctcaacctcctggactcaagcaatcctcctacttcagcctccctagtagctgggattacaggtgtgtgccaccatgcccaactattttttgttttcttttttctttttttttgtagaggtgagggctcactatgtttcccaggctggtcttgaattcctgggctcaagcaatcctccctcctcagcctcccagagtgttggggttacaggcatgagccactgcacccagcccttattaaccttctaacatctgtagaatctgtcacaataccctgtttatattcctgatattggcaatccatatattttcttaatttctcgagagaaaatagacattgctagtattttattaatctgttcaaagaatcaacttttaacattgttggctttattgtatctttgctttctatttcaccagtttctgctgttataatttccttccttctactttcttaggttccacttgccattcttttcccagtttcttgatagggaagctcaggtcattgattttcaacttttctacttttctgatctgtgcatttagaactatagatttcctctaagcactgctttggccacatctgcatcattttgatagtctgttagaaataaactccacctattcctcccattattctattcttccctgccagcttagattcactccccagatcctgctttgcagactcggagctccatccttgcaaattcaaggacgagcagggatggctgtcttcaataacaggaaggccagcgtagctcagaacccaagagtgagtgagagataagtgggagggcaaggcagggtctggatcctgcagactcttggaggtgaagttacaaagcctgctttataaaatgatgatcaagacatagtcatcacacaaaggactgggtgcagtggctcacgtctgtaatcctagcactttgggaggccaaggtgggtggattacatgaggtcaggagtttgagaccagcctggcctacatggtgaaatcctgtctctattaaaaatacaaaaattagctgggcatggtgacgtgcacctgtaatcccctactcgggaggctgaggcaggagaatcgcttgaacctgggaggcagaggttgcagtgacctgagattgcaccactgcactccaccctgggcgacaagagcaaacctcggtctcaaaaaaaaaaaaaaaaaaagacatagtaatcacacaaggcttactgtgtgccaagccccgttttacacactctacaaaaatataatccattttatttctcaccacagcatataaaatccctatagtcagagtgcccggaacaccatgtccttcctcctttggcctcctctacagggaagtgttctgtcttcctacagggtcctcttcaaggtccccttcaggttgccaggggcctctgaattcctctcctaaagctcaaggtcagcgctgtgtttcctagcctctctccacatggccttaatcatgacagctttgggggcaccctgcgtgagccacctttgtatctctccacctgtccctggctaaactgggggaggagccagccctcagccccggcccagccctgcacacctgagcacagggccctccatggcttagagccgggcctttccatgggcctctgctgccctctgcttgtctctgaaagagaaagggagagaggaggacaggaaatgggagcccgcagagaagggaaacaggttactagaccagtttcagtgccaacacccttgccccagatccccaggggccatcttgttcacctgtttctccaaagtcctgccccacatcttgactggcagcctggagggcagatggcgcagcatggcagggtaggcgtctttgcccagggtcctcccgacaatcctctggctcagcgcctggagatcaaggggcaggaatgggagggcacaggctgaggactgtgggaggtgacacaggtaggtagtgcaaatggaaggactttaacattaaattcagggcctcaaaattgaaagcttaaagtggatgtgtgtaagggattacttcttgttaacactgaaggctgggtgcggtggttcatgcctgtaatcccagcactttgggaggacaaggcacgtggatcacctgagatcaggatttcgagaccagcctggacaacatggcaaaaccctatctttactaaaaatacaaaacattagccaggcatggtggcgggcgcctgtaatcccagctacttgggaggctgaggcaggagaatcgcgtgaatccgggaggcggaggttgcagtgagccgagatggcgccattgcatttcagcctgggtgacagagcaagactccatctcaataataataatactgaaaaaccaccaagtattaaggggatctttattctagcgtgtgatgcctctggtctacttaggggtatgtctccaaagtgtgagatctgtgagctgtttgagagtgtgtgtcaggggtatgaagttgtgagctatctgagttagagtatgactgctctgacccattaggtgtctgtttccaagccaagatccctgaactcttaagagttctgagccccttggtcaagcacggtggctcacgcctgtaatcccagcactttgggaggccaaggtggacggattacttgaggctgggagttcgagaccagcctggccaacatggtaaagctccatctctactaaaaatacaaaaattacccaggcatggtggtgtgcacctgtagtcccagctattcaggagcctgaggcaggagaatagtttgaacccgggaggcggaggttgcagtgagccgagatcgcgccattgcactccagcctgggtgacagagtgagactctgtttaaaaaaaaaaaagttctgagccccagggtgtgatgttcctgaattattttgggggatgagttttgggggatgagatttgcagtcttcctcctcctccccactcacccttcactcaccctcaccttccgctgctgagagtcagagaacattcatcagcccagttgctgttcactttaccctgagcagaactcccccatctcccttacaggttacttgtctggcccctggagcatgtgagtttgagatttttgtttctagttacccccaacacaaacactttgtgttgtggatattgttttgtttttgtttttttttgagacagtgtctcactttgtcacccatgctggagcccactggcgccatgatggctcagtgcagcctcaaactcctgggctcaagggatcctcctgcctcagcctcctgggtagctgggactacaggtgtgtgtcaccacgcctggctaatttttgtatttttagtagggatgaggtcttgctatgttgcctacaattggcctgctttggcctcctgaagtgttgggattacaggcgtgagccaccgtgcccggccagatattgtttttaagcatatgattttcctttaaaaagagttacacaaataatatgtgaatacaggtttgtataaaagatttgaaaaacaggctgagggtggtggctcacacctgtaattccagcactttgggaggctaaggcgggtggatcaattgagatcaggagttcaagaccagcctggccaatatggtgaaacccccatctctactaaaaatacaaaaattagccgggcatggtggcacgcagctgtaatcccagctactcgggaggctgaggcacaagaatcacttgaattggtggcagaggttgcagtgggctgagatcgtgccactgtactccagcctggatgacagaaggagactctttctctcgaaaaaaaaaaaaaaaaaaaagatttgaacaacacatcagtacatggactctagcaatcatctctatccccattcccccagaa

SEQ ID NO: 1563676 - DNA, 4001 bp, Homo sapiens
actaagaaaataccacattcttgccagcttttcaaagaaggggtattcaaaataagtgcaaagatgatataaatattttgtaggagttaaaaattgatatgagcatgcataaatactcacattctcatatgcagattcatctgattaatcaagtattatttgattatgatggtggtggtggtgaggatgatgatgatgatgatgattctaataaaaaccagcctatattttttcttaatcatagtaggaggtgtaaacctgaaaggaacatagtgggttttcccagtattcatagcattattactatgtgttccatttatcttggttctgtgaaaaaatgccataaaatttaatgaaaattaaatttagagtcctatactttgttgtaagagcatctcctgtctctgctcagtcttccactctctgttattagatgactatttcacttactggtaatgatttgatattttgaggtatcaattgatttggcaactattcgtaaaccatgtagaaaatgcaagcatgaaaatagtaatttctcactttttaaaattatgcatgctccacttctcatatgtacataaatacaattatgtcatattaactaaattttggtaggcaatccatttccaaacagattgaatagtagaatatagtagtaaaaagaaatttttgatatttcaagaaaattcctgaattgtagtcctcatagtatgcttctagtttctgaaatataacagaagtcccaagttggctgagaattagggatcttttatattttatctaaaatgagcatgctcctgccaaattaatacaatcatcttatatgaaaaacactgcacccaataatctctttaaattactttcagaaaaataattacccttatatagaaatgtaaagagcatgcaactcatcagactaccttaatatcacgttggctgtgaaaatgtgtgttgaattgcatagagtgcggctatgcatcataaaacttgcttttgtgaaaaatttaccaccctcccacaattattaggcgttttaaatgaacaaaagatatctaactttcctctataaaattaaaataatatagtccagagcacagataaatacacaattacatgacacattctcttttaaacaatttaaatatcaacatgcaaagtcgtttcacctacctgaagtggtttgtctctaagaaaaatgcaaacaaggctgtcaaaatgttcactagctgccggttcattcctgtttctgtgttgcttgtggaaaatatcccgaaatgattccagaaagatgctaggacaaagtgtctgtttattgtccagattcaaaatttggcaggaacctagtttccttgaaaatcaaaaagagatttggttttgtacagtttgctgagaaaaaagaaaaagtgccagtcctgggcatcatggtcaggtcaaaccgaggcttgggaccatcagttaacccagaaagacaaagcctcagaactgatgaatcccccagctgcttttcctgaataataaaaatgctgctaccttaatcgcatcaccatgcaaagggagttggtgacaatgccatgctagatagctgtggcttttgttttatatcttttctgtttagcaaagccctttttctagaaaatgttttcttttaaaaagaagttgtaaatgagagagaagaaaggactctgcgcgctggagtgggtggggggaagagggaaaaattgctgagatcctgtgctggaatgagggctatagaatgagacggagacgtgatcttacccagcctataaatttcagcactcggacagctccaagctctgaagtgcgcatgtttcctttttcagttgcttggggcgggggtcggggaaaagcattcaagaggggacgtgcctgctgttcgaaggcaaagagtgactggccgttcagcgaggggatactgaagggggtacgatgacagcaagaggagaagagaggtcgggagacggagagggtgagggaagtggggtctgagctcctggaaatgctaggctgtcggtgggtgggcgggacgggaatttgaagcagaaaagggaagggaataaggtttaatcgtgggaaaacgaaattgggggaaacagagaacaggattcagagtactgaaattataataagggtgtggacagttcactctttgtcagtgcaagccggaggcaaagaggagtcctgtgccgaagagaagggaacatttccttggcacagagaagcccgcgtgcagaagaaggttcatgaagatcgataatttaatttagaagtcctttatgccttcctcgcctttttaatgttttcatttgattttagccgcctagtcccaaaggatctctctacctctgtactagggaaagccccttccaactgagctttcttcagtggctcaaaatccttgggcatccgcaagtcacagatttgtagaaaaggaaatgagacaatgggccggcagggggcagtagcaatcttttcttgccatggttaaaggttagagcagggctccatgttagaaatggagcaaggaaaagtgcaactgggagtttagttcatctgcccattccagatgttaatcactaggaacagtcatgtaataaagtgcatatgctattctcctaaattggctaaagggactgaaaatagtggaagttcataaatctgtacaaaagtctgacgagtaaccctgctatttcaaatcaaaattacaaatattattattaataaaaaagaggaagggtagatagtccaatgcggataattagcagcttctgggaagggggaatgaaaaatgcatgtcctaccataagctaggagagtaacctactttttgtggaatattccttgttagtcacctatgtgctttactggaggtcttaattttaaaacaaaataatatgattaatttttactccgtaaatgactaactttggatcagtttaaatatcatagtagagtaacaatgaattctatgtttttaagaagtagattcagagaaaaaagatggcaagttctttttaccttttaatgttaatataaatcaccagaggatcttattgaaatgcagattatgatccagtaggtctggggtggggcctgagattctgcatttctaagaagttcctagctgaagttgatgctgcttgtccacagttcacactttgagtagcaagagtctatatgccctttcataagatgtctatcccagtaagacagtgaaaatacaggaatctctttttagatgaaatgcagtagtgcccaagcattctatttacatacaaaatcaattcttcaaatatgttttcttaactttcaaagcctagagaaaatgattcaatttaaaagaaaaacagtatggtgtagtgtgagacatccctggactgcagcttcaaatctgttcacttccaaattcatccacatggaaactctagacctgattttatccctgctgtcctgacccaaaaaaatatataaaatcaattcctggaaatatttcttcaattggttctacatggaaaaatagcacagatttttttgtgttcaagattctttccaaaagaaaattaggtataaagatagaagaaaattatttctctcaaatttaaggttgtaacgatgcttaaataatatagtctttgtaaatcatttctctttttttttttttcccgagatggagtctcactctgtcaccgggctggagtgcagtggcgtcatctcagctcactgcaacctccacctcccgggttcaagcgattctcctgtctcagcctcctgagtagctgggactacaatcacatgccaccatacccagctaatttttgtatttttaatagagacagggtttcaccatgttggccagaatggtcttgatctcttgaccttgtgattcgcccacctcagcctcccatagtgctgggattacaggcgtgagccaccgcgcccagccgaatcatttcttttaacaagagttgtgttattaacca

SEQ ID NO: 1563677 - DNA, 4001 bp, Homo sapiens
atgtccacgctagccaggtgctgctgctgcttctggccacctgccacctgcctgctgggaggccacatggtcctgcacgtggagaaactggaccctccccgccgtcctcagccccactctcaggtcacctctcctgctaagcctagacctagtatcctgggacaggctatgggcttagcagtcttggtccccagcccctgttgcagtaccctcttctggggctaacttgtctgaggacctgagagcagagtcaccgtgtgcagccactccttcctctctttcattcctggaaagtcctaaacaccttcaggacctaggaggatccagagctgacagtctttctcatgtaaagtcttggggtggcgcagggagagaagtctaactctggtgctaggtagctgagccaccctgggcaggtcattccccatctctaggcctcagtttccgtatgtacaacgaaggacttggactccagactctctaagggcccgttttgctctaactgcctctgctttccaagccccagtgggaatgctgctactggagcttgagctttgaggcagcctcccctcctggagggcctgcaaggcccagtgtggtgcccccttctgcctgcatcctcctgtcaactccagctgtgctgccattctactttgagctgcttttcactctttagaagtttattgccctgctctgcatccctgcctgcctgccagccaatgtgtctgcaaacagtggggcaggaggctttgcagacgcaagcagccctgcgatgtttcttggattaacaggaggaggaggaggagtatgccgcagtggtactgaccccctccaccttgggaggcactcctcttacgatcaggtcagcccaggctacagccatctttcctgttcagctcaccctgccaacctaggctggctcctggtctaatgagaaaggggcaattggtgggggaacatttacagggagcccaaagcctgtctttcctgcaagcccaggaagtgactgctactttttccccctcaaggaatagggagcaaccaagtgagcacaggcagggtgactgcagaaggccaaagaatgtctagcccagctccatcctgatgtggtcttggggcaaacccctgctacctgaagcctcttgggctggcagttgacagatgttgccatcatttttagcgatctgagcagtgtgtggcccagatgatagggaaacagggttaggtggctgggcagacaccctccattctggggcttagttgcctagcccctacccaggcctaggaagcttccacctgtgcagaaacattcccagcatgaccggtgccttgacatctctaataaaaagctcttggggtcctaactgggggaggtcgtgtcctcccctgaagccctccagactgcgggctttgtgcaaacttagaggaaagtgtgccagatgcccaggttgcccatcccccttggctagtgtttgcatgcacctccttctcacccccactcagctcacctgaggaggacctgccctggcagggtccagagaagaaggaaggagagggttgcaggaacaagagttgtcattctgcggggatcttgaagccctttctcagcctggctgccaatgtgagaggggatatccctgcaggaacgccaaaagtacagagcctttctccaacctgggctgctcgcaaaagagcctgctttctctcctcttctgcctcttctcctctggcctgtctttacctgccaggggccagaactattcccctggaaatgatcctgacacagataaccctactggcttctgcttgggctcgccttgggctccggagggccttagcctgccagctgggagctggaaaagattctctctgggcagcaatcactctccaaaccctgaagagtcttggaggggagggaggagggagaccggtaggaagatgttttcctgcctcccacctccccctagatgcaccctccgaaagcagtaatttaaaggcacagtcggcagcagctggagtggggttcagagcctgcccgtgtgccagggaggagcttgggctgccatggctgtttggggagggccagaggtgttctgtccaacctctaactccccagctgcaggagggcatgtaagcagccctgctccccccgccccccacctcccactcccgaccagctttcctttcatcctggagccaagctggagcccaacagtaaagtcctaatgattgttaccagggggaaaaagacctgagagggtttaggcagcgccaccaggtattctcaagctgacagcttcaggttagagagaaggtgaagaggctgagggcaggaatagctttcccccaactctctggacagagacacagaaggtgcatgatacagaggaacttgggaaccctcctcaagtgcggtctgcctgcttgacagtctgtctgtcccttcatctgtctacctgcccccatcccacctcgcccttgtagttagttgtgcagccattcccgtgcctgctttcctccctcaggtcgtctcttggggtcctctatagctctcagaattcctcctcccagacactccttccccagcctggctcatgggaagggacagagatgcagagcaaggctgggacacagtaggctttgcaggcttcagaggaatggcagcgggtcaagagcagtgacctagtggccctcagccctggatggaggacagaggcagaggggtgggctggcctcttcccttgcctcctgcacatttgcttacagcaacaaggtgctttggcagctccattttctcctgcctgactcttcctcaaaggttccagtgtgttatctaaacacctctgagacttctcccctcccccatttcctcttgctctctcttctttttttcactctactcctctcttcctcccccctccctgaaattttccttcacggaccctctgtccatctccatctccaatcttcctcgcagtttcttctctgcgtctcactttctgtgcctgtctgccttgcttctttcttcctcacttcctctccattcccggttttctctttccacctcccctgtatcttcactctctcacactctcctccaaaacgacaacagtgagaagccaagcgttttcatttctccctcagggggaactctcccgccagctctgcggagttctgattgcatgctgtggggaggggtctgtgccaccttctgaggttcaatcctggagctgactgtggcctcctcaaccttgccagagagggtttgaggggattggaagctcctccacatggcctattggctatatggaaggattaataatgaggtagccgtgagtggaacctgtgctgcagctcccttttggctgtgttattattaaggaagagaaattttcaaaccataaatgaaagggtaagaagagaattttaaatgcacactaaaatatagacaggggtgctgggcttttggagttgggactgagaacattacaagtctcaaataatgcctatatggtcagtaaatgtaaaataacctaaaacatctttagctgccctttcatctgctcaccctccctccttgtttcctttaagcatcatgatccccactccatgggcagaaactgagccttacagaacctcccaggacagagctccttgctgggggtctggcggggaggggtgtggctcttgtctcctctgtgtaactcacttcctgtggcaaaactcaacatgtcacttctcctgcttcaacagttccccattgctctcaggctgcagcccaaggttggtcactctgcttgtcccactgatgcatctagagtttcctgttctgtctctccagcttcctggtgtttttgtatgttgttccctttatccaaagtactcttccctccactcttacccttctggactgagtctcgttgtcattttgtaaggaacacttctggagctgcccccatgtcccttgggtataggataggagactgtccaatgtgttccca

SEQ ID NO: 1563678 - DNA, 4001 bp, Homo sapiens
ggaggctttttatttaaaggcaaaataccaaaatagctctctggtgtaggtgatttctactttcacactcagcttgtatattaatttctttctccttaacgggctgatttggattgacttgttgagaatggtatccattagtaatgagtcaggagagaaagggatttctgtggttacatgtaaacttgtggtaggtctgcagaagttacacgtgaagaggttagtgaggaagtcagccatgatccatctatgtgaaggtcacaccagcttcactgtacactttgaagactttttcaatggcattgacataggcagctgttctcaggtccaatcccaggttatacttcatggctgtgtgcataatttgcctggcagaacgctccattgtgtatgccaaggcagagtgcacaatgtctttctcagatgcacccgatatactgtcttggaactctgccgtgggtacaatgggaatagttccaccatgctttccaaattttctttctaaactctcttgaacagacaggagcaagtggtagttagaatccctttcatatttgaaggtcaaacggccatagctgacatgatttagattcttcagccactcaaagtaagatactgtcactcctccagcattcaagtagagatctggaataaccaaaatgtttctctccaggaagatcttatcagcttctggagttgttggcccattggcaccttcagcaatgatcttggctttgactctgggtgcgttggatttggtcaactgcttctcagtggcagctgggatcagtatgtcacagtcgacctccaagatgcttccttcatagggctttgccttggggaagcccagaatggacccatgttgcaatttgaagtcttccagttcctttgggtcaataccatctggattccatatactcccatcagactcaccaacagcaatacatttagcaccaaaacgatgtaaatatctcatagagtgtaggcccacattaccaaatccctgaacaacaaatgttttatctctaaaccctggtgtcattcctaaaatgctcatgtaagaagcttcattgatgaagttttcaatcccatggaagacaccacggccagtagcagagatgcgtccatggattcccccttggctgatgggtttaccagtaacacaggcgtgtgcattaatatcatagtgccctatggtgctggcataggtatcagcaatccaggacatctcccgctcacctgtgttcatgtctggagcaggcacatcaacgccaggaccaataaagcccttctttgctagctccatggtgaacctccttgtgatcttttccaattcattttcggtatagttcttgggattgatcttaacaccagctttagcacccccaaacggcacatcaaccactgcacacttgtatgtcatcagagaagccaaagcttttacttcatctacactcacatcagtgctgtaacggatacctcccttgcagggcgtgcggtgctggctgtgctgggcccggtagccttcgatgacctcccaggagccgtcgtcgcgccggatggggaaggagagactcagcacatggttgcagggcttgatgatccgcaggatgccgcgcacccggttccgcttctgctcctcgctttcctgggtcctcaggtccttcaccaacttgtcctccacgatgctggcgccgcgatcgaagaagccctccaccatcttgaagaagttggggtcgtcctcgcggtcggccaccaactcgctgtagtggcgccgggcggccaatgcgagccccggctgcgaggcggcggcgggctgtccgcggccccggcccagcaacgcggccgagtggttggccgcggagcccagggcagcgggcccggcccgggacggcagcagcgctttggccaggtagcggtacatcgcggcaggcggaggaggggtgcgtgacggtcgcggaacaggtgcgctttctcagactccccgcgactaggaaggaagggtccggcgcgggttgcccttttaagccgcagcttcctgcctgcccggctgtcccctccccttgggcgccacctaacggggaggacggactttgggggcagggcgccaaccagggcgccggacctccgggtccggaggtccggggcgccggacccgccgcggcctcgccgggcctggctggcctgtttgttctatacttctaatgtttaataattacccagagctttggatatatgcaattctgcaaaataaatcaaaaggagtcagaaggcaattttatttcctaatagacccttagttagaatttaacttaaaagccatttttaacaaatgtaaacaatatctcccctcctctccatcaaagtctgacggagacaaatgaaaagattttttagaagaataggactatatcaagaccaaaaaaaaaaaaaaaagctaagaaagggtaccatcaacaatctttacagaacttctggaaagtaaaaagcaaatggtactggcctggggaataaccaaagaaaatgaaacctcagccccggatggcaaaggtaagtgcaattcttccaaagagagccctgagtgaaattttaaacaggagtgaacaaaacaaaaagcagagattgggccctagagtactcatggccttatttcatttaataagttgcatccacaagcagtggaccaggaggatcctgccccctctcagataaaaaagagcaattggcaatggcagcttttgccccttggacaatggttctcaaacttgagtatgcaacagaatcacctgaagcacttattaaaacacaaatttctgagattcacttggaaaattccttattcggcagtcatggaatgattcacctaacaacatgaaagcatcctagaagctttgagttaaactattaaattatttgcaagaaaaacaacaatgctgccaaaacatacaacataatgcatgttaaaaatcacaggatgtcttattatgaagaacaaggcaaagatgcctacatttgccatttttattcaacatagtattagaagttctaatcagaggaattaggcaagaaagaaaaaaaaacagaaaaaaagtaaaattacctctgttcacgtatggcatgaccttatgtgtagcaaacgccaaatattatacagagggagagagagggagacaaacacatacacagaggtaatatacaaattcaacaaagttgctgaatacaaaataaacacaaaaatatcagctacattcctatatgctatgaagtaaatatctaaaaagggaactaataaaacaattcaatttacaatactatcaagaagagtaaagtacttaggaataaatttaaccagtgaggcaaaagacttgtacattgcaaaatacaaaacattgctgaaagaaattgaaggaggcataagtaatgagaagacattctatgttcatgaattagaaaacttacaattattaaaatggataatacttcacaaaagtgatctatagatttaaagcaatcccgatcaggatcccaatgatgtttttggtataaataaaaaagtctattctaaaatatatatggaatttcaaggggctcagagtactcaaaataattttgaaaaagaacaatgttggatgattcaaatttcctgatttcaaaacttacaacaaacctgaagtaatcaaaatagcgtggtaccagcataaggacagacataaacaaatgaaatagaatagcccaaaaataaacattaaacatataatcagttaaatttttaaaatcttttatttatgttcaggggtacacatgtaggtttgttatataggtaaactcatgacacagaaatttgttgtacagattttttagtcacccaggtactaagcctagtccaattgttatgttttctgatcttcttcctcccaccctcctccctctggtaggtcccagtgtttgttgctcccctctttgtgtccatgagttctcatcatttagcacccatttataag

SEQ ID NO: 1563679 - DNA, 4001 bp, Homo sapiens
tccacactgtagtgttatattctaggtaggggactagtgctcaacacctccacactgaggggaaagggacatgcaaggatggtctatttctatatggggtgataatagtgcctcttttcccaagtaggggattctatatctcatctaccctgggagaggtggtggggaagggcgtaaatagatctcaggagtctaccctggggaaaaggggcctgagaacagggattcttacctgagtgtctatatggattgagataagtacaaaatcttggaggagggggtaaaaatctgtgcctgcatatgcctggggtctataccttggtgatttgggttggggggattgccatctgtccctctactctggggtgcagagaaactggggaaacccacaaagtggctgtgtgcatctctgctgcatggggaaagaatcacagatctgtttatctctagattgtggggatgggtcctgcgtctcttcaccctggagagggctgtggtacaggatcgatatgcctgattccacaactatgcagctttgaataagcgggtctgcaccttacctgcagtgagctattctggacccttctatggaaggtggactgtgacaactttcatcttttatgctggttgaagtcagcggcacactaacactgaaagaaataggggctctggttctctgcatgggtggtgtgtggagggggctggcaatgcagctataaattaatagatcagccctaatacttgggggtgggggcgtctgtgattctaccctgggtggagagaaacagatctgagctccactaccttgggtaaaggggagagaccatacgcactgaactgccaggtaatcagcgatgtcactccctctcaacattacagggagggagacctgcatatctgctcctgtggggtatctcccttgctacatttagtgattctaaatctttgggggaggtagggggaggtagggggatgatctgtgtctacctcaaagggagaggaacacatctgagcccctctacccccacggcccctcaaggggcagacctgactgtctcttcatggattaaggtctgttcctgtttgcttcgaagcatgttgggtgcttcgaaaaattacacattcggtaaaacgggggctacggaagtagggatcaggtctgattctccacaatggggactcactctaacctaagaggagggggcaattggcttagttgtccataagctgaggcctgtaactgcaaccactttggggacgggtgagttggggagcgatactgagggctctgagtctacgcgtatggggaggaggtgccctccctctgtatattaaatgtttctaagctcctctatgctggtatgggggcagatacatcaaagcctctgtctgtcctgaggaggtgcctcgagacggctgtctagagccaagccaaggaagtgccttaagtcgggagaagtctgcgctgctcagctgggtggagggagatgtctctacacggttggggtggatgtcccccatgcctttggtgggtcgactcctgtctatacaaggtgaatgcagaatgaagcctcactatcttgaggacgatcaacgcttcaccacacaagtgaagtttgtgcctctctacacagtgtgtcccgggtctacacctttctaggtgggatggggcaatgcccctctcccggcaaactccactccgcgaaaaggcaattcggcgcgtctccacgtgtgccgcgatccctgcccctcttccggtcccttctaccctggaagggatcctgctgtttacctctctattccaggttggcgggcatctctggtttcacatccaatagacgatcctaactgcccggccgtctaggtgagcgcacattgtgagaaaagaggagagaagtttcttacttacacttccggcggggatctgagaagcgagggcaacacgacaactcggttgagcgagcagaaactctcgcgcagctaggctccgacttccggatcccaggccggcggcgcccgactccgcccaccgtgcggtctccgcgggggggggggggggggggcggagcttctgactgacagctcacgcccgcccgtcccttcttcgcgaccacgctggccccgcctcctgcctgccccgtagttaaggaaatagcggaggagggagaaggaggacggggaaatgaccgggaagaagcggcgggtcgactggtgcggccatataccttacttgcaagccaaaattttgtctgcgggcatctgtctggggttaaatatgcgtgctcccaaatctcaataaccaggcagtcaccacgcccgaatcagacaagggtgggggatggtgtctttgtctgcctggaagatggcgacagcagggtgtgagaaaatggccgcctgggtcacgtgtctggccgagtatttccccacctgaagtgaattggttagctattcccaaccaccttcccgggtccttgagccccagaccatccctgagcactcctagctttttctgcatacgttcagatctatggccatacccaacccgagctggagcaggagccagaacgactagaagcctctcccacactagaagcctctcccacccttttgccttcttcccctcctactccatccttccctcaatcccggagcagcgtctgcagaagggaatgaatttatatctctggagtggggcaagtaggggtttctgaagccatctcaaggagctggctgggaagtgaggtctcccccacaaaatagtaaatattagtctgcaaatgttttcttcttgatggtttaattccagcccctcctcttcctcaagcctaaaccctggggtggggcacagagtaggtggaactctgtgcctccgagggtgggtttgtttctccacttcaagcacagacgggctgaaaatgactccatctgtccctttatcccttacataaacaggactcactacctctctacatcgttggagggcttctaacctctcatcctagagacacatgaaattcctctggacctgaaaccagccctgaccactttcacctttccccctgcatttgcaattttgctctgtttctctaagacctaactcttgtcacttcgatgaaaccttctctgactttcgcagatgagttagaaacccagagcaccttacctatacagctaagctagcacttatcacaatactgtagttgtttatgtgactgtgtctccacaggagggtgaactccctgagagcaggggccatgtatcttcaagctttcaacaacacccagcacaagactggtatgaggcaggcttcaacaactgtttgttaaatgggtgagtttacaggcctgcaccacaaaaaatgggaaatgggctgtttagtagatggcattgggaaatttggctctccatgaaaagaaatataaaactggatctctatttattccacctaagagggtagactgtgaatgtgaaaggtaaaactatgaagttaatatatgcaggagaatatctttgtgacttgtgactggggaaggactttttaaacaaaatcccaaatgcacaagatataagggaaaaaatacaatgaaatcttgtggaaactagttattacgactttggaaaacaattaggaagtatccagaatagctgaagatgaccctgggacccagcagttctagtattggagatgattgattaataggtagatagatagatagagatcacctctaaactttaactcctagagaaattcttatacacttgctcaatgagcatgtggaagaatgttcattgcagaactgtttgtaatagagaaaaaaatgtgaacagcccaaaattccaccaacaggagaatgaataagtaaattatggtatagccatatgacagaatactatgcagaatactataatgaaaaagaatgaatcatgttgcatgcattgacccagctaaatttcaaaaacacaatactgagataaaatacaaattgcagaggacacataaa

SEQ ID NO: 1563680 - DNA, 4001 bp, Homo sapiens
ttgtgggtgctcagcctgtgaggaccaatttttacattaccaacaaaagcatgttctctagccttaacaatctaattaccatggcacttccaggggagagagattggccagttgtttcagttctgtggaactgattcataggttgccccttacagctcctgcacatgcccacgtggtacattattaacacttaacaggggatgaggtagttcgaccctcccttagagcgaaatcctgcaaagcaatatttaacatatgcgcaaatgcatttcagtcaccaaaaagggtgaccaattacctttgcaactaaacagcaggctcactcggctcttttcatcaacctaaagaaaaggctgagggcgcgctggctgcctaggtaacctcctaccagtgaaccctggctggcagcgcccacggggtgcgcatccgcattcacaacttggtccaaccatcgggcccgcctccatgacttgttgagagccaccagccaagttttggctagggctgctccccgatccctcggaagcgcgggacgcgcgcctcactggatgcctgagttgagaagagaccctggaggccacaaacgtctcacggttacggaatacaactggccgtttcttctcagtgcacccctgacaaattaacctgtttgaaaccgactcttcttgtccgcattgtcagtgtagcaatttggtctaattggattctaaggcgggcgttaggagcccaaccgctggacagtcaatcacgcagggccattaatattcatctgttgacagcggcagccctcggctgatgttaaaatacgtcgttacggcacgatctgattgtgcagaacaaaaggcaggcgttcagaaactttcctccacctgaaatcatctcccctttaggatccagcctgtcaagaaggcagatgaatttgggagggggaggagttaaatatctttggactcctgctccctgggccagcagcaccggttttaaagcgatttcgctaacctatataagggatgctgttttgaaggaaaaggttcagtctcctcattttggggaccctcttactcaaaagtttgcctcagtgtgtcttcacccgccactgcagactcagaaatctgtcctcaactttgcttgcacttgggcccgtgagcttaggaaacccaggctgggtaaaggcggcggggggtgggggtacgttggggaagggatggctggagctgtggtccagctaaggctgaaattctgacacgtatgtgcgagcaaggatggcaaattcatgaggcaccagctcggctgtggggcgccagttcgcagagacccgggaaaatagctcccaccttctcgcccttccaaaaaacgggcgctcacgagaaggcgatccccacggttcctcccgctcacaccttccctgacagcagcgtgagactgggggatgtgggctccgtccacacacaccctctctccctccctcagtagacccagccaggccccaggcacaccgaccactcccaagtgcccagctgcagggcgcacgactacagcccggcggggctagcgcgctcagggtacagccaccacgcgcgccttgctccccgctgggcgctaggcacgctcaagggacccctcctcacctggcacgggagtttctggcacccacttgagtccgggctgcagtctctggaagaaggagcggacttggtgacaggtggcgtccggcggcggcggcgggggctgcgcctgtcccgggaagtccaagctgagcagcatcgccaccaccaagcacgcggtgcgcacggtcccggccatcctgcttcgcagggagctaggagagcgcgggagagtggcagccggagcgagagcagtcccaggactcggcaagcctggcagtggccctgaggagcaagagacgtgctgctacccagccgctgcaaaagtttcctcgcagctacctgggcgctgggcgagggcgggaaccgcttggcggcgcggggcagggcggggctgactggggtggggcggggcgaggagggacggggcggggcgaggcgagccgcgcggccagggggcggtggcggttgtgcggccggtagccggcggggtgcgggggcgcggcgtggagcgcggcgggggccactggggcaccgcggcgcggggaccgggcgaaggcagtgcgagaggagggtgcggagcccgcgcggtggctcccggcagccgagcccagctgcccgctcgcagccgctctacacagggcgctctggcataactactgcagaggggctgcaggctcgagcgcgctgattggcttcccagcagccgtccgctctgactggctctgggagaagttccccagcctcactcctccttcccgccgctcattggcctacagcctggagggcttttccctttaggatttttgtctccttttcatccttcctgggggcaggtgggggtccctgacttaggtccccctccgcttcgccacaggccttctttcagcttgtgccagctctttcctggccaccagagccacacaaggtgttccttcacacaaaatccacctcctcattctactctctgaggagcttcccgggaaccgttttcctaacgcagctctgaccgggttctcaaagccaacctgcaaatagtcgcgttcagggacagccagggaccgctgggcttttcacagcctgcctcacctttgaatattgtatcttaaaagtctgaaagcctctgtggcttgctagatttgattcagtagagccacacaaagtcagagaaagcacctgattctggggcgttaaaagaaaatctactgcacgacagtcccaggtggcccttcaagaggcaaagcctaactggttacaacgaaataaccaggggcttaaagccagcctaactcattagaaaatcattacacagcaaatttactgagccaaagctagcctatttcatagatggagtagaaggctatttgaaaggtatcctacacccaaatcccacctctcctgcttagatttcaccattagaaatccagttctttaggccaggcacggtggctcacgcctgtaatcccagcactttgggaagccgaggcgggtggatcatgaggtcaggagttcaagaccagcctggccaagatggtgaaaccccgtctctaccaaaaatacaaaaaattagctgggcgcggtggcaggcgcctgtaatcccagctactcgggaggctgaggcaggagaatcacttgaactcagagggcagaggttgcagtgagctgagatcgcactactgcactccagcttgggcgacagagtgagactccgtctcaaaaaaaaaaaaaaaaagaaaaaagaaaaaaagaaatccagttctttgagaatgaaatatctctccaaggaaaaatgcatttagtcattacctatatgctgctaagtagggatctttagcgtggattattttcatgatcctccacaccctagtccagtagagaactcaataagtatttgtatgatgaaattacttaacacctcagcatgaattagtttgtcatctgatggttttgtttccgacctaggtgaaagtaggttttgagggagaacctcagcaccaggaaattgtctggggtgtgcaaggtccggagagaggaggttgtgttccaggacccatgggctgagaagggagacaaagagagaggaaggtcacgggggaagttcattcatccatttattcattcggtaacaaatatttgaactcctactgtgttccaggcactgtagattacaaacagacaatgaggatacaaagattaaccaacccgtggtacctgacctcaaagaactgcaaactaatggggaaaacaaccaagttaacccactgtgtgaatgctaagatgaagttctaaggggtgaagggggggggggatcggagaaagcatgccagaggagatgatgtcctaaactcagaccagtaggagtttaggtgagacaagcagatggggagaagggtgctg

SEQ ID NO: 1563681 - DNA, 4001 bp, Homo sapiens
tcagggctctacaaccaataaaatcgtgccgctttgaggacatacttgagctccccaaaagacaggcagctgaagggcaaacagtgtctaatcagtagtgagcatgttatttggtaactgccaaggtgcagtgggcgcctgggctgctccaacaatttcttcgcttctatttctagacagacgccagttacactccaaaagtgcccagcaacttccctcaattacctttgtaattaatatgtaattgatgactgcacttaatctccaaggttattaatagcccttccaaaaaatgacccccaaatcttcctaagcctttggaagcgcctggttgaaattacagtatttcctttgctggctgccggccccctgcccgccccacccggagaccagcacggcaaggcaaaggcgcgctccactcacttccatgaaaggttcggagtggaggctcagccccccccccgggctcgaatctctcactcctccgttagattacgctggccaccagccagctagattcgtggtgctttctgagcccccagggcgaacgggctacctgcgcggccggcggggctgcgcgcaacagttggccgctgctaagaagacagtgcgacccggaggggacccggccggacaccgccgccagcttcgctgggagggacgcagggcacccgccgaacgctgcctccccagcgctccgagaggggctttcacaaatacccccatacaccccccatcccaccccaccggcgccaaaatccggtgaactttctcacaggctaagccgtctctatttgcataaccatctccaaactgagattcaggtttcctgtaatcagtcctttcaaaggtctgtaattgaaagtgcaattaacccttaaaatgaggtaagaaaaaagaaagaggggaaaaatactcctctggtctgataccttccggaaagtaggagagttcccaaaagtcagggtttggaggggtggagagtgggggtagtcgtttgctttttaaaggcgacttctgaagcggttgcggctactaaaactcctaatccttgtcagcggtgcaagagaggcggggagagagttttaaaagaacatcaatgaaacatcaattcaagttccacgttttgcgacccccagaatctagcaagctccgggacgtttccctccaccacaccccactggcgacccccacccccacccggcctctcctcacccatacaacaaagcggggcgtcctataaggagttcaacccggaaaaggagaagtagccggtgacacgcactttgagggccacagtcctcaggggcttcccgggacggcgaataatgcaggggggagaggaggagcggaggcggggagcggagcgcgacagtcgcactgggcaacccggcggcgcccctccgctcgcagtgctgggaaggggggagcgctgcgcccgcggggaacgtcctgcgcccgggctgcctggctctctcgctcgctcgctcctgccctctcgactgcccatttctccctctagtgtacctgcgtccggcgcagggggcggcggggcgggggaagggagttgcagcctcccttcccgaagtgtcggtctctgcgcccacctcccgggtgtgcccacctaccgttgatctcgtggaggggggcatcgttcttgttgaagcctttggacacgtaaagacgtcgcacttccgagcaacttttcgacttgagctcggcagccagcagcgcggcgctgagcactgccagggtgcagagaagcgcgggcaagccgaaccgtgccatggtgcgggccggggcggacgcgttcccacctttgggaccggacgggaagcggcgctacggcagcgggccgagggctggcggagtcggggactagcgagtggagctggagggagaaggagttggagttggtggaagaggcgagcaggcggaggagacgcggggcgaaaagtagagctgggcctcgcgtcaggcaacggtccccggtgccaggcgccgggccaggggagaaggagggcgtggaggcggcgcgcggcccagggaagcagaggcgcgggctggtgacctcggggtttcgcggggcagcgaacccggcaagctgactggccggcgaggcggggacgcggggaaggagggaagggtggcaggcgccgcggggaccgcagagggtgtgggcggcggcgggcgttcgctgcgcgctgcttgggctgccctgcgctggtccgctcgtccggctggactcggctcggctgactctgccctccgccgcgcggctgtgcccttctcagctctgccgctgattgactggccggcgtgcgcggcgacgctccgcaaacttggccaagcgggcggcactcggggggagggggcgggcgtcgtgggggggccggagacaggcgggagcacgctgggccgggccgggagaaaacctggaagccgggttggatccggagcggccaaatccacttcctagggggccgcaccgggcgcccggcgctccttcgcgtgacacgccccacccggctcctccttcctcccctcctcctcggaggcggggagccagcccaccgccccccaaccacaaagggaaggccaactactccgggctgaagggcccaggttctggggaacgggacggcctgggacttgtcccgaagcccatgtctgagccccaggccttcttgcgcgcggccacctgacccgccgcctatgggcaaaagccgcgcggagccctcccgccgcgatatccgcctccccgctgccatcccgcacccgcggacgctcctatccgcgcagctcccgggctgggcggggaaggcacattactcgcattgtttcgctgcaggcagcagggggatttggggctccgagctcgtcctagagcctcacctggtctccccagacctgcttcccataggacggtactcgtgaaacaccagtttgtccaggaccccatcaggcatcctccttcccgcatccgcaacactccaacccctcgacgccactcccacccccgacccggttctactacaagtctaaccgaactctgaagcgggagaaacccccaaccgcgaggtgagggggcaaagacagggttgaccgcagagatcttggagaccatttggcccaacccttccttctattaagggaactggggcccagaaatgggaagcgacttggtaaatagcacgccggggaagggggcgtccagaacccgggactcttgactctcgaatttcatggaataatggtagcccaggactcccaaaccccctaccccctcaagccccttgagagagactgacacccctctgggactcagtccccacttttccaccagaaaactggaaatgggagagacttcccatcttgcaagctttgtcagattccattaatgagtgtttttttgaagctcccagcgctccttaaatgaagggaactgtgcagctcgggaacttgtcattaccgttgttattgttacaatctgctttaagaggttgggttgagaagtgcctcagacacctcgggagtgtgctgggaactgggcagataaaaagggctggaacttattatttggctagactctcaattcccataaaattacatagggcaaagatacgaaccatcattacagttatcaccctcagagggtttgttgagactttctccactgttgtttgtaaaccacgttgacatggctggctatgaggagctgttattttgaatacctgcttgcagactcttctacattttgttaacagactatcaacatgaacagactgtgacccgtctataactgtgacttccaatttctgtgggctggctgaatatttaactctgaaactaggagagcaatttttttaatgtgcaaactcaactacaattgaatttcctgccattttcaagactttccttaaactggtaaccatcaagtcctgaaggcattgctagggcttagctgagcacttttaattttcattgattgatacatttac

SEQ ID NO: 1563682 - DNA, 4001 bp, Homo sapiens
ctcactaaaccctacttatccttccagaccactctggtctaagtccccagcatctctagcctggactactcatccccttgcttccaccttcactaatgagtctgttcacagcttccagagggatactgtcaaatcataaatcatatttcatctatgctcagggcttgtccaggctctcatctcactcagagtaaaagccaaagtcctcacaatggcctacaaggccctgcctggtctagcacccccatctcctttctgacttcgtctactaccccttccccttactcattccacttcagtcacactggtctccttggtgttccgcaaacactttaggcagtgtctaccttcagggcctttacatttcctgttccctttgctgcacacctcattcagataatcctaggattcaagtacgtttttagcatccagatacccagattcatttggtaatgcttccaaaatgatgacaggagaaggggcaggtggcgggcctctagcacacacacagactttccctgctacgtgcagggacacagcctggcggacagggcaaagaaaggctggggcaggagggggacaaggggccagctcactgtctctgcccggggttcgctgtctgccccttccccgctgggggtgcatcctttctggatcatggggatagcgagcgtggggtcgacacccgcattctctctctcttccagagacttcttggattctaaaggaagaataggagggagcaatgaagtcccactctatccttccaccttcttcctcttcttccttcaatggggaagggtaaaggggtatcactcacccgcaatgagctccttcacagcctgggacaccaccccatccgccaaggccccagtatctgtggatggcccagggggccgggctggtggctgcctgcgatggccattctggatcaaagggatgacgagttccttgggggcctcctggggcttcacactgatgtggacacagaggggtggggttgggagaatggcagggtcagtgggtcacactccttcattcagagaaaacacaagagccaaactcaccccagccccacagaccatgtcttccctactccatgtctggatctcctgttcctctctgatcgtgcattctctggattatctccccagtgcccccaactcataaatgtcagtgccttcgagaaataagtcctgcactctctgtttaactcaataccggcttctacaatggcccacaaatcactatcttcagcccagaccttccccagctccaggttcccaaacagcttcctagatgcctgattctcttctggaaatccctccctcagacccctcagacactcctctcctcattaagctgatggtggcctccatcaacctgaatctgccgctccatcccgttccccatatcggggacgcctcagcccttcagttgagacactagcaggtcctgtcattttctcattctttccttctcccagaacgcacagaccttagtgtcttcaagtcctaaagacacttcttctcagtaatacatcctctcttcgcaattcccacagctatcaggcccaatttcctcaccccctcctataaactcccgccttctggcctccacgaatttactcaggctgtgcttcaggcttaacaggtcactgtcaccaagacaaacaactgagattcctccctcccgcttacgcccaccgcagagatttccaaggggtgaaagacccggcgcgtcacctctgcagctccctcccttccacggttttcaagaaatccttctcctccggagatggccccgcgccgtctcccgagtcggccagccgcctccgtgcggacgtgcgagtgaagccgaatgaaattggggcagtggaagcagccgtcagcggcaaaacaccctctttggagtcagccatcttgctccttttcccaggccggcgcgctgcttgctgggaaatttagtttgggttcagatcgctaggggccggccaaagtgcgtaaaaactaccttcccatcaaccactgtggcaccggcgggagggggcggtaaggggccgtgggaagtaattgtcgctctttcaaacgtggtgggagcgcgtcgcgccaagcgcccagggaaatgtagttttttttttgtttgttttgttttgttttttaagatggagtctcgctctgtttcacaggctggagtgcagtggcgtgatctcggctcactgcaacctccgcctcccaggttcaagcgattctcctgcctcagcctcccgagtagctgagactaaaggcatgcgccaccacgcctggctaatttttgtatttttagtagagacggggtttcaccgtgttagccaggatggtctcgatttcctgacctcgtgattctcctgcctcggcctcccacagtgctgggattacaggtgtgagccaccacgcctggctggaaatgtagtttttagcggggtaggcatggtggaaggtggattcattcttgccagacattaatcttccttcgtgtaggcgtttgacaagtatttatggagcgcctaatgtgtgccctacttatgtgggaagtgttgatgaagtaaatcatttagaaataatcagctgggtgtggtggcgcgcacctgtagttccatttactccgcaggctgaggcaggaggatggcctgaggcctgggaattcgaggctgcacttagctcttatcgcaccactgcattccagcctgggtgacagagcgagaccccatctctaaaaaagaaaaaggtcgggggtgggggggatggagcgtcagttgtgtacaataataaataatagacataaaataaataatagacataaaaaaccccgtctctactgaaaatacaaaaattagaggggtgtggtggctcatgcctgtaatcccagcattttgggaggccgaggctggtggatcacctgaggtcaggactttgagaccagcctgactcatatggtgaaaccctgtctctactaaaaatacaaaaattagccgggcgtggtggtggcgcctgtatccccagctacttgggaggctgagacaggaggattgcttgaatccgggagacagagtttgcagtgagccgagatcctgccactgcactccagcctgggcgacagagcgagactccgtcttaaaaaagaaaaaagaaagaaagaaagaaatagtgcctattggccaggctcatacccgtaatcccagcactttaggaggccgaggcgggcggatcacttgaggccagtagttcgagaccagcctggccaacatggtgaaaccccgtctctactgaaaatacaaaaattagcggggtgtggtggcgcatgcctgtaatcccagctactcgggaggttgaggcaggagaatcgcttgaacccgggaggcggaggttacagtgagccgagatctcaacactccggcctgggctatagagtgacactcagtctcaaaaacaaaagaaaaacaaaagaaaaacaaaaaaaaaaaaaaaaaaaaaagaaaaagaatagtgcctactgatgtcagattttaatactcaacaaggcactagattcaaatatcaataaaataggctgggcacagtggctcatgcctgtaatcccagcactttgggagacctaggcgggcggaccacctgaggtcaagagtttgagaccagcctggccaacatggcaaaacccaatctccactaaaaatacaaaaattagccgggtgtggtggcacatgcttgtaatcccagctactcgggaggtggaggcaggagaatcgcttgaacctagtaggtggaagttgcagtgagccaagattgccccactgcactccagcctgggcaacagagcgagactctgtctcaaaaaaaaaaaaaaagaaaaagaaaagaaaaagaaaaaaaagaaacttgtagtctagtagggaatacagacatttaaatacatattttaaaaatatagcaacatgtgccgagcttagtggctcacgcctataa

SEQ ID NO: 1563683 - DNA, 4001 bp, Homo sapiens
tgtggagccaacaattgtccaaaacacaaagtacttccttaagaacaggtctctggctcgggcctttgcttcatgagaactgcacccaactccacacctgtttaaaaatgaagcccaccctacccctaaatcagtccaaagtattgtgaaagctgttctggagaaggtccccgtgtgataattccacgtacaaatccaaacgcctagcgttaaattaaaataacgatttcagaaaaagtagttgatgctttcctcaataccacacttgttcgtaactgtaacatctttggtggcaattatcaccaaagtgatcacaggctgagtagcagtcatcctctgagcctcattttgtgtatgagcctcatttaaaacggaggttgaatggtttgactgctcacatgggggacattaagagaagtaggaacctgagttacaggccactcgattctgccctttctagaaggatcttatgctagttcttgcctttttagaaagaaattttcctgttggatttggtgggccttatctcctttcatattttgatcacctagtaaattttttaaaaatgtaaaccagaaaattatttgagcttcctttgaaatgcaaaaaagtgccccctttactcctcaccaaaattttaatccgtacaaaattatcgcccccccacacacaattaatagcaaagataatgtgaaagagggggatgaatgattaggggaagcggaggagcgggcaagcaattcccaagccctcaccattaactcgcaatggttaaacccactgacgtcctcgttaggaatgctcttcacagtctttgtggcttgtggctggagtctgtcactagagaaagataacggagcaggaggagaaaaaccctttcccaagcacagctgtcacacgttttcaggagtgctgcggaatgaggctgatttccacagcactctttacgagttttcctcccaatacagagtccccacttaaagacatgttgctgacggcagcatttcagggtgttaggaagtgacaaaaagaatcctacagccgccttacaccagcctcgggccaggttggagatttcagattttaaccctccggagctgagccttttgccgttgctagtcgttcccccgttgcattggaacccgctcagcacaccgcctccacctgcacccgggccgcattttaatagttggaacaagggacaaagaggagagactcagcctccgtcccatgctgtccagagtctctcctgtcactttcctggtttcaagggtcatggtttcgaaatgagctcccggaagaccccaggcttggggaaccgggtgtttgtttcgcgcgggcttaaggagaacagaagcacggcggggcggggcggggcaggactggactgggagctcgggcgacagggagagcgtcccgggaaacaggcaagaagcgactctctactggccccttaaaataaagcactagcccgggacgcgccgtctgttctctctgcaacccctcccgggtacccagctcttaggctcccgcgagccgcacgtgcgggggtgcagcctggccgcagccggagcggggaccaccccccccacaggatacaacagggaagcgcacctgggcgttccggacacctgcgccgcgcccctcccacctccagcgtcccggcttcgtcgcagaggtggccgaggaggcgccacctgagcgggggaggggcgggaccctcggaagggcgcgccctcccggggcgggggcgcgagaccgtggccgtggcgcgcagccagcgcgctcgcttacccatggctggagactggcgggaggggtgagggctgcggggcgttcgggctccccggggacgggcagagccggtggcacaagtttgcaggtctcgcgggcacgtgcgctgaccgggcttctgcgggctgcgctgcgctgcgcggggctggccgctggctcctagctcccggccggggtgggagcgcggcgcggctccgcctgcactgggggccggccgcgcggagaggggccctgacgtcagcgccgggggctttgtgcgcccggagctagggcccgattgggggcagcgggcgcgcggagtctgcaggcaaagctcgcggcttcctctgggacccccccgggcgagcgccgagggtcgcgggaaccggaaaagccagcgagggggatgggtagagaggggagtgggcttctaggatcgcggaggcggcgatccgcgtcccagatgaaaactattatggcctggggaggttggggggagcggggggctttgaggtcttagccacacccgttgtatagataaagaaactgaggcccgggacactggaccaagggcacttagtacttagcgttgcctcaatccacagtctcagttccttttgttcagatacgagtcgttacttaattcagtggtctcaaccctggctgcagaggagaaatcagctggggagcttctggaaaccggatttcatcatggcctctgcgggtgggacccaggcatccgttctttaaaagctccccaggtgattccaatgtgcatccaaggttgcgaaacattgacataagtaacttgtcggtggctaatgacttagaaagacacaggtagcaccctccaatctagagtggtgccagatttgctggtgtccgttatcacccctcttgattcctggaagtccacccctggaaggctcttggagactttgcaggctagctccagtcaaccatttctcccgctgctcaggcctcgcgcttgagcctttaagtgaattaaatggtttaacagtgtccagggcttaaattccttctgtctccttagagaattttcctgtctccaaaggtattagaagagtcatgggacccttgcagtttttgtaggactaacgctctctgtgacatttctgagcctgatgttcccccctgatattttttgttgtgttcttttattgttctgaaaatacatcatgttatttgaacagagggttacataaacagtgacaatagatagtacactttagggacatttaagccaaaagagaggctttaggactgagaaaggatggaggaggcaaacatttcatctattgaaatttattggattaggaaagattttatcaaggcagagctctagaaagcctaataatattttacatgaaaggacagagatttgtgctaggcggatcagtggctcattttcacaatcccacgggaatagtcatttctaaccaatcttcatgcagtcataaaacaacagggagctcataggtataacttgttgtcctcctgttaagaggaagtaatccatttgcgccattcctgagtgcaagtgtatgtaggaatccaacaataacagaggctgcctgtaaggtagaggaagacaaaggtggactgggtgagagcaatgaggaattcatgctaagtcctagttgagggaagggtgagtttggtcggttcctacatcttgagggtttcctaggagaccctgaaaacaacagaagggaactcaggcatgaccatctgaaatagtactttggcaagacatgaccttaatgagcctctctggaacgaggaactctaaggttttatgtactgagatgaaagtaaactccttggtctactttctgtcattccctagaagtcttacgtttttttttttgtttttttttttttgtcttttttttccccaaagaaagaacagctgtctaaatattggagctagccacaatggatgctgtgataaaaactgagttctaacaattgtgtatacaatcaggggaaagccacattttaacagaaaattttcctcactttgtgagtatcatggattgatttcaacaagcaattgtccctaaaacccttaagaaaaaaaaatagcatttgggaaattagtgaaggctgctatagacgatgcagatgatggctagtaagtatatttcatttcactattattcaaagaaatgctatcttaaaataataaaccatttttctcaagt

SEQ ID NO: 1563684 - DNA, 4001 bp, Homo sapiens
ttttgcaaagaccaaaacggttttatctgccatggttgaataccacattaataaaaattaaaagtatgtactaagtaaaatcatcattttaggataaaatcgtgataggcttccttgggacaatgctattacattatcataccccgacaacatgcaatcaacttagtctctagtcatcatggaaaaaactttgatctcacttcttcatcttgataaatattcccaagagcttctcttatagctatttggtcattgatgaagattttttttttttaaagacacacaagaaaatacaggctgggtttttggtggggaggtgtagatttggtaagaggattgaactaaacaaacgattttaaaattaaggtgctatgtacttaatgccactgaatcgtatacttaaaatggtaaattttatgttatgtgtattgtgtgatacctaaaaaaattaatttaaaaagtaaaattgctctgtttaggataaaatattattgtgtaccaaagaaattttatataaaaacaagcagtctttaccccagcatactgtgaagctgaagtacatgtaattgccgtttttgtaggtttaaaatggttgactatcagcaatttcatatggttcagcctgtatctttataaataaaacgaagttttgtccccgtactggcgaattactctttagtgactatcagtggacgcaagggctgtgagaaataaccttagcatgatggctttttatattagagccactgcggttacagaatatgtttttgggcatttatgacagtctatgactttgagtgagggaaaattacaatgcagtgagatccattaacctaacagtggctgagccgattctatgggacatcaaacttgaaatcagtcattatttagaaaaaagagattaattttagttcctttctgccattttcttactgcaaaaacactttattctccaaaaaaccattctgtatatgaaaattgtggtacgttctaagattctctttaagaaataggacctttatcaattttcttccccccagtctccaagtcataattagcagaagatcccccgccctgcctttccatcagcactgggtgacagagctgatgtcccctctctgaagctccaactgtaaatgattattacatgtcgtagtcagggcctgatacaagaaagagcaatcatattagaataagaaaattagagaatgcccaaatcactacagcattagcggaaccaaagcagaattaacatgcatgcccctccagttcctcctcagcattagcagaaaactacacattccacgttcctggaatataacatgcaggacacaagacctaagttacgattaattatattaataaaaaaagacagtttccccaatgcatcagcccaaggtgacaaactatagacatccctctatgaaatatcacgtcggtagaaagatttggaacaggaatggattgaagaaaggctgctctattaacttaacatcagcccacaggaaaaaaatcaaccctgaaagcaagaccatgccatagggattgtctcagagccattttaaaagagagacaaaacccagctaaccctttttaagcaccccccagtgaaaagctttaaacaggctattgtcagagcgctgggtaccttttctctcttggctttgttcagtattttcctcggctgcagtttccatggctggcttcataccatccaccaaaaatgcttttccccctgttccccccaacacacacttgtttttcctcctcttccttttcttttggactcccctccgtctcttatttacacccgtctgattgagaggctctgttcttcactacagtagattacagtcccttccaagatgcaaaagtcttgtcagcgtcaatttcgctctgcctactggtccataaagacagctgccaaggggcaggcagccatacgtcaccgaggatcccagttagaaaacagccattcggcgcccggtggtgcctacagtctcaatgcggctccagtgggagttgggggtaggggggtgggggagaaggacctgctccccaccgggctcttcctccttgctctctttcttaagatctcaatctcgatctctctctctctctctctttctccccacctcatttcttctagccaagtacacccaatgaatgctaattaattctcccaggaaaaaatagatttgtgacatcagaggaggggatgtgaaggagaaagaaaagagccccctcccaccacgtgactttgttggtcgacagcaatatatgtcgtctctaaggagaatgcatgtctttgcataggcatgacactttctttcctgtgtggtccatttatgatgtatcagtttatttcatttacccctcgaccctggcaaaacatattcaaaggacgtgcccatagtctctatttactttcttaaatatttgtctttcatacaatttctagataagtacattgctttttaaaaatataaattaaagagggggagaaaatacattagagggaagaaaactcaaacacggatttaacgatagcaatgtagcaatttgttattagaacccactcccttgtctatagttaatatatatgatagtaagagaaactcaagcctaatttgtaaaaaggcacccttccttatttaaaaataagcataacatgttcacaagtatatcgagctgacattttggtagtttcttggaatgaaaatcaaaatagttttttaatcggatatggttatttctacatggagttttactcattagaattcctcactccaaatcgaaggggtgttttcaagagctctctaaatattcaacataaaggctagtataccaataatgatttgccttcttgcatacccagataccatgaggccaacattctcaacccataccaacatataagcctttatcatgattatgagccatgtttccaagcatcactaatttctgcaccattttttatgcatttggctgaccaactggccttcgccgtccctataaaaaattagagagactcaagtcaaatacagggatgaccactgataggattcccagatcatgaatagtctgctagttggttgggcttaacacttatcttggaagcaaacataaagacaagttggagaccaccctctcctaaaatcactctcctaagttttgatggtttcttgctcaactccttgaaaaaaaagtataaggtactgaatcaaaatcttctaaaaacctgatcttttaataccttggttttagataatccctcaaaccttcttatatttagaacttctagatgtgttacagtcgagaagattttgaaaaccagtttagcttgtttcaacgtttaattttacatcttgcttttccctttaccattgtcttagaagaccacgcccacaatcaaatatgtattccctcaaattaaggccccagccaattttattgtctcctggtcaggggattgagaagtatggcagcctaaaaccacagactttagaaaaaagattcgtttgtgatataattatttccatgggaaaaccctatggtgtgtccggataggacagtcttagacattttttgcaaagactacttaggtccattcaaatatagaaaggtggcaagtgttggtatgtaacaggcttgctttcccagcagttcaaatgagaattaaaaccaaaacaaaattcaattcagcacaaaagaggacactgtgattagctgttattggtttttaaagtgtccagcaaaaacatctgattatagaaccagcagatcctaataattttttggctgttgcttaagaatattattttaatagtgatgctggtgaaaaggcagaatatgaaagacattcttaatttaagaacaactctagttctatatcgagatcaaaaccattagacaaaatattcacacatcctccagttgatacctgcatctactttccacctgaaaaactacatggaaatgagcaattcatcacttttgcc

SEQ ID NO: 1563685 - DNA, 4001 bp, Homo sapiens
gttctgtttcttgggctccatgaatgatttggtccattgcctttctttcagttgaacacaagctgtagctctggcccatgagctcccgacccgagggccgaaaagtccttaagttcacaagcatcatcttccctttccttcagagctaaagttggcatgttgtagctctggaaaagatagaataccaactacaagtccaaaatggatagcccttgttgctttaagaaatgtagagcctaataatctttggggggaaaatttcagtcagaatcctcaagtccatgcttttacggaaagaccccagttcctgcctcttctatatatttatctaccttgtggtgaagagcatgtgtgtgcaacacctttgcctgaaatggtatggtttggcattaatgaattgtgggtccattgaaaagaaatctcctcttgtttctcgtgttatggacagttcaaggtttgccttagaactaacttcaaggaaaagtagcagaatcgtaggaagggacaatcttgccttcagtcccaccctctgttccgggcaggtctgggtggctatcttctttcgggggcttttccttgcagaagaacttcttcagcatgtcctggatttccttcttaatggtcttgtgcatgtagccatagacataggggtggatgcagcactgcaggaagaaaagccagatgattatggtgatcacccactggggtacctgggtttcgacatccacccacacggccaggactgctaaaaagcagtagggccccagggatagcacataggagaaaatgatgatgaagatcactttagcagctttgcactggtagcacctgggcagaggagggttgctgttgctgttacgacgactgggtgggaggctctccgggatgttcactgcctcgacgtcatcctcactgaaattgatgtcgtcttcaccaaactccatgtcatcttcacccaagtcaatgctgcactggttgacctctgtgcgacccttgtctgccttcatgctgttctcctcaactttggtgctgccttccttaccctccatgctgccgtcgctggccaccgtgctgctctctctgacctcctcgctgcccctggcctctacactactctcactggtccccgtgcttccttccttggccttcaggctgccgtccttggcttccattctgccctccttggccttgacctcaccttcatgctggcggcgaaactcactctcatcctggaactcctccttcttctctgctccctcttcatcctcattctccacacagtccttgactcgcacttccaagctgtgtctcttgacattgtacagcagagcatgctgcctccgggctgcacagaacaccacggagtagcaggcaatcatgacaatcagtggaatgacgatgaaggacaccacgctgagaatagtgtagctggggctggccccccagatcatggagcagagagcattgcgctcatcaaaggcagcctggccccagccgtagagtggaggagtgctctgcaggatggccacaatccaggtgccatagaggagcaggtaaccgcggcgctgggtcatcttggacgggtaggagagagggtggatgatggacaagtagcgatccactgacaccacgacaatggtgttgacgctggcgaaggcgaacaggtgggtgaggctaaccagggccgtgcagaagtggctgttgaggggccagaagagaggcacagaggtggccaccacccagggggccacgagcgaaatctgcagcaggtcggtgacgaggaggttaaagataaaacggttggtcacctgcagcagctgcggcttgcgctgcaacactagcgccagcactatgttgccgacgaaagaggcggcgaggaagataaccagcacggttgagcggatgatgccgtgggccaggctgatgggcattttggagaggggcatgcacgtgtggctgctgttactctcgcgcgtgctgttggtgcaggtggacgtcatggcaacagccagagggcgtgagacaggttgcaggctcagtgccggcaccggtgggtggcaaaggggtgcacagaccgcactcagtgcctatgctggtgacaaaagaaacacgcaggcagagttagtcacccgtcaaggggagaagcctccgcgcccagcaaggacgctgcaggaccccctaccccgggtttccgcacggctccatccccagtgcgggcagcttctatggctcctttccggactctccagatctgtctgcctgtctctctccagggctctgatttcctctcatctgtttctcctgctggcgcgtgcgtgcgtgcgctttctctgcttgtctctcacactgtctctggctccggggagttttggtcgctagcgctagcgcatgcgcgtgcgctctctgtttctgtctgtttacgaccgtcagtttctgtctcttctccagtgtctctcgctagcgcactttttttctttatctctcgggttgtgtgtctgtatgtgtctcaccgtttcctgattctttctcatccttgtctctcacttatgtctgtctctgtttctccgtctctcgatagcacgtgcacgctgtctctttcctgttactctcatttatctcttccactctgtttgtcactcagtctctctgtgtgtgtctctttcgctagcgcactttctctgcagggcttgcgctctcgctccctatctttctcacagtcttgcccgtctctccctcagtctctttctgatccattctgtctctctgtgtctctgcctgtcactgtgtcgctcgctagttcatgtgtgtctccgtctttccctagtgctctcttgtctctccatttctctctcagtctatttccccagcagttcatctttgtgggtccctagcgcacctgttcaatgtcgttcgctgtgtctctgcccgtctccgtgtctctccaactctcttgtttctgcgtctccctcgggttctctgggtgtctccttctgtctctcactggcacgtgtgcgcttgctctgtctttctcggaccctcttgtctctgtgtctctccgtgtggtttctgtctctccctgcctaagttctctctgcattactctgcctctctctccattgatctctaacactctactgcttgtctcacctgtctctcaagctatctctttagtgtgtgcactctctcgttggtttctctgtccttcactttcctgtcaccccaggactctggctaaacacttgctttgtatctttgagtgtgtgcgcatctctatttctctacatctttttcccatggcccctcaccttggtttttctctggctggatctctgtctctttggatctctgtctccctgtggactttattttgccgtggaaaccacctgccgccccggccaccgcgggctttggttaaaaaacccttagtttatcagcagtgcaatggagactggaaaatgcagagaggatgcctattgagctcccctaccctcaccctccacagccccatccccattcccaatttggcatcctctttgctttctccggatctgcttggtgtcggtgacagccgaggggagtgggaaaggagctggggagaaaggcaaaagaggcaggggtgcagggtggtggagagagtcagaaaggcagggcgagagagactgagaggcagagagacaaaaaggaaatgagagacagcgaaagaatgagatacatacagagagacagagagaatgtgagcaacagagagggagaaagaaagaaaaaagaagaaatgggagcgtgagagtgagagagaatgagagagcaagacagactgggagagacgcagacagaaaaagcaaaaaataataagaaaagagaacaagcagaggaagagggaaaggatgaggaaaaaacgagagaatggagaggaagggggaaaagaacgcacgagaaaaagtgagagagaaaacgcgagggcgggaggatggctagggaaaggcgagaaggggccgcaccgc

SEQ ID NO: 1563686 - DNA, 4001 bp, Homo sapiens
tctgaagccatactacatggttttcctaatgtctcactgcctcagcttcctcatctgcaacatggaaatgatgatgatgatgatcatgagttaatggtgatgatggtatccacctctattatttgtataaaatcaatgagataatacatgtaaagcacttaaaacactacctggtacgtaataaatgctttattaagtattagctattattacctgttcttctgcaacttatttttcaagcataacagtattcatatagtccgcaatcatttgagtgcccaccgtgtacaggcaacaccctgagatgctaaggattcagcagcaaacaaaacagataactctatctcccctcaaaaagtttctgttttaaagttggaacaggtcacattaatagatatgagcccagtaagcaaagattctgcatttaatgttgcagctgggggaggtagaaaaggctctaggcgttcacttatgatttggctctctgtttgtctgttattggtgtataagaatgcttgtgatttttgcacattgattttgtatcctgagactttgctgaagttgcttatcagcttaaggagacttcaggccaaattatgagtgaactcccattcacaatcacttcacagagaataaaatacctaggaatacaacttacaaggaatgtgaaggacctcttcaaggagaaccacaaaccattgctcagtgaaataaaagaggacacaaacaaatggaagaacattccatgctcatgggtaggaagaatcaatattgtgaaaatggccatactgcccaaggtaatttatagatttaatgccatccacataaagccaccaatgactttcttcacagaattggaaaaaaactactttaaagttcacatggaaccaaaaaagagcccacattgccaagtcaatcctaagccaaaagaacaaagctggaggcatcatgctacctgacttcaaactatactacaaggatacagtaactaaaacagcatggtgctggtaccaaaacagagatatacaccaatggaacagaacagggccctcagaaataatgccacatatctgcaactatctgatctttgacaaacctgagaaaaacaagcaatggggaaaggattccctatttaataaacggtgctgggaaaactggctagccatatggagaaagctgaaacgggatcccttccttacaccttatacaaaaatcaattcaagatggattaaagacttaaatgttagacctaaaaccataaaaaccctagaagaaaacctaggcaataccattcaggacataggcatgggtaaggacttcatgtctaaaacagcaatggcaacaaaagccaaaattgacaaatgggatctaattaaattaaagggcttctgcacagcaaaagaaactaccatcagagtaaacaggcaacttacagaatgagagaaaatttttacaatctacccatctgacaaagggctaatatccagaatctacaaagaactccaacaaatttgcaagaaaaaaacaaacaaccccatcaaaaagtgggtgaaggacatgaacagacacttctcaaaagaagacatttatgcagccaaaagacacatgaaaaaatgttcatcatcactggccatcagagaaatgcaaatcaaaaccacaatgagataccatctcacaccagttagaatggcgatcattaaaaagtcaggaaacaacaggtgctggagaggatgtggagaaataggaacacttttacactgttggtgggactgtaaactggttaaaccattgtggaagacagtgtggcaattcctcaaggatctagaactagaaataccatttgacccagccaccccattactgggtatatacccaaaggattataaatcatgctgctataaagacacatgcacacatatgtttattgcagcattattcacaatagcaaagacttggaaccaacccaaatgtccatcagtgatagactggattaagaaactgtggcacatatacaccatggaatactatgcagccgtaaaaaatgatgagttcatgtcctttgtagggacatggatgaagctggaaaccatcactctcagcaaactatcgcagggacataaaaccaaacaccacatgttctcactcataggtgggaattgaacaaggagaacgcttggacacaggaaggggaacatcacacaccggggtctgttgtggggtggggggagtgtggagggatagcattaggagatatacctaatgtaaataacgaggtaatgggtgcagcacaccaacatggcacatgtatacatatgtaacaaacctgcacgttgtgcacatgtaccgtagaacttaaagtataataataaaaaaaaaagaaagaaaagaaaaggctctaggcggggccaggcatagcagctccagcccagcagcagtggcagggcagcggtggcggcagttcgctggaggcccggcgcccgccgcagcccctccccggcgtgatgcatggagacccgaccagccgctcgacgctgagcccggagtggcctcgggctctggcctgcccggccgcccgagggctgtgcgcggcccgcgggcctcccggctcccgcggatccgtgacccggccgtcctgtcccaggaagtggacgtcctgagcgccacggctcactccctgtgcagtcgggcctgcctggcatgcagaacctaaaggcagatccagaaaggttttttttgttttttttgttttttccctctcccttcaggtgcactaagatagggaagctaaaagcagacttggggtgtatgcttgcagctgcaaaaaaatatgtatgggaacaaacacacaactatccctcccaaataaacacaacaaagaaacacagaagcagtccaagcctctaataaactctcccaccctgaatccttaaaaactcttagtctgtaaaaaagtgtgcctctaacctaactcagccaaaaggctcctctcgggtttgttttctttaaaataaacctgtcttaactggcaagccacctttcatgtttctttcctctttctttaattcttgcagtagtgaccaaaatacatgaatttttctttcatgtatttttattattacctagaggaagatatatccaataaatgaaatttaaaactctcttcaaaagattgtatcaatactttcttaattatttcaaggaagagccctaaaatatatatatataaccatagttatattatgaattctgctttgtggtgttttttcttttttgttttttattattatactttaagttttagggtacatgtgcacaacgtgcaggtttgttacatatatatacacgtgccatgttggtgtgctgcacccattaactcgtcatttaacattaggtatatctcctaatgctatccctccacactccccccaccccacaacaggacccggtgtgtgatgttccccttcctgtgtccatgtgttctcattgttcaattcccacctgtgagtgagaacatgcggtgtttggttttttgtccttgcgacagtttgctgagaatgatggtttccagcttcatccatgtccctacaaaggacatgaactcatcattttttatggctgcatagtattccatggtgtatatgtgccacagtttcttaatccagtctatcattgatggacatttgggttggttccaagtctttgctattgtgaataatgctgcaataaacatatgtgtgcatgtgtctttatagcagcatgatttataatcctttgggtatataccaagaaatgggatggctgggtcaaatggtatttctaattctagatccttgaggaattgccacactgacttccacaatggttgaactagtttacagtcccaccaacagtgtaaaagtgttcctatttctccacatcctctccagcacctgttgtttcctgactttttaatgatcgccattctaactggtgtgagatggtatctcattgtggttttgatt

SEQ ID NO: 1563687 - DNA, 4001 bp, Homo sapiens
gcagagagttaaaaggtggtggattgggaccggtaacagcagaaataatcacaagatagtgtttctttgggaaataacctattttaaacatcatgaggtgtgcgaaaagacaagctttagaggaattgaggtttctaccttttaggcacattcaccatataagatctctgattaatatcagtaagggcaggaggaggagggactcctcaccttgccaaagcaattactgtagtaagtcactatagtaaacacttaaaaataacagaacctcatttctctagtgttgttcagtatgggagccactagccacatgtggctactgagcatttgaaatatggctagtttaaattgagatgttttgtaagggcaaaatacacaccagatctcaaggacttagtatgaaaaaaaaaccagtataatttttatattgatgacatgttgaaaacaatatattggttacgttgggataaataaaatattagttttgcctgtttctttttacctttataaaacggttactggaacatgtaaaattatgcgtgtggctcacattatatttctgttggacagtgctgctctggtatactcaaaaatagaatttgatctataagcatctttttagcagtacatttcttgctttaagtaagtgtacctgtacaccagagacaggctcatttcaaaagaaggacagggaggagtggcgatttgaaaatggggaaactgattatagaagaaagtcaggactctgcctcagttacctgtcagtctgggggtgggggatgctgggacaggggtcaattgcctgaagcaagtgctctcatccccctagctcctgctgatctagttggggctccagagtggggaggagaaaggcactttgaaacttctctgcccttaccgtcttagccatcaaactctgagctggagatagtgacgatgtgacaggaactttccctgggcctctctgggccacaattcctggccgagagaaagaggaggaatgaggtgagcaccttcttcactcctagggccatgtggtagagctgcagtcgcacctccttctgccaataggcatagatgagtgggttgagcagggagttgcccacgccgagcagccacaggtaccgttccagcactaggtagaggtgacactcctggcaggccacctgcacaatgccagtgataaggaagggggtccaggatagagcaaagctcccaatgagaacagacacagtacggagagctttgaagtcgctgggagtccgtggggatcgataacctccagccatggctcctgcatgttccatctttcgaatctgctggctgtgcatggaggcaatcttgagcatgtcgcagtagaagaagacaaagaggagcatggctgggaagaagccaacgcaggagagggtcagcacgaagtgagggtgaaatacagcaaagaagctgcactgccctttgtaggcagtctgctggaacatggggattccgagtgggaggaagccaatgaggtaagacactaaccacagcccggcaatgcaggccccggccacgaacccactcatgatcttcaagtagcggaagggctgcttgatggcaaggtacctgtcaaaggtgatcagcatgaccgtgaggacagaggcagctgcggaggaagtgacaaatgccatccgcaggctgcacagggtcttctgtgtgggccgagaagggctggagagctggtctgtgagtaggccagagatggccacaccaatcaaggtgtcagccacagccagattcaaggtgaagcagagactgacaccatcattcttgtggatcaacagcagcacagccacagccactagtgtgttagtagcaatgatgagggaggccaggacagcaaggatcactccaaatgagaaagatgattccatgtctcgaagtggcaggacttcacttaccagggcatgctatctctccagctgaaattctcatgggccaggggcagaggagctgtgggttcagagctacagcacgattctggccttcgctggcagtccaggctggcaggtcgccatctttgggatcctacaggtcatgaagaattactcaccctctcttttcagtcctcagcctcctgcctctccagctctctaaaggcagcaacttcagtatagacctccccctgggccctgagctagtccctccccctccaaccagcaagttactagacaactcccaagtacctgtacatgctgtctcgccaggccctctcccttcactggtgcttcagggactctggagggacagggacattcatcaggtctcctgtctgtcaaaagatataattgactccaatcatacttttttcttcctccataccttgacattaaatttctacttttcttccaaaacctcgagtaccagcttaaataattaatctcagcttaattaagctttttcttactaattctcaattactattatgaattgcttttaatcaagcaagatgctcataatcagttgaagtgggaagtgagggaaggtgagctttttgaggggccccagcatattttcaggagtgctaccacacatttaagctgtttcttaccttttgcttcctagcgcctcaaattctaattctctcaagtagggcgtgctgttcccccgtttctcatccctaggatctcagttgaggattcaggacaggaaaaacagggccaaaaactgttaacagctgtcattcagtttagaacccattctccacctcacgctgctgtctctcaagtatactaattgataattatttctgcagcatgttgggccaggtctggtcagtgagtagtggctgctgggcttgcctttcttaatcctatagacctgaggtatctctgcgggaggagaagaggagatgagctgcattctgggaagtgtctgcttgatgtttggctatggaattttccattttccaggaataggaacgtgggggcggttgagggggggaggttagaccaaagggcaactgtgttgctgaagcaggtgagatgcactctggaggggcagctgcataagtcactcctgttttaggatgtgtatccatttgcttgggtacattagaactaccctttcgcctgccactctcatcttggataccaagaagagaggggtggggagaagagtggttagaagcttatttactcagttcaggtgagagcacaaatgggaaaggttagtgtttgaagtgagggaatagagagcaaggtgcagagttggacgcaaatatattccaggatgttttgacagtctgagagggcctttggcagatgtctctcctaaaaaaggatcagaaagactgtgttgtggggattcagtattctagttgccatcctgaaaacagttcttattctttggtatgtccattaggagattgattccagttgcttagaacctagcctaattttatacctggacctaaggtgtgcttgggtttccccagctcttgactccacggagtcaagttagcccttttcaaacccatgttcaaacttgagagtgtatcagaatcacctggagggtgtcttaaaacccaggttcttgggtcctactcccagagtttcaggtcattggtgagtctgagaatctgcatttctttctttcttttcttttttatttttatttttatttttttttttttttgagaaggagtttcgctcttgtcgcccaggctggagtgcaatggtgtgatctcagctcactgcaacctccacctcccaggttcaagcaattctcctgcctcagcctcctgagtagctgggattacaggtgtgcagccaccacgcccagctaattttgtatttttagtagggacggagtttcaccgtgttggccaagccggtctcgaactcctggcctcaggtgacccacctgtctgggcctcccaaagtgttgggattacaggcgtgagccaccgtgcctggccagaatctgcatttcgaacaagttcccagatactgctgttacttgct

SEQ ID NO: 1563688 - DNA, 4001 bp, Homo sapiens
aatagtcacatgccaggaaatattttttaattttgatttttaaaaacattttagggctgggtgaggtggctcacgcctgtaatcctaacactttacgatgccaagggtggtgatcttttaattaagcccaggagttggagaccagcctgggcaacatagtgagaccccacatatatttaccctagcatggtggcgtgtggctgtagtcccagctactcgggtagctgaggtgggaggatcgcttgaacccaggaggtcgaggctgcagtgagctgtgattgtgacactgcactcaacctgggcaagagggtgagaccctgtctcaaaaaacaaaatcattaattttttaaaaagtaggatgtaaaaccattcttagctcgtggaccctagaaaacgggcaggatttggtctgagggctgcagtttgcgcacctgtggtgtaaaaaccatacccaaaaagcctggatagggaagggatttcagcttacaaaatactcgagagaatatatagtgcacaatagaaaagaatttacacacgcgcacacacacacacacacacacacacacacacacacacacagagcgagacagagagaagttaattgttagtctctccctggtgcagttgggcaaaaatgaggaaatcttttctggtctgggttttgcttaactgcgccatctgaagtttccatataacaaacacaataaacggattttttaaaacccaacgtcccttggatgggaattttaccgaccatgtgtttgcaaaactacctagtcggccgggcgcggtggcttacgcctgtaatcccagcactttgggaggccgaggcgggtggattacctgaggtcaggagttcgagagcagcctggccaacatggtgaaactccgtctctactaaaaatacaaaaattagtcgggcatggtggcgcgcgcctcccccagctactcgggaggctgaggcaagagaatcccttgaacccgggaggtggaggttgcagtgagccgagattgcgccactgcacttcagtctgggcgacagagcaagactccgtctcaaaaaaaaaaaaaaaaattacctagttgtcccatccggtccctagggaacagcctccgctttctcttttctctgtggttcaagtgttaagacggccagcccaacccgctagccgtgcgccatcacccgggcaccgatcaagttccaacccgagtggatcgagttccaacctgcgggccatgcgccctcacccgggcatcgatccggtctcaacctgcgggccacgcactctcacccggggattgagcaggtcccaaccccagggcctcacgccctcaccccagcactgagcaggtcccaacccgcgggcctcaagccctcagccggggaccgagcaggtcccaaccagccagctacgcgccctcagccctgcaccgggcaggttccaacccgcgggcctctcgtcctcactccatcacggaacaggtccaaatccacaggccgtgcgcccttatccgggcaccagtcgggtctcaacctgcgggccacgcgccctcacccaggcgctgatcagattccaacccgcgggccgcgcgcgcccttacccaggcagccgagaaggtcgcaggcagcggcagcgcgcaggatgcggaccgaggccggcggggacgtcgcgggggacccggggcccgcgggccggcggccgggcagcagctgcagaaggcccagcgccaagcggagcccgccgctgcccaggcagagcgcgtggaaggcccgcggctggaagctcagcacgagctgcgtggctgcgtcccgcgtggggcagcagaaggtccctaggcgcggggaggccatgggctgtgttcgcggacgcggctcgggtgtgccaggaccccgccggcctgcctgggtcatgtgctgggcgggctgggggcggcatcatgtgccctgggcctctcccccaccccaacccccagcgcctgcagtagagccaggctcggtgggggccgagagcactgggctaacgccacgaggcctcacgaggtgatgcttgggcgggcggaggaggaggacagagagagggagggctgagaggagaggaagagggaggaggaggagggaagtggaaggagaagcagaaaggttgggaaggttacctttctccccattcaccaagccttcctggtggtttctctgccacctagagcgccaaacctgccatctttactggtcttctagagaaacaggcctcgtggactagatctttcctatttgggactctgacatcctgattttgatgcctttaaggcgccagaacatgttcataaactgtgactgatccctgtaactgcttttttcctaagtagagatggttgtccaattagtgcttttttttatggcctctctcattcatggatataatcccacagaggcaggattttcgtttacaattaatgaatgaaacaaacagatcaatgttaaagaaagagcagtagctcacacctgtaatcccagcaccttgggaggccgaggcaggcagatcgcttgagctcaagagttggagaccagcgtgggcaacatggcgaaaccccacctctattaaaaatacaaacattagcccggtgtggtggcccaggcctgtgatccaagctactcggcaggctgaggtgggaggatcgcttgagcccaggaggtggagtttgcagtgagccaagatagtgccactgcactccagcctgagcgatagagccagaccttgtatcaaaaaacgaaacaaaacaaaaattagctggatgtggtggggcgtgcttgtagccctagcttctggggaggctgaggtgggaggatcacttgagcccggcaagtggaggttgcagtgagcagagattacaccactgcactccagcctgagcaatggagtgagaccctatctctctctctcacacacacacacacacacacacacacacacacacacacacacagaattaagtttaaaatttaaaaacattaaaaaaataaagggaaaagtactcagcataagtacacacagacacattttgcaccttaactttcagttctatttatttggatttttcttaactgcgttaatttttctatgttttctcatacattgaaaatcttgctttattctatacatgtaagtttccaagtaatattgtgttaatgattacagtaagcatactaagatttttttttttaagttcttcaaggctgaaaatagaagtgctccttctagattatggcctttattttaaaaaaagaaaagaaaaaaaaatccagctccatcatatttatcatcttcaacaaacctcattggctctttgtgaccacacaagagacacccttcctcctctctcctggtaaaatgggcccctctctgggtttttttcaagcaaccaaggtgcaggtgtccccattgtgttcatggactttcctcacttgttctccccaccagctttgcggttttaaggaaggcatgatctgtgccgtcttcctctagggatagcaggactggccttcccttgggaccccacagaaggcaggcgggaggctccactgccagacaggaagcggagccttatttaacaacaatgaggtgcaaactccaccacttcaaaagagtccagatctggcacgtctataaacgcagcctgttcactccacagctgccttcctagaagtcagaacagactgacatcttcagaaagcttaacagctctgctggattacacactccattgtaaaaacagtcagaagcaccatagaactactccccaagcattaatgtttaaaagcttgaattctaatatctaatttggacagtggctctctttccttctgccttggtaagcagagttgcttctggaggttagtgtaatggaaagtgctttaaaagataaaaatgaagagtgtctgtacatttgcctgaaggttgagggccagtgggccaggcaaaggggtccctgcatttgagtcactg

SEQ ID NO: 1563689 - DNA, 4001 bp, Homo sapiens
ctgcccccacagagatggtcttctgggcctcagtctttccccattcctcctcttcccttggccaccgaccccacactctgtgtcccatcacatctccatgccctgaaatcagccagcagaccccgttcttcccccaccccaggctctaggtgagcagctccctgggacgcgtccctcacaggtctggctgctgcatgggccacaccccagctctacccgaagccccgtgatctcaggagcttcagcctcatctccaggccctgccaaccactgaccacaggccaaactcttgccaagtctcccctcaacagggagacacatacatcaccagggccagaaaggctgcaggctgcaagccaggcctctgctggctcatgggggctcaaggttctgtgtgtgtgtgtgcgcacaaacagggacaagtgcagggaaagaagactggagtggggtgggggagggaggctctgcccataaccacttatcattctctacaaatgagaagtattaacacagggcttctcctgcctcccttccactaccctccatttgcccacttgctgccctccccagatctctgctgagaccctggagaagaaggacctgtccctcctccaagtaatcgataacactattaatcatgaataatcagcaacaatattgactgtgagctttgctgacattgcttcagtgccacctcgatgcacatctcttacttacatgcaccaactcattcaatccctacacacacccatcagggaagggttaccagtctctttgacagatgggaaaactgaggttcggtaagtggcatgcttccactaaagttgcagagctagtagttgggggaagtgtccctgggaggatccatgttctccatgtaccaggctttcctgcccttccagatatatggacctccggctactgggcacaaggccacaagatccggggggtctcagacacaacatggacatctgaaacagagacagagagccttgtggtggaggctgggtcccacactgtagggacaaccatgttgttcctggcccctgcaggttgtcatgggattggtctttgcccccacagaaccatcaggcagcctagggcctggaagtgctccccaccaccacttcactgtcctttagccctacagtgacttcctccccctagctgggaatcggcaacatcttcagtggtgagtgagcaaaactctgctacctgtagggagagatggggaggtggggagggtggaaggaaggaaggaaggaaaggaggaaagaaggagtgggggatggtctgggctgggagcagcttctctgtcatgtctacccacctgcttgctacccaggtgcacacacacacacacacacacacacacacacacacacacacccggccagcaggccagggatcctggaggagagtggaggaggagggagagggagaggagcagccgcaagaggctgagcctgcccagggtgcaggcattgtgaagggaacacggccgccgggctcccaggcatcccttccacagccagcacacaaggaaagattaacacagcctcatgcccaaacgcaaccatgatgataaaaacagaccctgtgaggggaaacaggtggtggttccctttctcatgggacatttgggattggggaagatggggggaagatgaggagtccccaggcttgggtaccaaggagccccttgatggagcagaaagagactaacagagtcagacagagacagagagcatggcagtgatggagactctgaagtatgtgtggggagacagaacagaagtcccagccccccatccttggtggagggatgctgactgcttaccttggctctctcagcagggatgtcttggaatccacgatggggctcaagctgtctcacccaggtaaatcacagcccgggccacattgtgggaccctcagtgatctggcggccagtgacactcctgcttctgttgccgtggatacagccgggctggtctaaatcgcaggcatcagggaaagcaggcaccggaggggtgcactgggtagggctgggggtgttggggaacaccaggtgggcagcacacagccttggggtgtccaactagctggcaggtgggggtcccggcaggtgcttcctccactatacactcccactcccatcttcatgccactgccaagctgggaggggggccagtgctggcccctgctacccgtctgcctgcctggctgccggtccccctaccccccccaccccccaccccccccctccgtctgcctgctggccgccgccttttgtcctcagaagacacggtccccgcggggcctctgccaagcctccagcagatgctcagggtccggggctcctccctgggagcacacgggccatggcctgggagagccccaggttgggggggctctcatccaggctcaccccgctccccgggcctggcggggatggggaagaggtgcaggtccacagccagaggcagcagcagaggtggtgttggggaggggatggacgccagaaagagggggtggggtggagagagaggctggcctgatagccgtgtcccgggttttagatccgggttgaggagggtggctcagagcatccgaggggggtcctcatgcaaaacgagggcaccaagggcctgccagagggaccctcctggcctgggaaccaccccggtgcacacaaatccaggtcccacgatgctggggacacccagcctggatagagcatcagtggggagtccggggccctaagctggaccccatcaggcctgtccgtcccccctctcctcgatttgcacggtccctgcctcaggggcgggcggaggaggagggaggcagggagggagagggagggaaggaggaaggctgagcaggcagggagactcccagctgccagcctggtcctccctggggcggggcggggagcgggggggggggcggggggtgctggcgaggccagggagcagccggctggctgactgggtggggacgctggcgtggcggctgtgctgccaggacaatagctggctggggaagtcaggctcgggcctttctgagatgctcgagagaggcatgagtggaggtggggagagatggccaagaggctgctgagagagcaactcacatgggctacaagtgcagaggaggcagggcatagaggacgctaggatctgggtcgggacaaaggtccggcgaaagtttctcaaaagctttgggctgggaggcatgcttagggcccggagaggtgggattcataaactgatttagaatggggttctatgggcattttccctgcaaggcctggaggttggctggggggttggggtgggaaaggagcgctgcccaactctgaacagcccctctcaggatatctcctgtgccatccccactttctcggggccagcagacaggcagaacccatacttaaagccatgtcccaggacaacagaataggagaggtgaggagaacgcttggtaggcagagatatgaagacaaggaaaaaaatatttgtttcaaatatgattaaattgggaccaaatgatgcttcagtggttcccctaagttacagcattcaagaattcaaattatcttgatataagaaattgtgttttatttcctttcttccttcatccattggttccttcatttatgacaaatggttttatgttaggcccagtgctgggcactaacagtaccgggtgactcagacctatgctctctgcccttaggaaatgcaggctctgctaccagactgtggacctggaacccacttgcatctgaatcccctggagaacttgtaaagtgtagatacccaagcctacctcccagaaatactaatctaggaggttttcagatggggcttcaaaacctgccttttgacaaggccctccggtggtcatttttatgcccacatgctttggggagggagaaaaatccatggaaaattagaaaatgttttggaggccgggtgtagtggatcatacct

SEQ ID NO: 1563690 - DNA, 4001 bp, Homo sapiens
ttcattagtgcactacttcttccacaggctcagaaagtgcaggaacctgtcaacattacctcaatgtatctctagaaacatgataaaaacttcctctactaggcgggtccatacatctccagaagtgttctttagaaaaagtgtaagagagcagaattgtgattgtcacctttctgctttctcctaggcctagagcccaattgagtcaccttgtatggactttgacaaactacctgtcctaggtagatgcaacacggcatcttttccagtcacagagggttgtcgtatgtaaatatgtatattgttcttagtttaaatatgccagaggcctgagttcagattttcattctgtgaacaggtgtgacaaatgatgtttcatgttgacacaaaaatgaagaaaatagctattttaatcttcaaactctgaagagtaatcacacttgagagataaaaatgatcttatgtttacattttctttacacagggtaatatatcatctatcccactaaaatataaccaaacatatgaaaatggcatgtaaactgtgattactaatataaaaagacacttacatttcctctgaacataaagactcagtatctgttgcaacaaaactaaatgtttatggtgactccaagctaataatctttttgtgcctgaggttcacaggtaaaagtactgactacagttgagtgcatatgtttataggatgtcacagaaatttgatattttaagatttacagacttgaagaaaaattactacatggacatgtcaacatcaataatcgtggatcgtaatgctccaaataggtcctgctttgaagaagtgaattccccatagcagtaagatagagcagaactgaaaagctgtgttgttttgcaagttcttccctgtggcttgggtattgcagatatgttctgatgtacttgcatttcaggtcacattcagtttggttttttgttttagcataattcaggtgtcatggtggaagctgtatggttactcacaaaggattttgcatggagttggatgctgtcatgcaaatcttgtcttgaaagccgtcttcggaactcattagtggaaaagtagtatatgactgggtcaagacatgaattcagactagcaagacacaatgccacagaatgaaatattagaatcacccttctggctaggcagcttttaatttcattggacttcaccaggaaatctaaaggaaaactgaaatgataaggtgcaaagcaaattaggaatacccctgcacaggttagaatcatcttcaaggctttctgtttctctccaagatcttgggccatgggatatttatcttgcagtgataaaaccgtcttccaggtacaatataggacaatcagaagcggagttacaaacccaatcaactcgccaatggtcatcataacaacggactgggccaggttgacattcctggtaggaagatccacaaagcatttggtcctattgccagaggtatcatcactggttctgaggagtggaaagagtacacaggcaaggcagatgatcagccagccagcaatgctgatgtacaggtcatatttctgtttgcagtcatggaagcgaaaggggtacatgagaaaccaaaatcgtcgcacactgatgcagaccaagaagtagatgcttgcatacatgttgacatacttcaggtagaaacagaacatgcagagaccaggcccaaatggccagtcatgattcaagtagtagaagatcctcagtggcaaggaaagaacttgtagtaagtcagcaatggctaagtttatcataaatatcacagctcgttttgtttctttcatataaccatagaatacccacagggctaatatattccctatgagacctggcacaagaatgacagtgtatgtcactgcataaataaagtatcgaaaatctgtattgtctccatctggcctggtacacgtgtaattagcaggcatgattctctctagagaaactatctttgcctaatggtggttcaaaactaaattcacaatcaactgctgttccttccaaaagattgattgccagtgggttggagatacgaagtataaaataaccttcctctttttaccacatctgtctgagtctctacgtatgatttggggatttttcaaagaatgatctgcatttttgatttagatttctctagagtaactacatggaagtctagtgtacaagcacagatgacaagctgttacaatttcccctcttgtttattttaaggccctctgggacatcatgagagcttattctctcccatttggaaaaggaatgtaccatatagcagttcctcaaattcctatatgacgatagccttctctttacaggtgtctggcaggccgtttttctttttttggctcacatagaagaaaggattgctttagtgcacaatgagtccgccactcttcagggatgattaacttggaaagatcagctttctgggactttttcagctataggtcaaaagctaaaaagtaggaaacaaaggcagagctgcaagcaaaagaaaataagtcaattatttcctggcccagctttgaaaaaaaaaaaaaagcctgtgttcagaaaaatattctagtttgaatgaaaaaattcttaagtaagggaagggtatatgctgcagtttctacaaggcactttataatcacagaaaaacatagcttgaaagaacatgagaagtaatctagccccttgttactcaaaattcatgaacgaatgacgcttgggagcttgttacaaattcaaaatctcaggcgtcaccctggacctgatgcatcaagatctgcgttttaacaatgaactcaggtgattcttctgcgtattaacatttgagaagctatgatttggactactgcttcactaacattactgattgtctgaatcatctggggaaggttaaaaattaaaatacaagcttctgggtgtttcctccagagattctgattgagtattcatggggtacagtatgcaatttgtatcttttcaaagctctccatttggttttgaaatagccagcccagcatttgtccttgaaccatcatttgatccaaatcattcctatatgtctaaaaataaatggacaaccagcttctctttaaataatcccatttacaggagtcatttagtcacctcttagttacctgagacaacagatgtagcaccagagcagagaatcaaaatccatagaaagttgactcagctgggtctatgacctttattctgaggtaagtaaattttagcttaggggcctggatagttgcctcaaggctgctgaaatctaggaggacttaactaactttaaagatatgtgtgggaagaacaaaaatgaaatgggaattatgaaacatcctgctttgaatgatcaaatccatgtggtttgaagtgtgcgtcattgagcccctgaacaaattattattattttacttcaatttcatggtaagtgaaacagcacgttttattcaaagatatgatactcactttacttaaaaggcttgatgagtgattcataatatgcctttggattgaagagattaaatacccgagatttctcaggtaaggaagacatagaaagatagtgttataaaaaacagtgaagcacaactgtaaataataccacttttctttgagattgtcctttcacaagaaaaaatccatattttaactgggactgaaacagactccaattttaaatgagacacttattggaaggaaatgccaagctccttgggcagattttttttttcctcagcatactgtatttcctcaattgtacttactttcttggtacgaggaaaaaagtagagagaaagggaattgattgcctgaattcagcatgctaatttttcagccatatgtaagtgagaaactatttcatatggagttcttatgggaagttattgttttttatttatgaatatgaatatgttcatccaaatctgaagctttacttagttgtacttatgtttcaaaagta

SEQ ID NO: 1563691 - DNA, 4001 bp, Homo sapiens
cagctgagcgccatggttcatgcctgtgatcccagcactttgggaggctgaagtgggaggatcacttgagttcaggagttctagaccagcctgggcaagatggtgaaaccctgtctctacaaaaagtataaaaattagcgggtatggtgacgtgcgcctatagtcccagctactcgagaggctaaggtgggaggatcgcttgagcctgggaagcagaggttgcagtgatcctagatcactccactgtactccagcctgggtgacggagtaagaccttgtctcaaaaaaaaagaacataaaaaaaaaaaaaattggccgggagcagtggttcatgcctgtaatcccagcactttgggaggccgaggcaggcaaatcactggagtccaggaattcgagaccagcctggccaacatagcgaaaccctgcctctactaaaaaataccaaaaaaaaaaaaaaaaattagcagggcgtggtggcacgcacctgtagtcccagctactccggaggctgaggctggagaattgcttgaacccgggagacagaggctgcagtgagctgtgttcatgccactgtactctagcctgggcaacagagcgagagtctgtctcaaaaaaaaattttttttttaattaaaaatcacaattacattctgttttaaacttggtgactgtttttttttctcctttgaagttggttagtacattacaatgtcattcactatataaggctatttactgatattttttaaactacctgtttgatatgttaagaattgcttgtgaagacaagaaacaaaccactgtgtttacataggggattaatttcccagtgggcattacttgtgacccatgtgctatattgaagtggtcacaatagttttgtaatagtagatagtgttttttaaatgttgttacttggcaaatcctattcacaagttcaaaaacctagtattagtgcattgtacccccgcaccaccacctactcctgcagttttttttcaactggctcatgtaggagtactggacccagagggcaggacccaacagattccactgtgactccagatgagcagaagcttttaaaatgcagtttgggtatgtttgtgaaaatatcacattgctatgttgaaatacatacctatttggtaatagtcgcaacctttcaccgtttttagtttgacttgataatgactgaatctattcagggcatgcttcaaaattgcattaactgctgtataaaaaatgaaaattgaaaacatattactttggaaataatactattaatagtgtgttaggttttgttacaaatttaactgtgtccctagaaacacattttaaaaaattattatttgaactaaagcatattttgctttctctcttatctaatattcaccttatttacttctgaaacaccaaacttaaatgttatatggtctggtaatactataaaatagtaataatataataaagaaaagacagtaatttaaaatagggagacagcataacttaaagtcaataagttataatttataatacattagaaataaaatgtattgcatatgaaaataacttttaattcatgcaagtagatctgcaaaatcttgatggcagtatccaaatgcagtatcaacaatgtgactatattgacagtaggagcttaaataccttgaatgtcttaaagtacttaaagtaactaaaaagacagtctcatttgaaatcaaggcagaggtgtcattcaagcaatttactcagtagttctaaaagcgaataactgctgacattagagtagccttatcaccatgaatcacgtttcactttgaatgttcagataatcaaattttagctgaaataaaggttcatttatgtagccgaaatcaagaaatactcacagttcaggttcgcctgaagtaaaaggagcagaaccccaagcttccctagacactgagactcgtcttggttgtgtcagctgggctcttccatccggtcgtggtgcaattggttggggttctcttcttttttatgttcatatgtggtggtagggttttttttttccccctctttttttttttcttttttcggtatgacaactctcagattccttttgaaaatattaaaaagccctactaccatggaacaactttaagctcaaccaacactgaactttaggaaattatttatatcttctttatgaataccttccaacttgacaattgtggaatgttttcctccccccgctcaaaatttaaaagttttataaattctaagcagaaatatgtattttctgtgttttgtaagaaatgatacataatatgctatatggactttcaaagcacaagcactgaatttctgtttcttaagttttcatctgtacattattttagcatattttcatgtattcctttaagacctttgctaaaacaaacttgtattattaggactagatgagatttctgatggtgttctccccttttgatcactatgataaactctcccgagcaaattaaaacatcacctgtattttaagcgaaataatgatgggattctgcagtcttggttttgatcctagtccaaaatttaaccactatctgtccatctatgtaactgctggccctgcagtttagtgttatttccctttttttgttgtcatttgaaatgaagaagttagtttttattctccccataattgttatcctgcagcttgtttgcactaaatatttgactcattgggctgtatctaacattctaattatttctgggtacactcttctgaacattatattctccagagctttttgtttgttataaatatgatttatgggacaggatatttttaaattaatagaataaaaatgttttgtagctcttacttccccttagaacctctgagaaggaaggtggttgctgtattagtcctgcaatattgttgtattggcaggattttattttattgtggtacaatatgtaacattaaatttaccatcttaacttttttttttttttttttttttgagacggagtttcgctcttgttgcccaggcgacaagagattgtacaatggcacaatctcggctcactgcagcctccacctcccaggttcaagcgattctcctgcctcagcctcccaagtagctgggattacagacatgcaccaccatgcccggctaattttgtatttttaatagagacagggttttgccatgttggccaggctagtttcaaactcctgacctcaggtggtccacccacctcagcctcccaaagtgctgggattacaggtgtgagccattgcgcccagccccatcttaaccatttttaagtatacaattcaatagtgttaagtatattcacattgttgtgcaacagtttctagaagtttttcatcgtgcaaaactaaaactcttcaccactaaacgatttctctcctctccccctgcccttgacaatcatgattctttatgtttcattgatttggactactttggacacttcatatgagtggaatcacacagtatttgtccttttgtgacatgtttatttcacttggtgtcatatcctcgaggttcatctgcgttgcagcatgttacaggatttccttcttttatcaaactgcattatattccactgtatatgcaccacattttccctatgcattcatctgttgatggatttttgggttgcttccacctcttgactaatgtgaataatgctgcagtgaacatgagtatgcatatatctcttcaagatcctagcaggaattttttaatgactaaataggcatttaactacgtgcattctatttcatataatctagcatgaatatatttttttctatattattttcctacacctaagacaacccttttcaaaacactaattgttttaatcttcagtttcctcatattgtgaccacattttctcctcaatgtgagtcagcacagctaccaccagatttgagtataatctttttctagttctttctttatataagctttttcctgttc

SEQ ID NO: 1563692 - DNA, 4001 bp, Homo sapiens
agagtaatgaattcagggaaatacagccgaaaagagaaggggcaaagccttaaaaacaaaaccacaacaaccataaaagcctttatttgaattatagaaggaaggaaggagaaggagaaaaagaaagaaaagaaatctaaagggaataaaatgggcttcgcaggtcgcccccaggattccgtgggtttgcacctcgggaccgcaccgcgggggtgaaggtgaagacctagtgtatggccccacgattccaggagacgaaggagaaatcggagacacccaccagactttgtaagaaaacttttaatgactgtgtgccagtcagtgcgtttttaaacttgttcagtgttcgtgactccttgcccaagcaaagtaatcccccagaccccggccgccacctctcccccacgccctgcccgggagaatccagctggtctccccaccctctcagacccccttcggtccccactcctagccccagccgatcgagaatctggcggtggaaattccaggcgccgcccctccctcccccggcctgaactcggagtttgggcgcctttgccccttcccctcccttccagagccctctcccgcccaacctgtaagccggactagctgctctgcagtgtctgccgcccccacccccagcacaggtcgcagcgcccggcatcctcccacgcttccctcctgccctgctcgccgccggcccccggcccccggcctcctcccgctcggcagtggctagcagcgggggaagtcccgcctgcggctcccagaccccagccctttgcagcctctctgagtcccccatcgccgcctctgagctctcccgtcgccctcccgccaatccctactcggttttgctgccttctatccctccacccccagcaacgcccagctcccaagcctcttggccggcccgccctgcgaccccccagttccccgcttacggaccttgggatctccgctgccgccgccgtcgctgccaccgcctgctgtgcccgacccgccgcttgcctctctctgccgttcgccctgggacgggcggacggagctcggctccggcgggctcagacctccctgctcgattctcgggcgcgggggtctgtgctccgccgcccgggatctgcccgggagccgtcctggagccccagggccgcggcgagcgggctcttggcccggctagggagaggccactgcgttgcgctctggtaagggccgccgcggccgccgcgaacttaactttcacagagcaggtcgcagccccgctgctccctccgcgtcagttcggtccgcgctgcctcagcgcggccgcccttgcggcgtccggctcggcttgctgtccccgggcgaatcgcctgactctcccgctcgggtgccggctccctccgcatcaggccccgacgggacagggatcctcgggctgccgcgcaccacgggaacgctttgtacttggatgcccaaagctaattctctgtgctctctcggccttgagaacctccacgtttagagggccgggacagaatactaccacccccaggcttgcggggaatttgggagcagggatgttcaatatgagggcactgtccatagattctctattcggggagctcaaaaactaacgccctaggggttgcaagtctctgcacactgggtagggagaagaaggggtggcttaccagaattccggagcttcttgttcttcgtcacagccaaaatgaccatggagttgccgattaggtctacaacgatggtgataaccatcgcgcagaacataaagatgattagagccggtgggtattctggctggggtagcttacagccaatacagccatagggggtgggaaccgctagggtgggccccatgttgctcctggggatcgttaagatctcccagcaggctcaggatcagcagccaggtccagacagcaaacacctgttctgtcaccaggagctccaggaaagcgtgcctccctctctgagagtcagagagcaaatgacagcatcccgcccctctccgatgagcttttaaagcctcaagaggcggctagccccaccccaaatccctccccccgaccaatcagacctccctgaataccccccccttggctaccccctcttattggacaaatccacattgaggtgtcatcttgcttccgactgccttgtatgtacttcctctctagccagcctgccctgcctctcaatctcccaggtaccttgcaagcatcatgactagctcggagtccaccccacaccccctccaccagcccctgtgcattcgtttctagcaagttcttctccctctctcctccagtgcaaacacctggcaaagagatgtagattgcagagccggagcacagagtctttcataggatccagtgctagaccaagccagtccacagcccccagcagggtataggggatagccggtggccccttgaacgctagatgcttgcctctgcaagtatccttgtgaggtccatcccacgccccatgcccttgcctgtctagagccttctgtgtcccgcggggaacaggggactactgctgggagctcccacccccaatctgggtccctaatccctagggaacttaaccccgctccctttctcgccaggagcctcttggctcccttagcggcagctgcgagtagccgctcagtccggtccaggtcttgcactctccataaagagatgtaccctgcgcccgactctggaagtggggagcgggtctgcaccctgggacctagggaaggcattggtggccactcggtcctcagtttgggggcgaacgggagcgggagctcgtctcctttccagctgccggcagccaggcggcggaagccaagggacgctttgggaaaaagtaaaacaggcaataaagctcttctcttgggtccccgcttctcaaggaaactcaggacgagaggctctgacgcctctccctctcgggatgctcggcattctctactgagcggcacggggcagtcaggaaggctgaaggagctgcgccgcagccgcgggaaaggtgcggaggtgtcacgcggctaaaccaagaagcctctggctgaccggcgatccctgcctcagtcaggattcctctcggtctttctcctttcccatgcccttctggggttctcgtttcgaccccatccctctcaggcctcccccctcgccctccacaccgcggatctctgtccccgtgcgtcacagttcccctgcggtgcgcccaggatctcgctccgcggggaccacggaaaattcgaatattcgggcaaaactaaaggggcgtgattcggacactcgttccctcaataaccttggtcacgggaatggatttctgccggctactaaaagttacggctcctgtcgagaagcctttcaaaatctcagtaaacaccttgaaacttgttccagactagtcttcttgccacagtaggggagaggggttgcactggccgggagcgccatcgtctggacacagcagccctcttgccccggggtgggtggggggacggacaaggcggggtaggtagtaggggcctgttacgcgacgaacttcaacattcagatacctttaacgaaaaaaacagacactgttgaaaaccaagattgcacacactgtctctagctataaagcctaaactggaaatgtgtctccttgtttgaaaatgaagcccccaccccaatcctgcggctttcgcgtctgtgaactgaatccggcgcgaattacaatctcccgcctggaggcttttcacattcattatctcactgcccctcgctggctggaactcccggccgcgcgcgctcgcatttttttccgtaagtgcagacagtgaaggggctccgctgtcctccccacacagctgtgcgccctgtaaagaggctgtcagtcaaaagcccgtccgcgcagtggagtattttgtaggatgcacatcaggctgttcttgctggttccccgagagtttggatcccttcacttgtgggaaggggcgattttga

SEQ ID NO: 1563693 - DNA, 4001 bp, Homo sapiens
tatggtgactattaggatcagctacataatttgtgggacccagtgcaaaatgaaaaggagaggccccttgttcaaaaattaagaatttcagcattaaaccaagtgcaggatgcatgtccatgaagccagccctgctatcagatcatgtatttggctagaaagttggtaagaaaagtaaaatatttcgctattaaatgagtagtgaaggaaatcaaatcattttaccccaaaatatatttctttgacatattttgaaatagttgacatatttctaaatattgacgtatttagaaagccagccagtagagctaatgcaaagctgtccttggtgcggaagatttgcatttgtagagaatctgcacggatgtagccaggctttatcgaggtcctcccttgtccagatctaagagaaattaactgaggatctgacccctttaaaggtctgaaagaaacatttactgtttattctctctgagggctgccacctgtgaggtttcattgacatctccagaccatttttgctggccaagcctcctcttctccccctctcacaacctcttttaccaccataacctgtttggggccatgcgttgagacccctttctttctgtaacctcaagataatctacatgcttctgtaccccattggggggctgggggtaatcactctattgttctctccccgtggacacattaatacatttgcatgccttttctccaatcaatctgtctttgtcagttaatttttcaagcgaaccttcagggggcgaagggaaagtttcccttggcctttatagtagcaagtgtttttgcgtgcgtttgggggtagaggtggcaaagaggtattaaagctatacatactgtaaagtcttaggacctcgtctcccaatctcccacttttcctaaggttttcagcctgctggacaaaaagtacttccgtagggcctgccggataaagtgtggtccatggaacagcatcagcagccactgggagcttcttagaaatgcagacgctcggcccccaccccagacctgcgggatcagaatctcattttaacgggatccctgggggattatcgtgcacagtacagactgtcactgtcgaagcagccacggaaaacctgtcccctgcttcgtctggctctcgggaggtcagctctcttcttccccctcactttttatcgggtttcggagcctcgaaactcgagtccctgccgaaatgcgctcactccgagaccacgagccccctccttccccggcgtgctcaccccctggctccgggccgccgctccgtccctcggtgcccggggccacctgttcggggccgcgccgagtggtgccgccccaagccgtccggggcccgggcgcgttcgcgctccgccagcaccgccgcagcccgaccaggcgcgcggagccgggctcccgggagttggcgtctagcacaccacccgcgcgagtcaggctcgtggctcagtttcccgcgggttggggaaagtacggctccgtccgaaggttttggagacgcgcgtctccccttggagcctcctttcccacggcgcgcgggctcccccagtcggggaactagccccggggctgggagctacgcctccgcctttcaggatgttcccgggccccggctaggaacagcagccgggcggaaggcgcgttcgtcccgccggcccgctggcccgccgccctccggggctagacgctgcgcccgagcctccagcgcccgtggccggctgtgcgagtctgggtctcaggaccccaaggggccagacccgtcctggcgccgagcgcttacctgccgctcgcgtcctcggggctggctgctggcgccgtccggcccgccttttcccctctccggggctgcggccctcctccccccgcccgcggcctcggcgccgcccccgccgctcccggcccgctccgccgccagctctccagctgcccagcgcggcgtggcgcgtcgggcgctcggcggcggcgaggctgggcgcggaggtggggagcgggcggggcgcggagggaggagggggagcgggcagcgcggccggccgaagccgggctgggagctcggggcaggggcaggggccggggagaagcgggggcggcgagctcggccgcccaccccaccgcagccgggggccccgcagcgctcctgggctccaggcactgcgggaccctcagatgcccggcgtccagcccagcgagctcctccttggggaccccaacggaccccaacctccagactcagcggctcacctttagggctcgccccggtacccatatgcccgtttcagtgtcgcacgctgtaatgggtgggagccccgagggcgcacttctaccaagatattcctgaatccggagatcagatgtcagaccacttgagaggggaatttggagagagcagtaaacgagaaatgtcccagtaaaggattcagttcgatggttttcctggtgaaggactggaaatacaccgggttcccagaaaccgggatctcgggcgctctgcctgctgggggtcgaggtggagggggtatataaagtgagttgtccctggtcccctctacctttctgtctcagcatctctcctcctgcatggtcatagaataaaaactagatctggataggacttacagatcccctaagcaatttgtcaaagtaccctattttacagatgggaaaatggaggctcagttctacaatacgaattagttgtagagaccagggaaaaaataagcgctctgaattccctttccggctcattttactgcccccctcccccgccgcctttatagtcgaataacacctgtgtttgcaaaatgctttgtcgttttaaaggcatcgttctctttcgttaaacctgcgggagaatataccatttttcctttacaactagaacaaaattctggattctgaattgcattcacagccctggagacgcgatggttatcaagtgcagatctttaaggcatatcctggctgactctgccattttagacacatgatgggcgagatgtatattctgctttgcaggaggggttgaatttgttttgcaaacaccagtttattaacactcacaacattctaactgaataaatgaatggacagtcttttcagagagacttttaactgattggattaagggagagtagagtcaggaagctcatccaggttacataaattaaaagttttgatgaaggggaaaatggtgtattaaataaacacacccggtattactccaacgggttaaattggttccgtttgaatgaacttaacacgtatttttaacttacatataacttttgcatattaacttctttatttttgctttacatagacctcatacctaaagaattttcatacaccgctagtgggagtgtaaatttttacaagcattttggaaaactctttggcagaatctattaaagctgagagtacaactaccctctgaccagcaattccccttctggatgtacacacaacctcaatcagtgtgtatgtttaccaaaggatatgaactagaatatcataccagtatatttgcaatagcccagattggaaatgacccagatgcccaccaacagaatggatcgcagacattgtgatggtatagtcacaaagcggaatcccagacagcaatgagactgcatgaaccactgctatgcttaatatagatgaacctctgaaacaatgttgagtgaagaagtcaggcccaaaaacacagacactatatgattttgtttctgtaaaggataaaacaggcaaaactaacctatgctgttaggatagcggtcactggagaataagaagggcttacaggtaatgtctggcttcttgatctgggtacagtttaaacggatctatgagcacttttctgtatgtatgtctcacgtcaataacaagttaatatatgtctatctcatattaacagttgcttgaatttctaaagttaagcgtgataccagagtaagtatgcttttcctttaaacaaactt

SEQ ID NO: 1563694 - DNA, 4001 bp, Homo sapiens
acaacatagcgagaccctgtctctataaaaaatacaaaaactagaccgggtatgttggctcatgcctgttatcccagcactttgggaggccaaggccagcctgggcaacatggtgaaaccatgtctctacagaaaaattagccaggcatcctggcatgtgcctggagtcccagctacttgggaggctgaggtttgaggatcagttgagcctaggagttcaaggctgcagtgagctatgatcattctactgcactccaggctgggtaacagaaagagaccctgtctcaaaaacaaacaaaaaaaaactgtagctgctatgcttgttggttagagtgtccttgtgtgtaatttgctatctgagtttttcagaggattttttttaaaggatatgatgttttaatcacaacataaatgctggtttttacttttttctgtcttatatttaaatctttctcgcttcaaagggtacacatgaagtgctgaagaatcatatacaaactgcttttattcttatttttctccttatttcctcacttctttcaggtgagaataacaaaagttactggattctggtcaaataagaaccatgatctctattcagaatgtgccatattctctgtgttcttcaccatagccttctgagcaccacattctccactctttcatgatctagagcaaggtttctcaatcttctttttaatcatgttctcttttgataaacataaaaactgtaccatacacaaccctttgaaattcttatatccccccagcccctcagggcaattttactctctacccccttcagaattatggtttgatttattttctgcatcttggattacagaaattggggttttttttcaaatatgatattataattttataataactttttaaaccaatccacacccaaagtcttgaaaacttgaggactgtgcagtgtctgtgggtttaaataacaagattcttaattaatgtttaccactgtctttataattttatttctttgctatttttatttagaaaacagtccatatgcttcattgtaagtttgtatctgaatctagtgcaacctgatgaattataatctggtttcagttagtgtagaccctggtataaatatataaaacctaatctgtaacttcaccagttcaaaaatcagtcagacagtgaaatgagccagtttatttaagaaaaaattatctgctcacagtaggttttgattttacataaggattggagcttccttttatgatgctgttaaagaaaagcagtagctcctaccttgtgcagataatgcatagtatactaaaaactgcaaaggtaatggtgcttctgtatgaatattaaatgcttccaaacaaaagggacatagacttctgcagaggctagctttatcagacagaagttgagtctctgtaggactctcagtgtagcagtcaacaactaggtcaccatctttaccttcccaaacttgtatctactatgtacatctccttcaaaaataaacttggatcataaaactactagataactattttccagaatttggaaagtactattaagaaatcaaataaaaattacatgttacagatgcaaaactggtctccagaaaatgtctctaagtctatattcccctcaggagaatgtctatctcaagtcactcatgcatacattttgtctctgctaatttgacaaatgaaaaaagttctacaactcttaacttcagttactaatgactgtctacatagttaatatgctgactgcctttcttaatgatcagctttcaaaatttaaaccattaggtcctgtttatttttatagagtttaatttttaagctaaaaatgaataataatcactcttacctgtatgagtagtttatgccaactaaggttatattgttcagggcagtgatgccaaatttcagacttaaaattctctgatcttcactcttccaatatctttagtcagtgtgaatagattcttgcatgacaccaactacagtgggaggaaaaggggaaattaaacagaatattgaagaaattcaatagttatggtcaatgtggcaactgcctcctcaaaaaaccctcatttctctatttctgtagtgggaggaagtggtgaacaatatacatattatacttccttatgattatttcatgaactagttacactccagtaacctttgtttgcacgattgactgaagttaagttcacaggtttaatcccccatggccagttttatatgacacagtgatagaaggagccactctgtagtaacccaatacaaatattggtgcaaactcgtttgtaaaattgtttgtggatggcttatttgcaatccatctttatcaaaaatagaaacaaaactcaaagttttcttataacttactagaatcaaatattatagagctaaaatagaacttcatgatcatctgtggactgagaccctttgttttaaagttgaagaagctgaggcccagaggaactcactgtaagcacagactgcacccagggttgggtcccagtttggttactaatgagttaacccactctgtttctaattgccctgcactatctccatttgtcaacataatacactgtttggggcatttcataatggatttggcaaatcctgggaagtgccaagtatgcctcagatcaaatgaatagttataaagaattgtgaaaccatgactagtctaaaacaataaaaattttaaaaataaaaaatagaattgtgaaaccaatttttttgttcaggattgtcgaatcagtctgtgacctactaactaaatgaaagctaagtgtgtacatctggggaggaagacttgcatcaagcactccctctcatccttgagtagttaaaccagtgggagtctgaaaaagagaacagaaatctaatttcatcaaacctgagcattttagttatcagtaaatcttcacttaaaatttacagaagtaccttgccatttctcataaacccgcaatgcttaccttatttcatgtttatttcataaattctctatgatgtttgctaatatttctctccaaaacaaaagtgagaactgcctaaagtgtccagattgtgttctgctgctgttcatctttgccttgccaccatttacttaagaacagtgactcatccagggttacatggccgttcattacagagtagtttggcttttagaattcccatcacttttacttcagtaatgtatcatgttccaggaaggaattacatagaacaaaaaacagttttaattaatttagagaagaacagaaatggaatgctatttctaagtgattgaaagatagttgtaatattatctgttcaggcataagcgtctttggtccgaaaaaagaacgctcttgttttcctccattgtctccaaactcagtaaatgataccatcactccttcagttattcaagccaaaaacttacgaatcatccttaattcctctttctttcacatctcacatctaatcaattgctggtactacagcttctactatcactaccatcattcattagccacatttcatgagagcttactatgtgccagatatctcgctatgtgccttacatccaagtcttatttggttttcacaacaccctgtgaaatgtctcattttaaaggtgaggaaaactgaaactcagaaagatctcataagttgcccaaggtcacacagccatctgtcctcacaggatggtgattggctcacctcaaagcaactaattcaagaacaagtccatagctgcaatgcctttttgtgatctagcctctgaagtcaacagtgtcacttctgcagtattctattggtcacacagagccagccctgcatcagtgtgggacgggtaaatatcaggaggtgatgatcactgggagccatcttggaaactggctatcacagatgtcaatcaaccgttgaaacaaaggaagagtcagaagtactgcttaaaaaccgttgtcagtccactggttgtttattggacaa

SEQ ID NO: 1563695 - DNA, 4001 bp, Homo sapiens
ctaagcactcccggacccatgctggtctccactaccccgcccaaaagtatacccactctcataccaaccttcacttatgtggtgcagtttccccctccttttcttgttcaagtagtgtcaagccccacagctgacagaagggggtcctacagacaagtaaacatacaggagagaatggagaatggtagataggcaagcactctggctcctgtgacaaatatctgtcttcccattcaagggttcaatgtatctatggtttcctgtgtcctggtccctgctctcaggtctttctgagtcacaacacaacctacacctatctcatgtcccctgcaagaaataaaaaggatgctggcactgtgcaaatccagcagagtagaagtgggtctgcacccactggtctcaaagccacctgccatgctctctttctccaactgtcccctgaattgccccctcccccttctcaccaacctccagaggtgtgagccagtctcctcctccttgcctttcttgcagaactggccagccttaaagcaggcctatggacaaacagatgaaaaagtaagacaggaaatgaggggtggcagtaaagcccttggtagagagaccaacgctaaggataagaatccccatattattgatatctgtctttcaacattcggggttttgctggtggaatattctcgttttgtttaggccctgcttcaaggttctagagataacaactccttctcttgacgtcatactcttctcattactcccttctccaattctgaggattcaccactaggtgcgccacatccccttgctctgcgcagcagaaaatgggggaagggcgccacatattctagaaaacaggtcgtgaattggtacttgtcagtatgtctccctcatcacccctacctccaaagctcaccctttcaagcccccagtttaggacggtgggggaggcagatggggatggaaggtgggggaagcgcctggaacaccattagagaggggaagattaagaggtgctcctggatgcctgacctgctctggtcgcagtcccccaccccgattcggttctccagtgtttggcacccaccccacatccccacacacctccagaaatccagggaatattcgtgctcctcctttatttcaagcctctcctctacagatgctcactgtgtcctgtcagaatacgccagacctaccgcgcagacagactttgacatcaacctggagtctgtgggaagggacagcacccaggacacggggccccacaggcccctttccggaatcagggcccggagcagcgaacgcgacccacctcccacgggctaggcacagagctgggacgctggcccacgagggcccccccaggcgccccccaactgcctcccgggcgccccccaacacggctcccgtttggccatttctcccgcaggagcctcccccacagccgtctctcggtaccgaaaccgtcgagggctgcgcgcgggcgcctgcaaagctggctgggaagcggtcagcgcggttctcctccagacgatctgacggtgcctctggagccagcccctcagcccttggtccggcctggcccgcaccagtcaccgcctccccatagccagggatctcgggcactgcgcacctctctctagcgcccggctccgaacggatcgtctcctcgttgccaggctgtcagggtccggggggcaggttgccagccggtccaccctggcggaccacccccacaccacggccccccacctcacgcacccctacttgccttcagaggcccagagcccaggtcatcggcctccccctcctctcttcagctctcctctggctgctcttcagttggattcccaccgctttcccagcgatccgaatggcaaagacgagtcccgccccccacgcctctgcaccaaactgggcaggggctgcgcaggatgcggcaagaaccgctctccgcgagggtgtcgggaaggggggcggagggatacggcgcgaaagtgcaggacgccccccctcacagaaccaccatagttccgacccagaggtgggcggggccaggacgagccccagccggggcctgcgggttggcaccaggctgcctcaggaggaccccgcggaccctaacgtggcgacgaccaccacatttctggcgctgctataatatatggcaccggcgggcggctgcggggccgggcggaggacaggatcgcgaggtcgcgaagagccgcgctggagggagcagcggatggataccaaaccgtcccttggtgtgtctgcacccccgccccaaccgcccccctataaggactgctgggtgtttgccctctccccctccctagtctgctcaccctccttcctggatgttaatgggagagggggtgtcagcactgcagtgtgggaggggagaggcgatttcagtccagacaggcccggggttctagggtggtcgtcctgtgcgtttctttcccagcttcgtggagccacgcaggggaggaaggtacacctgctcttaagtgaactccggggcagggggctcccatcaaggactcaccactgcccctcttctaaaagaaggtagacctagacctctaaccctaggaaaccaaccactggtctgcaccagactcatttctttctgccacaccgctgtttctcatttcaaatggtggctcacgttggcattgcaccgtccccacagttgcccccaaaagaggacctttccctgtcaggacccgcaggaggtcataacagtcctctctctttgatgccgccaggtagggatggtcctggcttctcttcggttccctgtcaagtcttctcttgccatgatatttggcagtgtggaaatgtggctggtatcaaaccagcttggatctccgccacctgccacaactacctattgtttcagcagtcattctcaggagaggatcccaccgtgcacccccctccccgagacaaagcaacctggctcatttgaatcctcttctttcacccccacatccgtcctctactcttgagcccctcctttccctgcttcctgcatgggacagacagagcaatgtggttaaacaccaagttgatgttgttactgttgtccatttgaaaactcatttagacactaccctcattgtgtttggcaggtaacggtcccctaaagatgtccatgtcctgttctccagaacatgtaccattttatattacctgacaaaggatcattaagattgctattcagctgagtttaatttaagattattctgggttatcttggccaatgtaattgcaagggtactttagatgtggaaggcagggactccatgtcagattgaagcagcatagaaagtctacactggtcatcgttggctttgaagatggaaggaagccaagatccaagaaatacaggctgtctccagaacctggaaaagacaaagaaacagattcttccctagaaatgccagagggatagctcctctggcaacatcttgattttagtgtggtgaagccctttgaagatttccaaccttccaggactgtaagataataataaattggtattattttaagccattccatgtatggtaactggttacagggtagcagcaccagacctatctggtttaacttttatataacaaagttgtgcattgtctttcagttgccggggaccctcagatcatgttacctgagcatcctcagatgaaccaagcatgcaatcagagggagaatgtaagtgttttgaattaggaccagggctgaattaagaagtggacactggatggcaggatccagtcagatcatgcctctcagcatcacctcattgtaagatccaaagccatcaggatatacccttaatacccaatgcttatgaaaacctgacccagcccccatctcagggagacattattttgggaagtatccctggtggtctcattacttcgttacaagtaataaatccccttactaaatccttgctgtgatcatggggttgatgtcaaacgactgaa

SEQ ID NO: 1563696 - DNA, 4001 bp, Homo sapiens
caatgggaggggccaagaagtccccagattggaccctaagcactcccggacccatgctggtctccactaccccgcccaaaagtatacccactctcataccaaccttcacttatgtggtgcagtttccccctccttttcttgttcaagtagtgtcaagccccacagctgacagaagggggtcctacagacaagtaaacatacaggagagaatggagaatggtagataggcaagcactctggctcctgtgacaaatatctgtcttcccattcaagggttcaatgtatctatggtttcctgtgtcctggtccctgctctcaggtctttctgagtcacaacacaacctacacctatctcatgtcccctgcaagaaataaaaaggatgctggcactgtgcaaatccagcagagtagaagtgggtctgcacccactggtctcaaagccacctgccatgctctctttctccaactgtcccctgaattgccccctcccccttctcaccaacctccagaggtgtgagccagtctcctcctccttgcctttcttgcagaactggccagccttaaagcaggcctatggacaaacagatgaaaaagtaagacaggaaatgaggggtggcagtaaagcccttggtagagagaccaacgctaaggataagaatccccatattattgatatctgtctttcaacattcggggttttgctggtggaatattctcgttttgtttaggccctgcttcaaggttctagagataacaactccttctcttgacgtcatactcttctcattactcccttctccaattctgaggattcaccactaggtgcgccacatccccttgctctgcgcagcagaaaatgggggaagggcgccacatattctagaaaacaggtcgtgaattggtacttgtcagtatgtctccctcatcacccctacctccaaagctcaccctttcaagcccccagtttaggacggtgggggaggcagatggggatggaaggtgggggaagcgcctggaacaccattagagaggggaagattaagaggtgctcctggatgcctgacctgctctggtcgcagtcccccaccccgattcggttctccagtgtttggcacccaccccacatccccacacacctccagaaatccagggaatattcgtgctcctcctttatttcaagcctctcctctacagatgctcactgtgtcctgtcagaatacgccagacctaccgcgcagacagactttgacatcaacctggagtctgtgggaagggacagcacccaggacacggggccccacaggcccctttccggaatcagggcccggagcagcgaacgcgacccacctcccacgggctaggcacagagctgggacgctggcccacgagggcccccccaggcgccccccaactgcctcccgggcgccccccaacacggctcccgtttggccatttctcccgcaggagcctcccccacagccgtctctcggtaccgaaaccgtcgagggctgcgcgcgggcgcctgcaaagctggctgggaagcggtcagcgcggttctcctccagacgatctgacggtgcctctggagccagcccctcagcccttggtccggcctggcccgcaccagtcaccgcctccccatagccagggatctcgggcactgcgcacctctctctagcgcccggctccgaacggatcgtctcctcgttgccaggctgtcagggtccggggggcaggttgccagccggtccaccctggcggaccacccccacaccacggccccccacctcacgcacccctacttgccttcagaggcccagagcccaggtcatcggcctccccctcctctcttcagctctcctctggctgctcttcagttggattcccaccgctttcccagcgatccgaatggcaaagacgagtcccgccccccacgcctctgcaccaaactgggcaggggctgcgcaggatgcggcaagaaccgctctccgcgagggtgtcgggaaggggggcggagggatacggcgcgaaagtgcaggacgccccccctcacagaaccaccatagttccgacccagaggtgggcggggccaggacgagccccagccggggcctgcgggttggcaccaggctgcctcaggaggaccccgcggaccctaacgtggcgacgaccaccacatttctggcgctgctataatatatggcaccggcgggcggctgcggggccgggcggaggacaggatcgcgaggtcgcgaagagccgcgctggagggagcagcggatggataccaaaccgtcccttggtgtgtctgcacccccgccccaaccgcccccctataaggactgctgggtgtttgccctctccccctccctagtctgctcaccctccttcctggatgttaatgggagagggggtgtcagcactgcagtgtgggaggggagaggcgatttcagtccagacaggcccggggttctagggtggtcgtcctgtgcgtttctttcccagcttcgtggagccacgcaggggaggaaggtacacctgctcttaagtgaactccggggcagggggctcccatcaaggactcaccactgcccctcttctaaaagaaggtagacctagacctctaaccctaggaaaccaaccactggtctgcaccagactcatttctttctgccacaccgctgtttctcatttcaaatggtggctcacgttggcattgcaccgtccccacagttgcccccaaaagaggacctttccctgtcaggacccgcaggaggtcataacagtcctctctctttgatgccgccaggtagggatggtcctggcttctcttcggttccctgtcaagtcttctcttgccatgatatttggcagtgtggaaatgtggctggtatcaaaccagcttggatctccgccacctgccacaactacctattgtttcagcagtcattctcaggagaggatcccaccgtgcacccccctccccgagacaaagcaacctggctcatttgaatcctcttctttcacccccacatccgtcctctactcttgagcccctcctttccctgcttcctgcatgggacagacagagcaatgtggttaaacaccaagttgatgttgttactgttgtccatttgaaaactcatttagacactaccctcattgtgtttggcaggtaacggtcccctaaagatgtccatgtcctgttctccagaacatgtaccattttatattacctgacaaaggatcattaagattgctattcagctgagtttaatttaagattattctgggttatcttggccaatgtaattgcaagggtactttagatgtggaaggcagggactccatgtcagattgaagcagcatagaaagtctacactggtcatcgttggctttgaagatggaaggaagccaagatccaagaaatacaggctgtctccagaacctggaaaagacaaagaaacagattcttccctagaaatgccagagggatagctcctctggcaacatcttgattttagtgtggtgaagccctttgaagatttccaaccttccaggactgtaagataataataaattggtattattttaagccattccatgtatggtaactggttacagggtagcagcaccagacctatctggtttaacttttatataacaaagttgtgcattgtctttcagttgccggggaccctcagatcatgttacctgagcatcctcagatgaaccaagcatgcaatcagagggagaatgtaagtgttttgaattaggaccagggctgaattaagaagtggacactggatggcaggatccagtcagatcatgcctctcagcatcacctcattgtaagatccaaagccatcaggatatacccttaatacccaatgcttatgaaaacctgacccagcccccatctcagggagacattattttgggaagtatccctggtggtctcattacttcgttacaagtaataaatccccttactaaatcct

SEQ ID NO: 1563697 - DNA, 4001 bp, Homo sapiens
gaacatacaggagagaatggagtgtgagtgcttggtaggtaggtgggcactctggcccctgtgacaaatatctgtcttcccattcaagagttcaatgtatctatggtttcctgtgtcctagtccctgctctcaggtcttttctgagtcacaacccaacctacacctatctcgtgtctcctgcaagaaataaaaaggatgctggcactgtgcaaatccggcagaatagaagtgggtctgccacttctactacaggtggaagtggatctgccacctgccatgctctctccaactgtcccctgcattgtcctctcccccttctcactaacctccagagctgtgagccagtctcctcctccttgcctttcttgcagaattggccagccttaaagtaggcctatggacaaacacatgaaaaagtaagacagtcaggatatgagtggtggcagaagagcacttggtagacaggccaacgccaaggataagagtccccatattattggtatctgtctttcaacattcggggttttgctggtggaatattctcgttttatttgggccctgcttcaaggttccagagataacaactccttctcttgacgtcatattcttcccattactcccttctccaattctgaggattcaccactaggtgcgccacatccccttgctctgcgcagcataaaatgggggaagggcgccgcatattctagaaaacaggttgtgaattagtacttgtcagtatgtctccctcatcacccccacctccaaagcccaccctttcatgcccccagtttaggacggtgggggagacaggtggggatggaaggtggggggagcgccattagagaggtgaagattaggaggtgctcctggatgcctgacttgctctggtcacagtcccctaccccgattcgggtccccaatcagtgtttagcgcccaacccccatccccacacacctccagaaatccaggcaatattcgtgctcctttatttcaagcctctcctctacagacgctcactgtgtcctgtcagaatacgccagacctaccgcacagacacaagactttgacatcaacctggagcctgtgggaagggaaggcaccgaggacatggggccccacaggcccctttcgggaatcgggacccggagtagcaaacgcggctcacctccggcggactgggtacagagccgggacgccgacccccgccggcctcgccgggcgccccccaacggccttcccgggcgcccccacagcggctcccgctccgccatttctcccgcaggagcctcccccacagccctctccgggcacagacaccgtcgagggcggggcgcgggcgcctgcaaagctggctgggaagcggtcagcgcggttctcctccaaacgatctggcggtgcctcccgagccagcccctcagcccttggccaggcccgctccggtcaccgcctccccatcgccaggggtctcgggcactgcgcacctctctcaagcgcctggctccgaccggatcgtctcctcgttgccaggctgtcagggtccgcggggcaggctgcctgctggtccaccctgccagaccacccccgcaacccggacccccacctcatgcacccgcacttgccttcagaggcccagggcccaggtcgtcggcctccccctcctctcctcagctctcctctggctcacttggagccactgctttccccgcgatccgaacgggaaagacgcgtcccgccccccacgcctctgcaccaaagtaggcaggggctgcgcaggatgcggcaagaaccgctcgccgcgagggtgtcgggaaggggggcggagggatacggcgcgaaagtgcttgacgcccccatcccaggcccaccgtagttccgaccccgaggtgggcagggccaggatgagccccagcctgggcgtgcgggttggcaccaggctgcctcaggaggcccccacggaccctaacgtggcgaccactaccatatttctgtcgctgctgtaatatatgggaccagcgggcggctgggggcccgggcaggggacaggatcgcgaggtcgggaagagccgcgctggagagaacagcggatggataccaaaccgccccgtgatgtgtctgcacccccgccccaaccgcccccctcacagggactgctgggtgtctgccccctccctctccccagtcccctaaccctcctttctggaagctgatgggaaagggggtgtcagcactgcagtgtgggaggggagaggcgatttcaggccatacaggcccggggctctagggtggtcctcttgtgcgtttctttcccagcttcgtggagccacgcaggggaggaaggtacacctgctcttaagtgaactccggggcagggggctcccatcaaggactcaccactgcccctcttctaaaagaaggtagacctagacctctaaccctaggaaaccaaccactggtctgcaccaaactcattcctttctgccacactgctctttctcatttcaaatggtggctcacgttggcattgcgccgtcgccacagttgcccccagaagaggacctttccctgtcaggacccgcaggaggtcataacagtcctctctctttgatgccgccaggtagggatggtcctggctcctcttcggttccctgtcaagtcttctcttgccatgacatttggcagtgtggaaatgtggctggtattcgaaccagcttggatctcagccacctgccacaactacctgctgtttcagcagtcattctcaggagaggatcccaccgtgcacccccctccccgagacaaagcaacctggctccttttgaatcctcttctttcaccccaacatccgtcctctactcttgagcccctcctttccctgcttcctgcatgggacagacagagcaatgtggttaaatacgaagttgatgttgttgttactgctgtccatttgaaaactcatttaggtgctacccttattgtgtttggcaagtaacggtcccctaaagatgtccatgtcctgttctccagaacatgtaccattttatatttcctggcaaaggatcattaagattgctaatcagctgaatttaatttaagattatgctggattatcttggccaatgtaattgcaagggtactttaaatgtggaagagggaggcagtgactcaatatcagattgaagcatcatgagaaggtctacactggccattgttggctttgaagatggaaggaagccaagatccaagaaatacaggctgtctccagaacctggaaaagacaaagaaacagattcttccctagaaatgccagagggatagctcctctggcaacatcttgattttagtgtaatgaaaccctttgcagatttccagcctctaggactgtaagataataataaatttgtattattttaagcccttctatgtgtggtaattggttaaagcagcagtatgaacctaatacactcaccatcctgatgaagtctattccccttgactttctttacccgtggatcagtctctggggaagatctattttggagctcatgcctcaccactacaaacatcaattgcctcttctttgcttcctaaaggacagtgattttttttatgtcccttataggtaatcttggagaaagttcctttttgctgaaaccactgatatttcccaggtacaaaagggaaccctattcttttgttgttgttgttgctggttttgagagggactatcggtgttgttgcccaggctggctggagtgcaatggtgccatcttggctcactgcaacctccgcctcctgggttcaagtgattctcctgcctcagcctcctgagtagctgggattacaggtatgccccaagacgcctggcttattttttgtatttttagtagagatggggtttctttatgttggtcaggcttgtctggaactcctgacttcaggtgatctgcctgcctcggcctcccaaagtgctgggattacaggcgtgagccaccgtgc

SEQ ID NO: 1563698 - DNA, 4001 bp, Homo sapiens
aaatgaaacttttgcatcaaacactatttggagcagacttttgcccactgtcttgagtttttcccactgtcttaagcccctcagcagtatcatttggagttgatttatgcaacatgaaaccggatggattagagcccctaaaatatctactgaagcaatcatctcccagcacatacacagaccctaagtgccacaagaaagatgcaaatgaggtccccaacgtcccaaagggaggaaaagcagatctacttacaagcatttgtcacggaaaaactattggaggaatccaagtgatctacgtggtaattcaaatggaagggcttctcggtggtgttctggttggtgttgtataactgcacggcaaagcggaaagcgctgtgctcctgcactgtgtttctcatgaaaagtccacctataagcaaagggaacggagatttggcttgtgttcccccacactagggccagttaggaattggggaacaatatagataccggatacctctcaatgatactggggtgtgggattgaggattgatattcaacctgtgtgtctttcaagacttgtgaactcagattttggccaagagaaacctggcttttctagactgaaaagaagaggctagagagaagggagaagagacgagggagccgttttgggttaggacgatggaaccaagagtgagacttggttctttcttagtcggcagccttctttttttttagtcgccccccccctccgccccccgcccatccgcacagctggtcatcttttcattgtgtgaagggaaaggttgggaagaaaaacaatattgttccccctgctaccccaacccgttccccatagccaccctcccccgtgacaatacagggggttggttcagtaatggcaaaaattctaacttctagacttgtaaatacgacagaagccaagataactccctccaggcgcccaggagccgggctccagacagacacagcggcaattcatgaattcgtggtctgcgtgacttcgccgcttgcccgctcagctcctagtctcacccccgcctcctaccccatccaccaccaacgcctgctgctgcccgggtctgggagatccaaagtgggctccacctcccccagcaccagcctgtctcccgacagccggagaccacggactgagcaccccgggcccgggttatgcgccctggcgcggccagacagtcggcatcaccctgggacaacttccaggagctgcacgcacgccatggcaaagtccagagcagcgagccgaaaagcctcgactcttcacccccttgcagcatcccagcctcctgctcgcctccggtgctcctctcggctcggaaaacctagcagttcacccccactagccccaggagacccctctcttgtcccagaggctcttcagaccagccacctcgttgaggctcagattccccccgccccgccccccgccccgcaccatctctgcccggtcccggccccagtcccagttcccaggccacgcaggacagggacccaccgcagggaaagccttgccggggcagtggtctcgggtgagggagagcctggaccgacggctggctcgcttgcgcttacctatgctgatggtgttggggaatcctccgtgagaatgacccaaaagccccaggactaaaaagaagaccgcccggagcacgctttgccccattttcttctgcctggccatgctacgcctaaaacgaagctgacaagagcatgggcgcaactcaggagtcgtcaaaataataatagaaaaagaaaaagaattcgctggctcttacaccccctccccttaacttgctctcgctcactcttcctttccaccccacactagtcctcctcctcctccgctgccgccgcctcctcttcttcctcttcttctctctccctcttactctctctcttattcgctcgctctctctcgctcgctctctcttcctttcttgctccctctctctccctctcgctcccaggatctctcacaccccctcccttccccccacctcacttctgtcttcacaccaatctggaaggcgggttcattggctgcaagctgggtttgccaaagcgatttctgtccctatgatagagagagagagagagagagagagagagagagagagagagaataaaatcctaaaacagaacaaaacaagcaaaacactgaaaaacaaaaatagagaagcaaaagaaagagaacgaaagaataaattatcaagacaatctgagactctctccgcgcccccccccccccgcaaaagatggtaggtctaaagagggggggaaaaaaaggaaagagcgaaaaggctcagtgccggtgaattgggctcttccaattgggccagtagggggatattgatcaaagttgatctgacgtggaattaaagccgcacaccgcttagctctactgcaaactgcagccccggactgcaaagcctaggcgctggcgtttgtcaacaccggagatgggatcaatagaaatacaccactcctaacgtggatcaacctttcaagctgcaacgtcctcccaccctttaaaaaaaaatagctgcattgcctctgtgtttgtgtgtctgtcttaaagaaggggggccttaggagggccattagtggttactccggagtctttgtagagactcagagaagcagttcccatcacaatgcgcccgaagatgctgcgcatgcccggtctctgccgctccgcttttacagcagagatccgagggcgagtgagcaacccccacccccatccccgcagctttgggaggcgtgtccctccccttaaactagtgctgaggccggcttgcgggggcatggggtgggcggtgctgagcagtgatgggcagtatggggctgacttctttggagggcataggaaaaagtatgtgcgtagaggtagtaactaaaaggttaatgaaaaggacgctcaggctcactgaccaaggaggagggaggtgtgggaatgagctggtctgggggtggggattgaaagttgaggctggagaaaactgtacctagctgcattgatcccttggtgttgcctctggacttagcagcctaggcccctgactgatgacctcagaggttatcaattctttctgactcttcttcccctctgctctaaggcgagcaaagaacctatgaagtcctacagtacagaccggatttcagtgacggtggccttctccatagcatgctgcggatgaacctcctgggctatagactcctctccctagcccctttctcccgcaatgaggaaaaagaatcctctttatctctcacgtttttcacttttactttacagttactgtagaaggcatgggttttatcctccccacacctgctattttccttttcatatcctctcctcctggtctaagtggaacatgaactctcctgccagtgtaaagcgaactgatatacatcggggataaaattgggaatatacaggggatagaaggaccctggagcccagctagtatatcagttgctacagaactttggatttggcgagacgtagtctggagcctggaacaatggaacaaaatggcttcaaaccagaaaaattgtcctaggctcttcccaaatttctattcattctgataatgcataatttcctcccacccaccactcatagaaatcttttgtctccattttgatatttcatggacaggagtgaaggagaaacatgagagtctgaggagactcatcttttcagtggaagaagcattagggcaaagcgggtagcagaggtaaggttggtcatcccctgccaaatgtagacagggacatagcattattcgggaacatgggcttaggaggcatacacgtccaggttcgagtctaagtcccatcacatacaggcagtgtgtgaccttgaacaactttgttaatctgaaccccagttctctcatcttcaaaatgggaatattaatatctttctttataaggcagttgtgaaaattaagtaagataattga

SEQ ID NO: 1563699 - DNA, 4001 bp, Homo sapiens
tgaggcaggagaatcgcttgaacctgggaggtggaggttgcagtgagccgagattgtgccactgcactccagcctgggtgacagagtgagactctgtctcaaaaaaaaaaaaaaaaaaaaaaaaaaaaaagaattaagggaaagtgccaggcgcagtggctgacacctgtaatccaaacactttcggaggccaaagtgggcagatcacttgaggtcaggagttcaagaccagcctggccaacatggtgaaacctcatctctactaaaaatacaaaaattagctgggcgtggtggtacgcacctgtaatcccagctactagggaagctgagataggagaatcacttgaacccgggaggtggaggttgcagtgagctgagatcgtgccactgcacactatagcctgggtgacagagaaagactctgtctcaaaaaaaaagaaaaagaaaaagaattaagcatcctcctccctaccagccctataggaccctgaggctggttctacccagcaaggccggttccttcccattaaggaacttactgttccttcccctaccaggacttttccctccctcccacgccaccagcctccactcactgttctctggtagtctgctcaaggtcagagggcttggccttcacagaatctttcctactcctgtcctctccaggacccagtgatctgtctctccaagtactggtccaagtggaatatcctttgtaccccccgagacttgccccccaacaaagcccagtagttctccctcattcatggcccagtgggatcaatgttcctcattcaagggtattcccactcccctcaagatctccccagtcatgatccattgggaatggccctacacccttcagggtaggcctctacaaggccttgggtaggccagttggatgactcttactcacttagaatccctttcagatgacagtggtcttccccattcatgggttaatcaactcgcccttccattctcagtgtccctcacacagggacagctggtttccctcattcaaggaccaattggattacctgtcctccctcagagttcctcccctccccatgcaggaccctgttcagaccccccccccagtgaggaaccctctcaacaagggcccattcatagtgcaatgctatggcctttcattgcatctcagagtccccccaaaagaatcaagtgggggtacctccccaaagcccagtgatcttccctccttgtagtccaaggtatcaatcttttacccctctggtcctccccccagttaatgggattaatggtattacccattcatggccttcttcaccccaggcctaatgggatcacccttaatcatccaatggtgccgccccctcttaggatgcactaccaaccaccaatggcacaggatctccacctcccaggaacaatgacaacatctggggtctttccccaatccccgggcacagtggtatctcccccaaaacttaccacctcccacccgctaatggttctgccctctcaagggctcccaccaccatgacgcaaacgacccaacacccgcttccttcctctccagacaaaatggtttcgccttctcaggatctccttccctcaaagcccattatcatcacccgccgacggtgtcccctgcacgggcccaaaagtctcgtcccctccaggtctgagtaaggtaccgcctacttaatggcgctctcccagcccacaatgctaacagagtccaaccttcaaagccgcagagtatctcggaatccaatagtctcaccactccgagcctcagtttcccttctccagacccaccccataaactcagggtccatcccaaccaaccccttctcagagctgatagcacgacctctcgctaccccgcccccggtcgcctagccgggtggtctttcccaccgcgagcggcacctgcatccgctgaaactcctcctcagacagagcttgcgccatgttcctccccccacccccccgccagctttctgcgcagacgcagctcgcgcctcctggcagtattaaggtcggaccaaaccactggccaggaatggagggggtagaacctaattccgaagggcagcattttggagacgcagagaagagaacgaaaccgacgagtcaggtgaactgtaatacaacgttctacccgaatgtaagtcatctgattggcttttggactcttctaggccacccattgtgatacgacattattacatccccgtttcatgggtggactcgtcgctagggaagtctttgccgacagaaaatcacccttccgcggtattcctttaatgagaatgggtaacttaataaccatagaaatgaaagcggaagcttcgctctggtcttgttcccgcccctcctccgggagaccccaaaggggaatcccacctcttgtaaagcctttggcctttttttttttttttttttttaaggtttgacacttattttgttatcatgatactgcatgtcacgttaggtaaaggacttagccaccaataaaaatagcagagtggaaagagtgacagtgaatcaaacgaaaaagctacattaaaacaaaacaaaaacaaaaaacaaaccagggtggtgaaacaccaggctcattcaagtattagaattcactataaccctcaccgatctgagagtaagaaatggtatctcagtgtagtttttttcttattttcttttttctttctgtttttgttgttgttgttgttgttgtttttcttttttgagacggagtttcacttttgttgcccaggctggagtgcagtggcacgatatccgatcacagcaacctccgcttggcgagttcaagcgattctcctgcctcagcctcccgagtagctgggattacaggcgcccgccacctcgtccgggtaatttttttttttttttttagtagagacggggtttctccatattggtcaggccggtctcgaactcccgacctcaggtagtccgcccgcctcggcctcccagagtgctgggattaaggcgtgagccaccgcgcccagccttcttattttcgtagaatttaatgatttccctgctgtggaaaaatatttccagcagggccgggcgcggtggctcacgcctgtaatcccagcactttgggaggccaaggagggctgttcacttgcggtcaggagttcgagactaacctggccaacatggtgaaaccccatctctactaaaaacacaaaaattggccgggtgtggtggtgggcgcctgtaatcccagctactcggaaggctgaggcacgagaatcgcttgaacccgccaggcagaggttgcggtgagccgagatcgcaccactacactccagcctgggggatagagcgagactctgtctccaagaaaagaaagaaaaagaaaagtattgccagccaggactctttgatttctttcttgatttaattgactttattgaaagataacgctattgatctgtctatatacataaatgcacccattttaagggtacaatttagtgagctttgtctaatgtatacaaccttgtaaccaccatcacaagcaagatagggaacattgatttctttgtatcctatcccaaaccccaccccctatcccaggtaaccaatgattggcttcctgttactggattacatttctcttgcagagtttcatgcaaatagaatgagacaggatgtatccttttctgtctggcttctttcactcatcataatccttttgagattcatccaagttgtttcgtgtataagtatctttttttctttttattgactagtaaaattccatagtatgggccgggcgggctcagtggctcacgcctgtaatcccagcactttgggaggccgaggcaggtgtatcacctgaggtcaggagtgcaagaccagcccagccagcatggtgaaaccacatctgtactaaaaatacaaaaataagctaggagtgatggtacacgcctgtaatcacagctactcaggaggctgaggcatgagaatcg

SEQ ID NO: 1563700 - DNA, 4001 bp, Homo sapiens
aaagtatgttcagtaatttatgtgaacaacctgcagctatttcttgacttgctaattcaggtaagtgtttcttacatgctagacacttgataaatgttcaaagaatgaatatatagttttaagactgaataaacgtaaacttttatgcaatgtgctcacacaagaaatgcagtttgcaaatatgtatatttcccagaataaaaaactgtagtgaactccctcttcctccccacaataagccccaaaagcatggtatatgaagtattgtcaataaagatattaaaattagaaatcaaccttgaatagagctttctccagaaaattttaaaaactcaaataatgtttgatttcatttaagagagacttaggaaaaccggcatacaattgttctatcacagagagtcaaattcaaaatcagctgtgagaaaagttaaactgtctgaggaaaatgaatttcagagaaatgaggcttattttctcctcttggttatttctgaaagaacgttttgaagaaatccagtggaactttcctgttctctgaggggtttcaattgctcctaaaaaacatttgcctgaggtttaaactctattgggtgtgattgtctttctcactggtcaattaattttgcaaggagggagaagttaggaaaaggcaatgctaaatagatatgtctccagaaaaaggcacctcagttttctgcttagagattttttttttctcatctgtctccttctgtccccatcattcacttttctttcttaaaccaatatgttacactcaagaagtcatacccagaataaaaacctgcctggaagggaatccgtgtttgagtaaaacttcccttgtgcaatcagctccctgtcccgacatggtagttcatttacccaggcgtctatcacccttggagagcatgtaactttcagcctgtacttacctgtctgccgagagcgccgtgagtgtgaagacagacaccccaacagaggtaagctgtataaaggggatcagtttgcagccaatcctgccaaatagccatctgtcagccaggtacctgctggcatccactggagcacacgttattaggaggagcaggtctcccaaagccagactggaaatgaacaggtttggaacgtttcgcatggacttgactgtacagaagatcttgatcaaagtgatgttgccaatgaggcctatcagaatgataaccccataaactgcagggatgacatagaggatccccgggtgggaccagtcatcgttcacggggagatccgcactgtgactggagatgttgcagtgcatgaaatggtccacctccaagttcagaaggaaacagtcatttagagccatctctagattttttttcccacctaaaagttcccttagatgctatttcttaactattgattttgcaaccgagtgaagatgaagataagatctatgccgggctctttgccttctttaataaaaatactctgagtacatatatactaactatggtattcaaaactctctgtcactattttgacactggtgctgctctggctttcacatgaccagtgcaatacaactctaaattcaataagttaacaacaacaaaacttagccacaaaaaggcttagaattaaacccactctgcatcagttctttctacctccattctagtctgagtctccctggctgcagtttactaagaacttttggcctgctattttcccacagcgtctttcctgatatttagaatctggaggtttaaagtgggtagaaaaaaactgcactgagaaatcctcaaatcctataggcaggatgctttgcacgtcacgggcttcaccagcaaacggcagctccgctgagctgaggctctgaagaggaaccagtgttacttatagacagagaatgccagccccctgctggacacttcaatcactgcccagttgcctgctttctccagatgagaagcaaccagccgactgcagttcctacctagcttaacagatacctttggcttctcatgtaagcacatagcacctagggtaggtatttaataaatgttgctagcattctgcaaaggcactgaaaatctttctgatactatccccatgaatccagatggggatttacatcccattttctcattttttctaattcattagaatgacatgtcaatattgctatcaaatgaggtctgtctttgaattaaacgcacactgatgcacagggtgtccatgtgtgagttatcccactcagtcttcccactgcctctttgaacagggactgatcctcagaaacacatgcacagactcacaccttaaaccttcagcaactgacatctggaaaagccagaagcacaatgcacacatgttctttcctgtagatttgccaagccattcctattctgtttaccagggagaaattaaattgggaaccagctgtattcttaactctcaatgatcaatagtcttttccagaaaaatgggtcttttctcatctgatctaaaaattttatgaatcggcattttgatgcagctatttgcatttttaattgaatgtttgccatgttttatagcaaatatcctctttatagccctgtgtggaaaataaagaactataaaagcgtgatagatacaatactgaggaattgagtgggtggtaaaagaagtaagttatcgttgaaggagtgctagaaaaagcttaattgaggaagtgctattagaatcaggcttagacctttagccaacaacttctaaatacattattagagtgcatctttatgacgtatgtgaagccagctcctccaggtacatgacgtgaagccagtcactaacaggtgaagtctcatttttcagaacccataaggaataacaaaacttgcacttaccatgccagggcccacaaagaaagcccccaactgtgttgttatggacatttccagtggcaggttccaacactgaggctgctgccatgctttctatgtaaatatgaaaggctcagcgcccctctctgccagcaggagggagactgatgctgcatggctagaggtggaagagcttctcggcagagatcagtagcaccagtaaccagccaatagccatgagcccagtggtgttgattagttgccagcaatatagcttaatgatacagtacacaggctctgcttcaatcctggctccctcatttataattatggcaagttacttagtgtcttaagcttcaggttcctcatctgcagggtgaggagaacttatgaagttagatgaaatgattcatgttaagattgcatagtatttggcacatagtaagtgctcaattaatattagcacttattattattatcattattagattgagggggaaaggcttactttggaaaagcccaatgagttcagaagagtgattgacctcagatcaataggcaagcactcatacgagtgaattagcaactcctttatttacttgaaaaaaatttatcaaacatctaccagttgccaggcactgagcaagaggctgagaaaaatagcatgaagatgtgtactctcacagctctttagaccccaacccctctctggagtgaagcaactaccttttctccagaaaagacgatatctttaaaggttaagtgttgacaaggtcttttgaatgaagaaaatcatatgtgcctaggatcaaggcataaaggaaagagcatgacattgagcagagggacatctataaatccagagggtcacccagattggaagacaggggtggaaaaagaacagcgtgaaatgcagctagaagcaggtttgggtgagattgtgatggatcttgtattcttgctaagaagtttggtctaaaaggcatatttttggttcacaaagagaacttctggatgttgtttccctttatttctttagacacccctgtgtgctgagtcagcctcactacttaaatctaattgggtggttagtgtttcttccaatgtaagttaaggggatgctgatagatattgatttctcatagctgg

SEQ ID NO: 1563701 - DNA, 4001 bp, Homo sapiens
ttaaacgagcaatgcatacttgatcttgtttcacgaagcggggtcgtgtcttacttttttctcctgattttttgtctaccaaggagattaacgctgttatctcaacttcctcaatacaagtatgaatgtgcagcaccgcattataacctgggcagatgatggatttgtgctcaataatcactatctgaacatcaaacgtgcgtccagaatggcagaggttactaggatcacaaagtatgaatcctggaagaatctcttcttcttcaattcccttcagtctgattttgaggttttcacctggggctacaaaatcagtttcagtatcatcagaaagtattccaagaacttctacattgtgcttgtttggcatcatcacgagctgctggcctttaaaaatggacccggattccagctttcccaggaccacagtgcccatatctttgtacttatccacaattggcagtcttattggtccatcaattgatctgttgaagtttggcaagttatccaaatacggaataaatggtaatccagtgtaccaagggcagaaatctgactgctctttaatatttgctccggtcagtcctgagcagggcataaagtgaatgtccttttttggactgaagcctacttttttcaaaaagggcaccagtttttctttacattcttcatatctctcgatgctccaatttactgtgggatcatccatcttattaataagcactattaaatgttttacccctgccgtttttgccaacatcgcatgttctcttgtctgtccacctttttcaaatccagtttcaaactctcctttcctggcagagatgaccagcacagccaaatcagcttgagaagcaccaccaatcatatttgggacaaaactcttgtggccaggggcatctaaaattgtgaaatgtttcctttctgtttcaaaataggcacgacccacttcgactgttttacccttgtctcgttcctcctgatttgtatctaaggcccaggacaaataccaggtttctctgtttttttccttagcttctctttcatatttctccagtgttcttttgtcaaccattccagtcaaaaacattatctgtcctccgatggttgacttgccagcgtctacatggccaatgaatactacatttacgtgttctttcttaggtgcacctgagggtacgatcacagatttggattttcttatttcctctttttcctccatcatttcctggccactttcttctgggggccctgaatctcccgaggaaccacccccaggctcggcttcacttacttctttactgtgctcccatgattcttctagggccatttccacctctccattttctacaacaggttctgaaagttccatggtaacggctgaattggaaccttcaagcgacactaacggttcctctcgggaaggttccacaggtgccccccgtcccatccttttaccttgagggtatcccgcgccggtgcaggtttcatcgttgctgccggagccggccgggagggtgggcggctgagtcgggccccgcaggaaggacggcacgaactccgcggcgtgtacgttaggcacgaagggcttggcgttgacgttgagcttacggctgaaagccgagctgaggggctcgcgctgggcctcggccaccgcagaggagactccatccccgctcggggccgaccccggggattccatgtccacctggtcccagcaatcgggcgccgagtcgctgctgctgctgcccgaatccatggtctcggaacttgctgtgtggcagtgagggagcgggctcaacaggccagaagagcgggctccgccggcggggttaaggcagcaagagcgaagggccaaggggtagcgacacgaaccttagctgcaccgcggaggcagctaagcgccgatgctgcattcgcaactgcggcggcagcagcagatatggcggctcaacactctcctcttgtgtgtgagcggatctcctcccccaaaccccaaccacttccgactcctccacccccgacccaacgccgggcgtggattgacccctcgctgctatccgtacgcttggcttccttacttcttcttagccacgggctaagtccaaaagtattattttttaaaacgaaaatttccattcacttttttgttcacacagtctggcagagcaatttgaccacaatctgatgattaaacctagacaggaacacatggtatacaattctaccaaaagattcaagtaaaagtgatcatttctattgaacaaatgggaggcaagataagggttaactatacagaaattcagaaacccagcaactgaagggagaggcaaggaatgggtagggagggactcatgaaatatatgagtctgtagccgaacttaggaaatgcaacttaagatcactcattaatttgaaatccacaggccttttgattttccctttccagtgggcccccataagcctgtaacttctgctgatggcttctatagtttaaggatagggttacaacttcttttcatgttaagcaccctggctgtctgaggggagagaatttccaaggagatccttgttccagtgaagcttccagtcacttcatatgcagatgcctgcacaatggctggcctgccattcaatggtggatcacgtagacaagcacaggactcagatcactcttgttttaccaaccaactgaattctgggtttatctgcactactccccagcacctccctagtacatcctgcatccacaggcctcgggttttcctgcttcattccggggggcctggaatcctactcactgcactggctttgctctaagaaacaatcagtgtcatgttgaacccctctacagtttatggtaatgagacagggctgtaggtgtcagcctaattaaaccaattaagacttctgagatgaacaaagaccttaagaccctaatcaaaagaatctcactctcagaaagtgttaacagttgagtcaaagcctcagcgaccttgtttgtaaattaatttagtgcaaactgacatagaaaatacaaacttattctctgaatctgtttttagtcttcatgtactcaaatctgtcaccttttgcttttatgaattcaggttttgtgacatacctagaaagactattcagtccaaacaatctgcttagtacaagatggtgtcacatagatggatttatttttttattttgagacaaagtttcacttttgttgcccaggctggagtgcagtggcatgatctcagctcactgcaacttctgcctcctgggttcaagcaattctcctgcctcagcttcctgagtagctgggattacaggcgtccgccaccaagctcagctaatttttcttaatatatatttttagtagagacagggtttcaccatgttggccagactggtcttgaactcctgacctcaggtgatccacctgcctcggcctcccaaagtgctgggattacaggcatgagccaccacgcctggcctcatagttggatatttaaatccaacaacaaagcaaaatattataaaaccaagtacctgattataacttgagaattgtgttctccagactttaggggtaggaaaaaagacagacttggacccttgatgttttcactctggggctgccactattatactagctctgtactgtttccacaccttcattctttttgcctccggttatggattaattatttacagtgacataaagagaatgtgcacacctattcacaataaacaggaagaactgagaggtagaatgtgcagagagaccctccacacaagtgctggagccttcttggacattgtgtgaacctagaatggacatttctgggagaacctgtcaaggttttggcagccgtgttcacataaggtaattcatgcaaggaagcaggagacatctgggatttttccttcacctgggtcgaatgcattggtcatgaacatattggtatgactgctacttagtgatatctcagagaacagaggat

SEQ ID NO: 1563702 - DNA, 4001 bp, Homo sapiens
gacccccgtacttcagcatgtctcggttggatgttttcggtagcggcggacaggaaaggaggtttggggaaggagcaggtctggacggacccacctgtcaggtgctcaaagttccctttgccaaagatgagcttcctgtccggcgttttggtggacacgaccattgtctgcaccacggaccagccgtccagcgtgtgcaccagcgctgtggcctccgccacctgccactcggctgcggggacacaagggccaccgtgagagacgcttctgcccggggcccccgtccacacctgcccggggaggcctcctcctgcccttgagacaatctccccggagaaggcaccttgagccgccgtttgtcccccgatatgacttcgtccccccagggcctctaagtaggaatctgacgggagaaggacaccggagccacagcgggacacgagggcgaccctgccttacatggaatttgggctccaggcgggcgcagcagggaacccgggagctgcgggtgctcaggggattactgaggaaccaccggcaggtttggggagtagagaggcaagaggtctgcgcgctgttctgagcagttcggggcttcatctgttccaggaattagccattttggaaaacacccgtaaagaaaaaccactcatcgactacaggagcttccaagggaaaaatcaacctttatgagactctgacacgtgcagcgacttattcatttgcatttcctcctggggggtggggggtgggactagacacagattggtccgctggacgccctcccttccctgacctcaaacacaccgtgcctacctctaacccagagcaagagaaacgtaggtcccatcggcgagaaccgccccggcccacccaaccccaccccaccccaccccaccccaccccaccccacggaccccacgggccccaccccatcccacggactccaccccataagctccgcccccgcacttttaccccataggcccctcccccgaagccccgcccacgcacctccaccaatgatatcctcccctcttccccataagccccgccctttcacccatgggctcctcccccgaaccccacccatgcacctccacctatgagatcctcccttcagagccccgcccccgcatcaccatccataagctcttcccctcagagccccgcccctcagcgccacgccctggcatctccaaccatcagaccctctccttagagcctggccccctgaagccccgcccctacgtcgccacctgagctcttcccctcaaagccccgccctgggtctccacctatgagattctcaggtcagagccccgtccctgaatctctacctatgagcctccccagagccccgcccttgcatcgccagctatgattctcccgagtcccgcccctgaatctccacctatgaaatccttcctgcagagccccgcccttgcgcctccacctatgagattctccccacagaaccccgcccctgaatctccacctatgagatcgtcccttcagagccccgcccctgaatctccacctatgagccccctcccctcagagccccgcccccaggtctccagctcctgtttctcccccgaaagccctgccgcggtcacctcgagtcatctgcgacttccccgggccccacttgacgtcagggtgaaccagacacacgcgctgggtccccgccggcagcagaggctctccccgcagcagctcctcctcggcgttctcgtccgcatcttccggctcctcctcgtcgtctcccgtgcggcttcggccgccgtccgcccgcaggccccgccctccgccccacggcccctccagattcccggggctcctgcggccgacagcggctagcgcgcgcgcggggcaggacggcgcggctgcccgcggagccgagcggccgcggcccacgcgggagagccgcagccccgggcgtacggcggcccgcagggcccacatggcgcgtctggaggctgaacgttggggcgggggctgcccacaggccgctcctcatcacgtgctcgtgattggcgtgcggccggggctggctcaccagcgcctctccccggcacaggccgtgctcctcattggtcatccggcgtcacgtgctagtgattggcgtgcagctggggcgtgctcaccagcgcctctccgcagcatagggcgtgatcctcattggtcatcccttgtcacgtgctggtgattggcgtgcggccggggcgggctccctagcgccgcgccccggcagggcgtgctcctcattggtcgccccgcatcaggtgctggtgattggcacgcgctgccggcgggggaggcgggaccgggccgcttcttgttcggcgtgggcggctcctggcagacccatcccgcggtgcagccgccggcccggtaggcgccaggaccccgagcctcggcggcggcggcggcggcggcagcgctgccttcactcacctcgtcctcgctcccgtcctaccccgttccgcgctgggtggagtccaagtctgattgcgagagtccggaacgccgcctcgggggcttgactccagccccggggatcgagaacggcgcccaggggtccctacgtctgccttgggggctcgagtcccgccctgggcgtccgtgacgtcgcccaggggtctccacgtctgccctggaacctggagagccgccgtgggggccccggaagctgccccggagtccccacgtctgccctgggggctcgagtccagctctcagggtcccggacgccacccagggggtccccatgtctgctttgggggctcgagtccagccatgggggtcctggacgccgcctcggcgtccccgcgtctgccttgggggcccgagtcccgccctgggggtcctggacgccgcctcggcatccccgcgtctgccttgggggctcgagtcccgccctgggggtccccgatgccgcccgggggtcctcacgtctaccttggagactggagttcccccgtgggagtctcggacgccaccccggagtcaccgtgtctagccttgggggcttgagtccagccctgggggtcctggacgtcgccgaggagcccccacgtctgcctttggggcttgagacctgctctgggggtcccggtcgccgcccaggtgggtccccacgtctagccttgggggcttgagtccagccctggggggcccggatgccgcccgggggttctcctcgtctgccttgggggttgggtccagccccaggcgtcctgaccaccgcccaggggcccccacgtctgcctgggggcctcaaattcagtcctgggggtcccggacgcctcccaggggtcttcatgtctgccgtgggcctcgagtccagccgtgagggtcccgaatgctgccttggagggtggagtccagctctgagggtcctgaagtcagctttgggggttcgaacccatccatcccaggggtccctgagtctacattaggggctggagtccagccttgagggtctccactgctgccttgggggcctggatgggatccagcgggtctgagtccagcctcgggagcccctgcggtggagctctgagtggggcaggggcctgggagatgccaggaggatgagagcggcgcccccctggtccaggggacagtaagaggcagccggtctcagagaagctaccccaaaactgttacccgtggtgtgcagagcgtcctgcaaccccagccctcaccaggatttcttgcgtttttcaggaaatcggttgtgattggcatgttccttaagcgtctgcaggaagccgaggcctttttggtatttcaggaggggttgctaacccccctccttgtaggatcggggtatcccagctgctaattcccctcctaacagccctgcagcgcctggattggaggtgtgacaggtggcatttttggcccgaagtccctaggcaggacgggtggctgtagcctgcgcgtttgtgtaaattaacctccctttttagttctgtgaagggagaacgtga

SEQ ID NO: 1563703 - DNA, 4001 bp, Homo sapiens
tgttgaattaatactgaagaggagatatggagcacaaataaaatgttttgtattaccatgttatttaaaatgctctattttaggccttaatcaagacccacctttggcaaaattatcaaggggtaaagtttgtcttcagacttctagcacagctctctctgccctctcgttaatggagagaaaacaactctaaagaaagaaactctttaaatgatttgcactaatatgtaaatgaatgataatatttgacactttcctgtattcctccccaaccagtggtgtttgttctctcttaagggctggggagaagtttatgccaaaataattaatctctaataatataatgtctatttcaagcatcagttgcaggtaggcaaaggaggatggactactttttgagcaaaaaaatgaagaaacttttggtgcccctcagatcaaagtgattaactgtccattctaggtgtaaggctggcatttttgtgttataatccaggtaactcctaagcacaatgcccaccccaaattctaaaaagttagattttttataccatttctaaaattcatacaacacgggtccctcctcaggccacatgccacaaagtgtcccttggcattcactctcagtttttgttgctcttttccctttgttaactgcaagataaacatttcccaagctgaaggtctgcccttacattttttctggtaccgatgtgatgcatttggtgatatttctaactctgttaggactccctggacaaccagaaagttttatgttgctgtaggatttagtcttgatcccccaactcaagattttacagaaggaaacttattctttaaaaaagaaaaaagaaaaaaagaagggaaggaaggaaggaagggaggaagagagaaggaaggaaaagaggaagggggaggaagggagagggaaggagggaagaagagaaagaaggaaggaaagaaggggagggaggaatgaagggagagaagaaggaaggaaggaaggaaggaaggaaggaaggaaggaaggaaggaaggaaggaaggaaggaagggagggagggagggaaagaaaggggcaagatagggggaggatgccctaaacctccacctgctgattttggtttaaggaaaaaaattagctcactaaagtctttcctggggttaatgggaaatgtggatataactaaaacaaagtttgaaggtatgaaattttggaaatagaatactactggcccacagttgttctggggccattgcctaggttactcaggtgtgaacacctgcatgggatcagacttccatggaaagcggctagagcatagggatgcataatttcatttcaggtagtttttacaatctgatgggaagcctggcttcacacagaaaaccaccgttcgttaaacatgtacaaagaaagactatgacaaatagctctgagggaaatggctcctcataccagcttgtcaagccgaggacttctatgaaagattgatttgtctttctaattacagcctgaatcaagttaacagcttgtataagacaacatcaggaagcaataaaaaaagaatcatgagagaaactaaacgaaagcttggatgagagcctttgagctcaaatcttgacttaaagtatctcgaaggctctctttaacccttctttccttctttccttcattctttaaatttttttttttactacatattgcagtaaaactaatgtatctcaatcagcgtctcagctcccaggtgggctgtgtcttttttccccccattacaatctttcttataaacaagagctgtcaactactcaccaagtaattcaccgctcaaatgtcttcagtttactgcctgcgcatgcagaccactggcatagctacctcagtgtgtccatttctttgcatcctctatgcattcacaatcctgtcaaggactccagtctgttgacaaattccattaatggggtaaataattgaaagcgttagtaaatgttttgaaaatcactcttcagcatccgcagaccaagacttggattaggatttagagtgacacttctaatcctttaaattgatcccacctgtagcagagttagtgctgacctaaatgcaatgacccagagattaacaaacaaatagagtcctctggataaatacgtcctccacagactactgccttcttttacctttcaaagtcagacacaaactctcagattttgcctctgtgttcttccttgttccattctgtctaataaccaccaatcgccctttctccaggacagttctaaatgccaaaacattcatcagctgtgattccagcccagaatataaaaggtgatccaggctggctccctgcaaaattcaaagcaggtgaattttgtctccttctcctattccccttaagtgccttcactgcctttcctcccaagagagactccctacttccctctacacctttgtacagagacattgtttccccatactttagatgtattccttttccttaagaagtccctctctgtcctgggcatcattcactcagggccctgttctggattcccaacgtgagaactgaggtgttaagggctaaaaatgacttatattaaatgagaaatgttttttaataatagttttattgagatataatttatctaccacaaaagtatataatttagggtttttttaaagtatattcacaagcttgtgcaacattttcattattcccacaaagaaattccattcttgtttaaaagtcactccccatttctctcctcctcctagccccaggccaccactaatttactttctctatggattttcctattctgaacatttcatataaatggaatcatacaacatgtgatcttttgcgagtggcttctttgtttgaatgaaagaaggacatggatgaaattggaaatcatcattctcagtaaactatcgcaagaacaaaaaaccaaacacactttgtttgaaaaacaaaccgttttcaaggttcatgcacgttctagcctgtaccagtacttcatttcttttgtggccaaataatattccacttttttgggtataccacatgatcagttgatggaaatttaggttgtttccaccttgggctattatgaatactgcttttattacttttgtgtaaaagtttttatatggacatattgtttttatttctctttggcatatacccagggaattgctgggtcatataataactctatgtttaacattttttgaattggcaaactgttttccaaagtatatgcaccatttggcattcccaccagcaacatatgagggttcttttttgcctacattcttaccaacacttgttactatctatcagttttttatttaagtatgacaggcattttatatgtacattatacttatatgtacatctttatgttcacaacaaccatgaaggtggatattacccattctttccattttgtaaatgaggatgccaagactgagataaattaggcaataatcatacttactgagtgccaatgatgtgacaggcatttttggaagccctgtctccttagatcttcacagtgaccccacgagatagatactatttgaattcccagacatccagagaggttacagtaacttaccaaaaatcacacagccactggtcagtagagacagaatttgaactcagacactctaattctagtaagtaatagagccagaaaatttaaacgcaagactatttggctccaagaaagctcacgtttatccttgatatattccactaatgcacccttgtgctatccctccaaagactgcttgcactctaatagagtctccagaaacacaccgtgactacccaaaggaaacaatccctaattgtagaatttcaggtgacctgatggaaatactggtgcaagtgagggccccagttagcattctctatgtagtgctgcatggtgccatgagcaaccccagtatggattttatgagaaggttctgatgaggactaggatgttcaaggg

SEQ ID NO: 1563704 - DNA, 4001 bp, Homo sapiens
gcttccctagtagctgggactacaggcaggtgccgcaatgcccagctgatttttaaatttttttcctagagatgtggtctccctatgttgcccaggatggtctcaaactcctggcctcaagcaatcctcccgcctcagcttcccaaagtgctgggattacaggcctgagccaccaagccgggccatccctgtatctgtactggaaacagaaattaaaaccgtggtctgagttctaagaactcaaggcagcctcttcccagagctttagggccatttcaggagaacagacttcttcccatcggccttccaggcagtgacagtctcaggcagttcaatgctattcccaagaaacaagcccattgaaagtttcaggactatattttacaaaaggaaactggtgaaatcccaaggcccccttcacttgctgtaaatcaccccctcccagcagctgaggctggtatctccattccctccagccccagagagacctgggcgaggcagtaagggggagactcggggtttggggcaatcctgcggtcaaagtggggttctccccagtgcagaccaatctgtcacccaagccagtaggaacaggcaggctgaactgaagcagcttgagctactcacccgacatggtcagtggcgccgcgggcagtgggcgcggacctgcagacctgcgcccgggagcagtgggtggacttcctcgccacgaacccgcagagcagaggcgccgtctccgggaatccgcgtggatttccaggcctgggggcgacagcgtggcagtctcgacaccctcggctgcaggccccgccagtgtcacccccggcctcctacccactccatgtcacctgcgccccacggggcccctgcctcccccgatgcccctgcgacctccacgccccgcacttcctccttggcgctccaggtcagcctcgtgccctctggccaggggccccttgaccccctgtcctccccacagtcacctgcgaccccgctgcgtcttaacacccatgcgcccagcaacgacaacgcccccgggacaccacccgacctcagcggtgtcagcagctgccccgccgccccgcgcacctgcttggagttctgggcatcctcttcctccaccccagctggcgccccccggtcacccctctccactccctggaccacccctgcgctcccggacgccagtatctgcacctcctccgagcttgggctgcctctgcccgcgccccccggccaggtgccccctccctcgtcactccagtgcagccccccggcctacccctgcgcctctcgccgcccctcctccccgacccggcctgccgcccatcctccccaagcgcccccgagccccctccacgctctgcacctctcccttgccccgcgctcccgcagcctctgccttgggcccgcgcccccctccccaagcctcccagccctacgcccgcgccccgtctgtcctccgtactccggcagcctccgtctccccgcgccccgccgcgcctggacggcctgtattccccagcactcggtgccctggctcggcgcactcacccctaagcgctcctggcctactcccgcgccccgcacccctcccctccttcgcgcttgggcaacctctgacctccagccccctgcgcccctcgcccctcctttgcactccagtccggcgcccctcccccagcccccagcctcggcctctgggttgcgcccccgccccgctgtacgccacccaccctcgagacctcctaggcgttcgggcagcctctgcgccccccggccccccgccgcgcccaggcctcctccactgcccacggtcccctgcagccccctacagccccccgcacctcttccgcgctctggctgcctcggcccagagccggcgctggaggccccgagggcagcgattggcctctgtccggaagcccggccccgcctccgccagcccccgcgggcgcgggtcctctcctcctccctgcagcccctgcccgcaagcccgcgcgccgcctggtgcccagccccggctgccgggaagagagacccgggaaccgccgggggctgcgatccacgcccgcgccccgcccctcgcccgccgcggccccttcggcagtcggcggtttctaggtttggacatttaacctttaatcagccagccccaaagtaaacgtttgcgatgacttaaggccctgggcccaaggccagcgcgcagcaagagtggaggccgctctggaagcctcccagagggagaaggcagggcttatacgcgatcttgtcgaatgcatgaaaaatgcacgtgcgcgtacttacacgcataaactgaatgaatgaatgagtgcacgaaagaaagaataaatgagggtttcaggcttcagctgttgaatgcatagcgagcgagtggctgtacgcacgcggtgagtgcatgtatgcgtgagtgcatgtatgcgtgaatgcatgtgaggcgtgaatgaacaaacaactactcatgaatgagcaggccaggaaatgaatgaaccattgaatcaatgtttgcgccaaggagggaatgaatgcattcacacatgaatgcatgagttgaaggcatgaacgagccaatgcatgtatgaatgaatttagagatagatgcgtgaatggaggtgtgactgtgtggaaaatataggtgaatgcatgcatgcatgcgtgaaggcatgaatctatgaatgagtgaatgaatgagttgaatgcatgaatgattgagtgaacaagtgaattcatgcatgcatagtgcatgaatgggtgaaaggtgaattcatgcatacatgagtgagtgcatgaataagtgaacaagtgaacttatgcatgcatgagtgactgcatgagtgaataaacaagcgaattcatgcctgcatgagtgagtgcatgaatgagtgaacaagcgaattcatacgtgattgagtgcatgaatgacttaagaagtgaattcatgcatgtataagtgcatgtatgagtgagtaaacaagtgaattcatgcatgcatgagtgcacgaatgagtgaacaagtgagttcatgcctgcatgagtgtatgaatgagtaaataagcgaattcgtacaagcatgagtgagtgcatgaatgagtgagtgaacaagtgagttcatgcctgcatgagtgagtgaattcatgcatgcaggattgattgagcacgtgaaggcatgcatttatacaggaatggatgtgtgtgtgagtgaatgaagagaatacatgacaagtgaatacgtggccgaatgactgagtgaataaatatgtatgagtacaggaatgagctgaacaaactagcatgtgtgttaatgcacacacacgagtgaatgagtgaagactgcatacacttcaggaattaatgtattatgtatgagtgaatgaatgaattgaatgcatggacaagttaatggatgcatgaatgaataagtgaaagtgtgaatgcatgcatgcatgcatgagtgaattaagtgaatgaatcaatgaatgtgtgaatgcaagcatgtatgagttcatgagttgaatgagtgatgactgtgagtgcatgcatgtatgagttgaatgagtgatgactgtgtgagtgcatgcatgtatgagttgaatgagtgatgactgtgtgagggcatgcatgtatgagttgaatgagtgatgactgtgtgagggcatgcatgtatgagttgaatgagtgatgactgtgtgagggcatgcatgtatgagttgaatgagtgatgatggtgtgagtgcatgcatgtatgagtgcatgagtcgaatgagtgaacttacttggagaagagccttcacgtgtccatccgaaagagacagcaaaggaacccagattcttgccgaaactgtcaatggcaatcaacgcaagctacagtcaggccttcctgatctagatgaatacctaggatgatcgatggtctgtggataccaggcactgtgctgagggctgttcctgcatcagctcagccttggggacaggtatcggtg

SEQ ID NO: 1563705 - DNA, 4001 bp, Homo sapiens
ggcagtgactgcaccgggtggctgccgtgctcccgcgccaggcgctgcatgcgcgtgaagaccgccagggcgccggtgtagtcgcgcgccagcagctggcaggaggcggcctcgccaagcgcctgcagcgcggccaggggcagctggggcagctggagctgggcggcgcgctggaagtgaccggcggcggcggccggctggcccaggtcgcgcagggcggcggccagctcgaggcagagggcggcggcggcggccggctggcccagctcgaggtgcagacgcaccgcggcgcccagggcgctggcggcggcctgcagcggctccccgtaggcggcggggcagaccaggcgctggcgcgcgtcgcgctcctgccgcaggaagaggcgggcggcctcggtgagggccagcgcctccccgggcccgtggaagagcgcctgctggcagcgcgccaccgccagctggcaccaggccgcgtagggcagacactcctgggcgcgcagctcccggcccagctgtccgaactgctcgccggcctccgccacgttcggcttccgcaggaaccgcttcttcagcttgttcgataccagccggtagcgggccaggaagtccccggcctcgggtcccgggccggcgccgccgccgcccaggcctgcagccgctgccgccatgctcgccgccccaagcacttcccgacgcgccgccgcagctggcgggcgggccggggcggggcgacgtgccctgcgtccccctcggcgggctgccgccgtgcccgcgccggctccccagcccgagcctgccccttgccctgatgaggtgcaaagagcgggatcggaggcggggcctggccgggctgtgagcggcgtatgcaaatcgagggtctcggggatgcggatccaagaccctgggaaggtacgcggggcctggcggggcaccagctgctgctagctcggctgcaatgcaagtggtctaggttgctaaaggcatcccacagcctctccatctgaacatgacccaaacgaaactcgtgaccctaattccatgtctgcgcatttctagactgttgtccccccccccccccgccccgactactcagtcctccgtcttccggtccagggccccttgccaagcaccgggtccacctctccgtccccaccccggttgccttagaagtccgtcctgtcgcaacactgcagtcatggtcttgaggcccacccgccccaacgaacaccatcatgctgaggactttcccgggcaggccctgacttgctcagaaccagcgggggtgtccccttcccacccagggccactcccctgcactgtcacccggagagactgctcctctgtgccatccctggctcccacccaaccccagacccccaccacctctccatccctccagctgtggaggtctcacaaccccccaacccatctcaccgcccccccacccccaccccaaggcaaagtgactgaagcgggcagatggcttccttgaaacattttattgacagaattaatgaaggcccaagactttggggcctgggttgtggggggagggtgtttaaggccgggggttcaggccgggggatttggggccgggtgggtggacgagtggacctgtcaggtcccaggggccgggtgtcagaagctagtcctcgccaggggccacttgagagatggtggtcgtgttgaaaagggtgctcagtagcctgtcgttgtgaaccaccatgtccagcagcaggggagtgatgttccgctctccgctgttctgggcctcgttgcccgccagctccgggaccttggccgtcaggtactcaataaccgcagcgaggtagaccggcgccgtgcgactcaggcgctgagcgtagtggccctcccgtagactgcgctccacctggctcactgaaaacgaaagctccgctcggacggtgcgagagcaggtccgcccccggccgccagcaccggaggaccctcggcgtctcctcctcctcggcatgctgggcgttgagtgtgctatctcggcttggcccagctaggcaagatggctctcaagaggacagttaccgcgtccagtactgtgtatcctagcgaccagggcccagcccctcattggctagggagccgagaccaatgggcacgcacatccggcgacgggcacgcatgtggtgacggcccctcacaagggacacacgtccgtcaggtgacctcatcactttcccattggcctcgagggagcaggcctgggcctagaagtggctggagggccgtgggggtggggtggggcggggcagggggaatcgcgctggtgaccctctctttgccagtgggaactttccctttctactggatgggaacaccgtgggaaagacaaaggggtgggcgaggggaggacgggtaccacgccttcacaatgttgcacatccatcacgaccacctagttccaaaacgttttcaacaccccgaaaagaaaccgaaacccctgtacctataagcagtcacttgccgcacgcctccttccacaccaccactaccagcccccacaccctcccacacacaccccctgcccccgcccatacacacgttcccgatagtccctggcaacccctagtccatctgctttctgtccatagaggttagcctgttctggagatttcctatagatggaattatacgaccaaatgtgaggccgtgtgtgtctggctgctttcacttagcgtaatggtttcatcagggtgcatccatgtagaggcatgaatcactacttccttcctttgaatgactgagtacgattctgttgtatgaataggaggccacattttgtttacccactcgtcagttgatggacaggttatttcccccttctggctattgtgagtggcactgccatgaccatctctctacaggtttttctttgaatatctcttttcagttcttttgggtctatttctagcagtcaaactgctggctcgtgtggtaattctgtttaacttattgaggaaccaccaaactgatttccacagcagctgtaatctttcgcattcccaacagtagtgcatgagagtcccaatttcttcacagcctcatcaaaacctgttttctgtttgcctcattttgttttgtttacagtagccatcctactgggtgtcaagtgctatctcatggtggttttcattcgtatttcccaaatggctaatgatgttgctgtggtttgagtgcatcccccaaattgtgtgtcttggaaacttaatccccaaattcacatgttgattggaggcgcagcctctgagacggtaattaggattagataaggtcatcggggtgagacccccaggatgcgactggtggctttataagaataggaagagaggcctgaaacgacatacacgctcttgccctctcgccgtgtgataccctctgccgtccccagatgccgggtcacttcccagtccccagaacggtaagaaataaatttcttttctttataaattgttcagtgtcgggtattcaattatggcaacagaaaacagactaagacatcttttcatgtgcttcttggccctctgtacctctgctttggaggaatgtctattcaagccctttgcccattttttaattcggttgattgtattttggctgtgggcttctaaaacttattcatatattctggaaaatagactcttatcagatatgtgacttgcaaatgtttctcccattcactttctggatagagccctttgttgcccaaaagatttacatttggatgtagtccaacttgccaaatgaaaagatatctgtggctttgcctttggtgtcatactgaaggagctgttgcctaatccaaggtcgtgcaaagttacatctccgttttcttcttagagttttatagtttcagcccttacatttagatctgtgatccattttgaattaattctttacatgatgtgaggtaggggtccaggggccttcttttgcatgtggctatccagttgtcccagcgcagtttg

SEQ ID NO: 1563706 - DNA, 4001 bp, Homo sapiens
agtgactgcaccgggtggctgccgtgctcccgcgccaggcgctgcatgcgcgtgaagaccgccagggcgccggtgtagtcgcgcgccagcagctggcaggaggcggcctcgccaagcgcctgcagcgcggccaggggcagctggggcagctggagctgggcggcgcgctggaagtgaccggcggcggcggccggctggcccaggtcgcgcagggcggcggccagctcgaggcagagggcggcggcggcggccggctggcccagctcgaggtgcagacgcaccgcggcgcccagggcgctggcggcggcctgcagcggctccccgtaggcggcggggcagaccaggcgctggcgcgcgtcgcgctcctgccgcaggaagaggcgggcggcctcggtgagggccagcgcctccccgggcccgtggaagagcgcctgctggcagcgcgccaccgccagctggcaccaggccgcgtagggcagacactcctgggcgcgcagctcccggcccagctgtccgaactgctcgccggcctccgccacgttcggcttccgcaggaaccgcttcttcagcttgttcgataccagccggtagcgggccaggaagtccccggcctcgggtcccgggccggcgccgccgccgcccaggcctgcagccgctgccgccatgctcgccgccccaagcacttcccgacgcgccgccgcagctggcgggcgggccggggcggggcgacgtgccctgcgtccccctcggcgggctgccgccgtgcccgcgccggctccccagcccgagcctgccccttgccctggtgaggtgcaaagagcgggatcggaggcggggcctggccgggctgtgagcggcgtatgcaaatcgagggtctcggggatgcggatccaagaccctgggaaggtacgcggggcctggcggggcaccagctgctgctagctcggctgcaatgcaagtggtctaggttgctaaaggcatcccacagcctctccatctgaacatgacccaaaggaaactcgtgaccctaattccatgtctgcgcatttctggactgttgtcccccccccccccccccgccccgactactcagtcctccgtcttccggtccagggccccttgccaagcaccgggtccacctctccgtccccaccccggttgccttagaagtccgtcctgtcgcaacactgcagtcatggtcttgaggcccacccgccccaacgaacaccatcatgctgaggactttcccgggcaggccctgacttgctcagaaccagcgggggtgtccccttcccacccagggccactcccctgcactgtcacccggagagacggctcctctgtgccatccctggctcccacccaaccccagacccccaccacctctccatccctccagctgtggaggtctcacaaccccccaacccatctcaccgcccccccacccccaccccaaggcaaagtgactgaagcgggcagatggcttccttgaaacattttattgacagaattaatgaaggcccaagactttggggcctgggttgtggggggagggtgtttaaggccgggggttcaggccgggggatttggggccgggtgggtggacgagtggacctgtcaggtcccaggggccgggtgtcagaagctagtcctcgccaggggccacttgagagatggtggtcgtgttgaaaagggtgctcagtagcctgtcgttgtgaaccaccatgtccagcagcaggggagtgatgttccgctctccgctgttctgggcctcgttgcccgccagctccaggaccttggccgtcaggtactcaataaccgcagcgaggtagaccggcgccgtgcgactcaggcgctgagcgtagtggccctcccgtagactgcgctccacctggctcactgaaaacgaaagctccgctcggacggtgcgagagcaggtccgcccccggccgccagcaccggaggaccctcggcgtctcctcctcctcggcatgctgggcgttgagtgtgctatctcggcttggcccagctaggcaagatggctctcaagaggacagttaccgcgtccagtactgtgtatcctagcgaccagggcccagcccctcattggctagggagccgagaccaatgggcacgcacatccggcgacgggcacgcatgtggtgacggcccctcacaagggacacacgtccgtcaggtgacctcatcactttcccattggcctcgagggagcaggcctgggcctagaagtggctggagggccgtgggggtggggtggggcggggcagggggaatcgcgctggtgaccctctctttgccagtgggaactttccctttctactggatgggaacaccgtgggaaagacaaaggggtgggcgaggggaggacgggtaccacgccttcacaatgttgcacatccatcacgaccacctagttccaaaacgttttcaacaccccgaaaagaaaccgaaacccctgtacctataagcagtcacttgccgcacgcctccttccacaccaccactaccagcccccacaccctcccacacacaccccctgcccccgcccatacacacgttcccgatagtccctggcaacccctagtccatctgctttctgtccatagaggttagcctgttctggagatttcctatagatggaattatacgaccaaatgtgaggccgtgtgtgtctggctgctttcacttagcgtaatggtttcatcagggtgcatccatgtagaggcatgaatcactacttccttcctttgaatgactgagtacgattctgttgtatgaataggaggccacattttgtttacccactcgtcagttgatggacaggttatttcccccttctggctattgtgagtggcactgccatgaccatctctctacaggtttttctttgaatatctcttttcagttcttttgggtctatttctagcagtcaaactgctggctcgtgtggtaattctgtttaacttattgaggaaccaccaaactgatttccacagcagctgtaatctttcgcattcccaacagtagtgcatgagagtcccaatttcttcacagcctcatcaaaacctgttttctgtttgcctcattttgttttgtttacagtagccatcctactgggtgtcaagtgctatctcatggtggttttcattcgtatttcccaaatggctaatgatgttgctgtggtttgagtgcatcccccaaattgtgtgtcttggaaacttaatccccaaattcacatgttgattggaggcgcagcctctgagacggtaattaggattagataaggtcatcggggtgagacccccaggatgcgactggtggctttataagaataggaagagaggcctgaaacgacatacacgctcttgccctctcgccgtgtgataccctctgccgtccccagatgccgggtcacttcccagtccccagaacggtaagaaataaatttcttttctttataaattgttcagtgtcgggtattcaattatggcaacagaaaacagactaagacatcttttcatgtgcttcttggccctctgtacctctgctttggaggaatgtctattcaagccctttgcccattttttaattcggttgattgtattttggctgtgggcttctaaaacttattcatatattctggaaaatagactcttatcagatatgtgacttgcaaatgtttctcccattcactttctggatagagccctttgttgcccaaaagatttacatttggatgtagtccaacttgccaaatgaaaagatatctgtggctttgcctttggtgtcatactgaaggagctgttgcctaatccaaggtcgtgcaaagttacatctccgttttcttcttagagttttatagtttcagcccttacatttagatctgtgatccattttgaattaattctttacatgatgtgaggtaggggtccaggggccttcttttgcatgtggctatccagttgtcccagcgcagtttg

SEQ ID NO: 1563707 - DNA, 4001 bp, Homo sapiens
agtgactgcaccgggtggctgccgtgctcccgcgccaggcgctgcatgcgcgtgaagaccgccagggcgccggtgtagtcgcgcgccagcagctggcaggaggcggcctcgccaagcgcctgcagcgcggccaggggcagctggggcagctggagctgggcggcgcgctggaagtgaccggcggcggcggccggctggcccaggtcgcgcagggcggcggccagctcgaggcagagggcggcggcggcggccggctggcccagctcgaggtgcagacgcaccgcggcgcccagggcgctggcggcggcctgcagcggctccccgtaggcggcggggcagaccaggcgctggcgcgcgtcgcgctcctgccgcaggaagaggcgggcggcctcggtgagggccagcgcctccccgggcccgtggaagagcgcctgctggcagcgcgccaccgccagctggcaccaggccgcgtagggcagacactcctgggcgcgcagctcccggcccagctgtccgaactgctcgccggcctccgccacgttcggcttccgcaggaaccgcttcttcagcttgttcgataccagccggtagcgggccaggaagtccccggcctcgggtcccgggccggcgccgccgccgcccaggcctgcagccgctgccgccatgctcgccgccccaagcacttcccgacgcgccgccgcagctggcgggcgggccggggcggggcgacgtgccctgcgtccccctcggcgggctgccgccgtgcccgcgccggctccccagcccgagcctgccccttgccctggtgaggtgcaaagagcgggatcggaggcggggcctggccgggctgtgagcggcgtatgcaaatcgagggtctcggggatgcggatccaagaccctgggaaggtacgcggggcctggcggggcaccagctgctgctagctcggctgcaatgcaagtggtctaggttgctaaaggcatcccacagcctctccatctgaacatgacccaaaggaaactcgtgaccctaattccatgtctgcgcatttctggactgttgtccccccccccccccccgccccgactactcagtcctccgtcttccggtccagggccccttgccaagcaccgggtccacctctccgtccccaccccggttgccttagaagtccgtcctgtcgcaacactgcagtcatggtcttgaggcccacccgccccaacgaacaccatcatgctgaggactttcccgggcaggccctgacttgctcagaaccagcgggggtgtccccttcccacccagggccactcccctgcactgtcacccggagagacggctcctctgtgccatccctggctcccacccaaccccagacccccaccacctctccatccctccagctgtggaggtctcacaaccccccaacccatctcaccgcccccccacccccaccccaaggcaaagtgactgaagcgggcagatggcttccttgaaacattttattgacagaattaatgaaggcccaagactttggggcctgggttgtggggggagggtgtttaaggccgggggttcaggccgggggatttggggccgggtgggtggacgagtggacctgtcaggtcccaggggccgggtgtcagaagctagtcctcgccaggggccacttgagagatggtggtcgtgttgaaaagggtgctcagtagcctgtcgttgtgaaccaccatgtccagcagcaggggagtgatgttccgctctccgctgttctgggcctcgttgcccgccagctccaggaccttggccgtcaggtactcaataaccgcagcgaggtagaccggcgccgtgcgactcaggcgctgagcgtagtggccctcccgtagactgcgctccacctggctcactgaaaacgaaagctccgctcggacggtgcgagagcaggtccgcccccggccgccagcaccggaggaccctcggcgtctcctcctcctcggcatgctgggcgttgagtgtgctatctcggcttggcccagctaggcaagatggctctcaagaggacagttaccgcgtccagtactgtgtatcctagcgaccagggcccagcccctcattggctagggagccgagaccaatgggcacgcacatccggcgacgggcacgcatgtggtgacggcccctcacaagggacacacgtccgtcaggtgacctcatcactttcccattggcctcgagggagcaggcctgggcctagaagtggctggagggccgtgggggtggggtggggcggggcagggggaatcgcgctggtgaccctctctttgccagtgggaactttccctttctactggatgggaacaccgtgggaaagacaaaggggtgggcgaggggaggacgggtaccacgccttcacaatgttgcacatccatcacgaccacctagttccaaaacgttttcaacaccccgaaaagaaaccgaaacccctgtacctataagcagtcacttgccgcacgcctccttccacaccaccactaccagcccccacaccctcccacacacaccccctgcccccgcccatacacacgttcccgatagtccctggcaacccctagtccatctgctttctgtccatagaggttagcctgttctggagatttcctatagatggaattatacgaccaaatgtgaggccgtgtgtgtctggctgctttcacttagcgtaatggtttcatcagggtgcatccatgtagaggcatgaatcactacttccttcctttgaatgactgagtacgattctgttgtatgaataggaggccacattttgtttacccactcgtcagttgatggacaggttatttcccccttctggctattgtgagtggcactgccatgaccatctctctacaggtttttctttgaatatctcttttcagttcttttgggtctatttctagcagtcaaactgctggctcgtgtggtaattctgtttaacttattgaggaaccaccaaactgatttccacagcagctgtaatctttcgcattcccaacagtagtgcatgagagtcccaatttcttcacagcctcatcaaaacctgttttctgtttgcctcattttgttttgtttacagtagccatcctactgggtgtcaagtgctatctcatggtggttttcattcgtatttcccaaatggctaatgatgttgctgtggtttgagtgcatcccccaaattgtgtgtcttggaaacttaatccccaaattcacatgttgattggaggcgcagcctctgagacggtaattaggattagataaggtcatcggggtgagacccccaggatgcgactggtggctttataagaataggaagagaggcctgaaacgacatacacgctcttgccctctcgccgtgtgataccctctgccgtccccagatgccgggtcacttcccagtccccagaacggtaagaaataaatttcttttctttataaattgttcagtgtcgggtattcaattatggcaacagaaaacagactaagacatcttttcatgtgcttcttggccctctgtacctctgctttggaggaatgtctattcaagccctttgcccattttttaattcggttgattgtattttggctgtgggcttctaaaacttattcatatattctggaaaatagactcttatcagatatgtgacttgcaaatgtttctcccattcactttctggatagagccctttgttgcccaaaagatttacatttggatgtagtccaacttgccaaatgaaaagatatctgtggctttgcctttggtgtcatactgaaggagctgttgcctaatccaaggtcgtgcaaagttacatctccgttttcttcttagagttttatagtttcagcccttacatttagatctgtgatccattttgaattaattctttacatgatgtgaggtaggggtccaggggccttcttttgcatgtggctatccagttgtcccagcgcagtttgt

SEQ ID NO: 1563708 - DNA, 4001 bp, Homo sapiens
cggtgtagtcgcgcgccagcagctggcaggaggcggcctcgccaagcgcctgcagcgcggccaggggcagctggggcagctggagctgggcggcgcgctggaagtgaccggcggcggcggccggctggcccaggtcgcgcagggcggcggccagctcgaggcagagggcggcggcggcggccggctggcccagctcgaggtgcagacgcaccgcggcgcccagggcgctggcggcggcctgcagcggctccccgtaggcggcggggcagaccaggcgctggcgcgcgtcgcgctcctgccgcaggaagaggcgggcggcctcggtgagggccagcgcctccccgggcccgtggaagagcgcctgctggcagcgcgccaccgccagctggcaccaggccgcgtagggcagacactcctgggcgcgcagctcccggcccagctgtccgaactgctcgccggcctccgccacgttcggcttccgcaggaaccgcttcttcagcttgttcgataccagccggtagcgggccaggaagtccccggcctcgggtcccgggccggcgccgccgccgcccaggcctgcagccgctgccgccatgctcgccgccccaagcacttcccgacgcgccgccgcagctggcgggcgggccggggcggggcgacgtgccctgcgtccccctcggcgggctgccgccgtgcccgcgccggctccccagcccgagcctgccccttgccctgatgaggtgcaaagagcgggatcggaggcggggcctggccgggctgtgagcggcgtatgcaaatcgagggtctcggggatgcggatccaagaccctgggaaggtacgcggggcctggcggggcaccagctgctgctagctcggctgcaatgcaagtggtctaggttgctaaaggcatcccacagcctctccatctgaacatgacccaaacgaaactcgtgaccctaattccatgtctgcgcatttctagactgttgtccccccccccccccgccccgactactcagtcctccgtcttccggtccagggccccttgccaagcaccgggtccacctctccgtccccaccccggttgccttagaagtccgtcctgtcgcaacactgcagtcatggtcttgaggcccacccgccccaacgaacaccatcatgctgaggactttcccgggcaggccctgacttgctcagaaccagcgggggtgtccccttcccacccagggccactcccctgcactgtcacccggagagactgctcctctgtgccatccctggctcccacccaaccccagacccccaccacctctccatccctccagctgtggaggtctcacaaccccccaacccatctcaccgcccccccacccccaccccaaggcaaagtgactgaagcgggcagatggcttccttgaaacattttattgacagaattaatgaaggcccaagactttggggcctgggttgtggggggagggtgtttaaggccgggggttcaggccgggggatttggggccgggtgggtggacgagtggacctgtcaggtcccaggggccgggtgtcagaagctagtcctcgccaggggccacttgagagatggtggtcgtgttgaaaagggtgctcagtagcctgtcgttgtgaaccaccatgtccagcagcaggggagtgatgttccgctctccgctgttctgggcctcgttgcccgccagctccgggaccttggccgtcaggtactcaataaccgcagcgaggtagaccggcgccgtgcgactcaggcgctgagcgtagtggccctcccgtagactgcgctccacctggctcactgaaaacgaaagctccgctcggacggtgcgagagcaggtccgcccccggccgccagcaccggaggaccctcggcgtctcctcctcctcggcatgctgggcgttgagtgtgctatctcggcttggcccagctaggcaagatggctctcaagaggacagttaccgcgtccagtactgtgtatcctagcgaccagggcccagcccctcattggctagggagccgagaccaatgggcacgcacatccggcgacgggcacgcatgtggtgacggcccctcacaagggacacacgtccgtcaggtgacctcatcactttcccattggcctcgagggagcaggcctgggcctagaagtggctggagggccgtgggggtggggtggggcggggcagggggaatcgcgctggtgaccctctctttgccagtgggaactttccctttctactggatgggaacaccgtgggaaagacaaaggggtgggcgaggggaggacgggtaccacgccttcacaatgttgcacatccatcacgaccacctagttccaaaacgttttcaacaccccgaaaagaaaccgaaacccctgtacctataagcagtcacttgccgcacgcctccttccacaccaccactaccagcccccacaccctcccacacacaccccctgcccccgcccatacacacgttcccgatagtccctggcaacccctagtccatctgctttctgtccatagaggttagcctgttctggagatttcctatagatggaattatacgaccaaatgtgaggccgtgtgtgtctggctgctttcacttagcgtaatggtttcatcagggtgcatccatgtagaggcatgaatcactacttccttcctttgaatgactgagtacgattctgttgtatgaataggaggccacattttgtttacccactcgtcagttgatggacaggttatttcccccttctggctattgtgagtggcactgccatgaccatctctctacaggtttttctttgaatatctcttttcagttcttttgggtctatttctagcagtcaaactgctggctcgtgtggtaattctgtttaacttattgaggaaccaccaaactgatttccacagcagctgtaatctttcgcattcccaacagtagtgcatgagagtcccaatttcttcacagcctcatcaaaacctgttttctgtttgcctcattttgttttgtttacagtagccatcctactgggtgtcaagtgctatctcatggtggttttcattcgtatttcccaaatggctaatgatgttgctgtggtttgagtgcatcccccaaattgtgtgtcttggaaacttaatccccaaattcacatgttgattggaggcgcagcctctgagacggtaattaggattagataaggtcatcggggtgagacccccaggatgcgactggtggctttataagaataggaagagaggcctgaaacgacatacacgctcttgccctctcgccgtgtgataccctctgccgtccccagatgccgggtcacttcccagtccccagaacggtaagaaataaatttcttttctttataaattgttcagtgtcgggtattcaattatggcaacagaaaacagactaagacatcttttcatgtgcttcttggccctctgtacctctgctttggaggaatgtctattcaagccctttgcccattttttaattcggttgattgtattttggctgtgggcttctaaaacttattcatatattctggaaaatagactcttatcagatatgtgacttgcaaatgtttctcccattcactttctggatagagccctttgttgcccaaaagatttacatttggatgtagtccaacttgccaaatgaaaagatatctgtggctttgcctttggtgtcatactgaaggagctgttgcctaatccaaggtcgtgcaaagttacatctccgttttcttcttagagttttatagtttcagcccttacatttagatctgtgatccattttgaattaattctttacatgatgtgaggtaggggtccaggggccttcttttgcatgtggctatccagttgtcccagcgcagtttgttgaggggattattcttcccctccacccattgaggggtgccggaactcttactgaaaataaactttacataaa

SEQ ID NO: 1563709 - DNA, 4001 bp, Homo sapiens
tgtagtcgcgcgccagcagctggcaggaggcggcctcgccaagcgcctgcagcgcggccaggggcagctggggcagctggagctgggcggcgcgctggaagtgaccggcggcggcggccggctggcccaggtcgcgcagggcggcggccagctcgaggcagagggcggcggcggcggccggctggcccagctcgaggtgcagacgcaccgcggcgcccagggcgctggcggcggcctgcagcggctccccgtaggcggcggggcagaccaggcgctggcgcgcgtcgcgctcctgccgcaggaagaggcgggcggcctcggtgagggccagcgcctccccgggcccgtggaagagcgcctgctggcagcgcgccaccgccagctggcaccaggccgcgtagggcagacactcctgggcgcgcagctcccggcccagctgtccgaactgctcgccggcctccgccacgttcggcttccgcaggaaccgcttcttcagcttgttcgataccagccggtagcgggccaggaagtccccggcctcgggtcccgggccggcgccgccgccgcccaggcctgcagccgctgccgccatgctcgccgccccaagcacttcccgacgcgccgccgcagctggcgggcgggccggggcggggcgacgtgccctgcgtccccctcggcgggctgccgccgtgcccgcgccggctccccagcccgagcctgccccttgccctggtgaggtgcaaagagcgggatcggaggcggggcctggccgggctgtgagcggcgtatgcaaatcgagggtctcggggatgcggatccaagaccctgggaaggtacgcggggcctggcggggcaccagctgctgctagctcggctgcaatgcaagtggtctaggttgctaaaggcatcccacagcctctccatctgaacatgacccaaaggaaactcgtgaccctaattccatgtctgcgcatttctggactgttgtcccccccccccccccccgccccgactactcagtcctccgtcttccggtccagggccccttgccaagcaccgggtccacctctccgtccccaccccggttgccttagaagtccgtcctgtcgcaacactgcagtcatggtcttgaggcccacccgccccaacgaacaccatcatgctgaggactttcccgggcaggccctgacttgctcagaaccagcgggggtgtccccttcccacccagggccactcccctgcactgtcacccggagagacggctcctctgtgccatccctggctcccacccaaccccagacccccaccacctctccatccctccagctgtggaggtctcacaaccccccaacccatctcaccgcccccccacccccaccccaaggcaaagtgactgaagcgggcagatggcttccttgaaacattttattgacagaattaatgaaggcccaagactttggggcctgggttgtggggggagggtgtttaaggccgggggttcaggccgggggatttggggccgggtgggtggacgagtggacctgtcaggtcccaggggccgggtgtcagaagctagtcctcgccaggggccacttgagagatggtggtcgtgttgaaaagggtgctcagtagcctgtcgttgtgaaccaccatgtccagcagcaggggagtgatgttccgctctccgctgttctgggcctcgttgcccgccagctccaggaccttggccgtcaggtactcaataaccgcagcgaggtagaccggcgccgtgcgactcaggcgctgagcgtagtggccctcccgtagactgcgctccacctggctcactgaaaacgaaagctccgctcggacggtgcgagagcaggtccgcccccggccgccagcaccggaggaccctcggcgtctcctcctcctcggcatgctgggcgttgagtgtgctatctcggcttggcccagctaggcaagatggctctcaagaggacagttaccgcgtccagtactgtgtatcctagcgaccagggcccagcccctcattggctagggagccgagaccaatgggcacgcacatccggcgacgggcacgcatgtggtgacggcccctcacaagggacacacgtccgtcaggtgacctcatcactttcccattggcctcgagggagcaggcctgggcctagaagtggctggagggccgtgggggtggggtggggcggggcagggggaatcgcgctggtgaccctctctttgccagtgggaactttccctttctactggatgggaacaccgtgggaaagacaaaggggtgggcgaggggaggacgggtaccacgccttcacaatgttgcacatccatcacgaccacctagttccaaaacgttttcaacaccccgaaaagaaaccgaaacccctgtacctataagcagtcacttgccgcacgcctccttccacaccaccactaccagcccccacaccctcccacacacaccccctgcccccgcccatacacacgttcccgatagtccctggcaacccctagtccatctgctttctgtccatagaggttagcctgttctggagatttcctatagatggaattatacgaccaaatgtgaggccgtgtgtgtctggctgctttcacttagcgtaatggtttcatcagggtgcatccatgtagaggcatgaatcactacttccttcctttgaatgactgagtacgattctgttgtatgaataggaggccacattttgtttacccactcgtcagttgatggacaggttatttcccccttctggctattgtgagtggcactgccatgaccatctctctacaggtttttctttgaatatctcttttcagttcttttgggtctatttctagcagtcaaactgctggctcgtgtggtaattctgtttaacttattgaggaaccaccaaactgatttccacagcagctgtaatctttcgcattcccaacagtagtgcatgagagtcccaatttcttcacagcctcatcaaaacctgttttctgtttgcctcattttgttttgtttacagtagccatcctactgggtgtcaagtgctatctcatggtggttttcattcgtatttcccaaatggctaatgatgttgctgtggtttgagtgcatcccccaaattgtgtgtcttggaaacttaatccccaaattcacatgttgattggaggcgcagcctctgagacggtaattaggattagataaggtcatcggggtgagacccccaggatgcgactggtggctttataagaataggaagagaggcctgaaacgacatacacgctcttgccctctcgccgtgtgataccctctgccgtccccagatgccgggtcacttcccagtccccagaacggtaagaaataaatttcttttctttataaattgttcagtgtcgggtattcaattatggcaacagaaaacagactaagacatcttttcatgtgcttcttggccctctgtacctctgctttggaggaatgtctattcaagccctttgcccattttttaattcggttgattgtattttggctgtgggcttctaaaacttattcatatattctggaaaatagactcttatcagatatgtgacttgcaaatgtttctcccattcactttctggatagagccctttgttgcccaaaagatttacatttggatgtagtccaacttgccaaatgaaaagatatctgtggctttgcctttggtgtcatactgaaggagctgttgcctaatccaaggtcgtgcaaagttacatctccgttttcttcttagagttttatagtttcagcccttacatttagatctgtgatccattttgaattaattctttacatgatgtgaggtaggggtccaggggccttcttttgcatgtggctatccagttgtcccagcgcagtttgttgaggggattattcttcccctccacccattgaggggtgccggaactcttactgaaaataaactttacataaa

SEQ ID NO: 1563710 - DNA, 4001 bp, Homo sapiens
tgtagtcgcgcgccagcagctggcaggaggcggcctcgccaagcgcctgcagcgcggccaggggcagctggggcagctggagctgggcggcgcgctggaagtgaccggcggcggcggccggctggcccaggtcgcgcagggcggcggccagctcgaggcagagggcggcggcggcggccggctggcccagctcgaggtgcagacgcaccgcggcgcccagggcgctggcggcggcctgcagcggctccccgtaggcggcggggcagaccaggcgctggcgcgcgtcgcgctcctgccgcaggaagaggcgggcggcctcggtgagggccagcgcctccccgggcccgtggaagagcgcctgctggcagcgcgccaccgccagctggcaccaggccgcgtagggcagacactcctgggcgcgcagctcccggcccagctgtccgaactgctcgccggcctccgccacgttcggcttccgcaggaaccgcttcttcagcttgttcgataccagccggtagcgggccaggaagtccccggcctcgggtcccgggccggcgccgccgccgcccaggcctgcagccgctgccgccatgctcgccgccccaagcacttcccgacgcgccgccgcagctggcgggcgggccggggcggggcgacgtgccctgcgtccccctcggcgggctgccgccgtgcccgcgccggctccccagcccgagcctgccccttgccctggtgaggtgcaaagagcgggatcggaggcggggcctggccgggctgtgagcggcgtatgcaaatcgagggtctcggggatgcggatccaagaccctgggaaggtacgcggggcctggcggggcaccagctgctgctagctcggctgcaatgcaagtggtctaggttgctaaaggcatcccacagcctctccatctgaacatgacccaaaggaaactcgtgaccctaattccatgtctgcgcatttctggactgttgtccccccccccccccccgccccgactactcagtcctccgtcttccggtccagggccccttgccaagcaccgggtccacctctccgtccccaccccggttgccttagaagtccgtcctgtcgcaacactgcagtcatggtcttgaggcccacccgccccaacgaacaccatcatgctgaggactttcccgggcaggccctgacttgctcagaaccagcgggggtgtccccttcccacccagggccactcccctgcactgtcacccggagagacggctcctctgtgccatccctggctcccacccaaccccagacccccaccacctctccatccctccagctgtggaggtctcacaaccccccaacccatctcaccgcccccccacccccaccccaaggcaaagtgactgaagcgggcagatggcttccttgaaacattttattgacagaattaatgaaggcccaagactttggggcctgggttgtggggggagggtgtttaaggccgggggttcaggccgggggatttggggccgggtgggtggacgagtggacctgtcaggtcccaggggccgggtgtcagaagctagtcctcgccaggggccacttgagagatggtggtcgtgttgaaaagggtgctcagtagcctgtcgttgtgaaccaccatgtccagcagcaggggagtgatgttccgctctccgctgttctgggcctcgttgcccgccagctccaggaccttggccgtcaggtactcaataaccgcagcgaggtagaccggcgccgtgcgactcaggcgctgagcgtagtggccctcccgtagactgcgctccacctggctcactgaaaacgaaagctccgctcggacggtgcgagagcaggtccgcccccggccgccagcaccggaggaccctcggcgtctcctcctcctcggcatgctgggcgttgagtgtgctatctcggcttggcccagctaggcaagatggctctcaagaggacagttaccgcgtccagtactgtgtatcctagcgaccagggcccagcccctcattggctagggagccgagaccaatgggcacgcacatccggcgacgggcacgcatgtggtgacggcccctcacaagggacacacgtccgtcaggtgacctcatcactttcccattggcctcgagggagcaggcctgggcctagaagtggctggagggccgtgggggtggggtggggcggggcagggggaatcgcgctggtgaccctctctttgccagtgggaactttccctttctactggatgggaacaccgtgggaaagacaaaggggtgggcgaggggaggacgggtaccacgccttcacaatgttgcacatccatcacgaccacctagttccaaaacgttttcaacaccccgaaaagaaaccgaaacccctgtacctataagcagtcacttgccgcacgcctccttccacaccaccactaccagcccccacaccctcccacacacaccccctgcccccgcccatacacacgttcccgatagtccctggcaacccctagtccatctgctttctgtccatagaggttagcctgttctggagatttcctatagatggaattatacgaccaaatgtgaggccgtgtgtgtctggctgctttcacttagcgtaatggtttcatcagggtgcatccatgtagaggcatgaatcactacttccttcctttgaatgactgagtacgattctgttgtatgaataggaggccacattttgtttacccactcgtcagttgatggacaggttatttcccccttctggctattgtgagtggcactgccatgaccatctctctacaggtttttctttgaatatctcttttcagttcttttgggtctatttctagcagtcaaactgctggctcgtgtggtaattctgtttaacttattgaggaaccaccaaactgatttccacagcagctgtaatctttcgcattcccaacagtagtgcatgagagtcccaatttcttcacagcctcatcaaaacctgttttctgtttgcctcattttgttttgtttacagtagccatcctactgggtgtcaagtgctatctcatggtggttttcattcgtatttcccaaatggctaatgatgttgctgtggtttgagtgcatcccccaaattgtgtgtcttggaaacttaatccccaaattcacatgttgattggaggcgcagcctctgagacggtaattaggattagataaggtcatcggggtgagacccccaggatgcgactggtggctttataagaataggaagagaggcctgaaacgacatacacgctcttgccctctcgccgtgtgataccctctgccgtccccagatgccgggtcacttcccagtccccagaacggtaagaaataaatttcttttctttataaattgttcagtgtcgggtattcaattatggcaacagaaaacagactaagacatcttttcatgtgcttcttggccctctgtacctctgctttggaggaatgtctattcaagccctttgcccattttttaattcggttgattgtattttggctgtgggcttctaaaacttattcatatattctggaaaatagactcttatcagatatgtgacttgcaaatgtttctcccattcactttctggatagagccctttgttgcccaaaagatttacatttggatgtagtccaacttgccaaatgaaaagatatctgtggctttgcctttggtgtcatactgaaggagctgttgcctaatccaaggtcgtgcaaagttacatctccgttttcttcttagagttttatagtttcagcccttacatttagatctgtgatccattttgaattaattctttacatgatgtgaggtaggggtccaggggccttcttttgcatgtggctatccagttgtcccagcgcagtttgttgaggggattattcttcccctccacccattgaggggtgccggaactcttactgaaaataaactttacataaat

SEQ ID NO: 1563711 - DNA, 4001 bp, Homo sapiens; identical to SEQ ID NO: 1563705

SEQ ID NO: 1563712 - DNA, 4001 bp, Homo sapiens; identical to SEQ ID NO: 1563706

SEQ ID NO: 1563713 - DNA, 4001 bp, Homo sapiens; identical to SEQ ID NO: 1563707

SEQ ID NO: 1563714 - DNA, 4001 bp, Homo sapiens
ttgaccaaggggtcctctttaaatggtggaataatctatgtggctatgtgttgggccctctggggtggttctttcccacttctgatgggctcaagaaaattttgatttttgtcatttatccagcttttgtttcatggtttgactgagagtgccatcctttactggtttctacatatgaaggagaagggttgtttatgagatgtttcaaaatttacgggaaacatttaacaaaaatggccacatgttgagcttcaaggcacaacataataaattcctgtgggttgcagtcccagagtatgttctcttgtccacatactcgggcgactggaaatcaatggaaaaggaaagcaatgggaaagtgagcacctgctctgaaattcagcaatacacttatagaaaaaaatgcttaaaatgccaagacttgggacccagaagagagcacaatgaaaggtagcctatattaatattaacatgaatataaatatgctaatcttttgaggaaataagccttatctgacttctactaatggttgccaatgttctgtataacttgatgttagggacaaggtacatattctaatcttagctttggattcatatccctaaaagatcatgattacaagcaatgcaaacaaaaacatcaggtaaagaatcacactgccgttcctttaaacaccaggttgaatataacaggaaggctgctgtgggttcagcttgggtcactccccccacattgggtcaatgactgttgctcatagactgcaggtcactcattggctgtaccactgtacactagggcatgagctgtttccgtggacactccgtaatcctactgacacacacctggaagtaaggaaggtttctgttcaaaaagaaatgaaaaaattactgtcagtacaaaaagagaatgaattacaatagtggtctcagagtcggggaagctggaaaacgaatggattcttgaaaattttatttagccatatatatactgtaactgggcctcgtttgcttatttacatggattcatgatgagagagatgctgaacacatttaggagggttaccttgcttcttgtatcagcatattcactttctctgttgccatatcgcacataatgaagttctggaaaatcccaccatccagtcgtaggagaatgagagtgaaaaaggtaaacatcagtacattgataacatcatcataaagataacctagaaagataactaagaaaaacggccatttgggaaactgaggacacgaaacacgattacggaaacaccccctacttttccttggagcatattgcactacagatatattggagttgacagtgttttgcactgtgggaaaaatgcttgaaaaaccgcaggaggccacacggcacatgccccccaagctggaacggtgccacccacaccaacctccggtggggtcccccccttggcgggccactggcctatagggccacgggcggtggttctgaatagagcctttgggtttcccaggtgctcaggcgctcctgagacagctcacttgcttttggtgtacctgagggcggcattcgtgccctgggcctcggcgagcttgcccatcttccccggcagcagcagtcgcacggccatctggatgtcccgggaggtgatggtcacgcgcttggtgtaatgggccagctgaccagcctcggtggcgatgcggtccaatatgtcatggatcatagaatccatgacactcacggcctcctgggaaaggctgaggccctggtgaacctgcttcagcacccgggggaaatagggggtgaagctgtccccgaagctgtccccacggcggttggcgtggcgcctgcgggagcctcggcaccctcgcctcttctgcttctgggccttcgtggagttggcctctttgggctcctggatgctctggccttcctccgaggttgtctcagaggaagcctcagccatggcggaagcagcggccattagatagcaagaacagagagtgacggttggggaccagggaagtggggggcactttggtatggtcgcatggctctacgtcacattccaactcgacatctgattggatgaagtgtcaccaagggcgcctctcagcaatcttccctccattgaaggtgatcggatgatcctgttgcttggaatcatgtcagccaatcacagagggcgtctgcccgcctaagtggccgggttgcctacctcagacaaaggtacacagagtcttgctctgtggcacacctgcagtgcagtggtgcggtctcagctcactgcaacccctgcctcctggtttcaagtgatgctccctcttcagcctcccaagtagctgggagtagaggcgcgtaccaccacacctggctaagttttgtattttgtgtgtgtgtatgtgtgtgtgtgtgagaaacatggtttctttatgtttcctcaggctggtcccaactcctggactccagtgattctcctgccttggcctcccaagctgctgggattacaggcatgagctattgtgcctggcagagaaaacttatttcaagaaaataaaacatgatgttgatacccattgaaggatgcacactacaaaaatctgagaacatttataaacttggttacaaaactcatacctgaaatattataaattaaatcacattacacacacacacacacacacacacacacacacaaagggaaacagtttactgctgtaaataacaatttagaagcatcaaacggggcaaacattactaatggaacaagcagacctcatataatcttttttcaacattacctctattatacaattcatttaaatacataacaaaaacccacagtgcagaaatagctaaatcaaaaattcaatgaacagcacccctttcaagcttccgagaaaataaagtaaggactctaactcattcacatttgtctaattctattgtttcccagtctacaatcttttttaatgcaaagcttaatgtcctgtgagtatgcatcacttacgatggaagtatccaatgagagcacccaaaccccactctccactggctcaactaatgaagtgtcttcagccctgggcctgagccactggctcagaatgtgagcaggtgaccagtcctgaaccaataaatgccctcctagctgttcagccttgtaaattgaggagaaaattagtttgaggtttttgtccactttttatttctttgtttgatttttcgttttattgtaattgtggtgaattaaagatttgaatccaaagctgtgagtaagcatgtctcctacctctggcatcatattatgaaggcaagttctctgaaaaggaatttggaggaaagagactattcctgtgaacagcttgcacaccagggaggggcagacttcagtgtaaaacaaaggcgaagttccagagaactaaaagaggatatggcttttatagagaaagttcccatcgaggttctcagtacagtccattcatgcaaataaaggattcaaaattagttctgattggttgactcagttgatctctgattggtcaacacgactgagccctgattggcaggggcaggtgagctctggctggttggttcaggtgacctctgaaagttgcagagttagatagaggtatgggcttttggggaattcctagtacatgtgtgagctctagtctgcacgtggcagcttgcttggctctagtttagatttaggctcagtcactgggatccatctggaaagactggctcttttaggtttacatttgtccacaagtttaataaaatgatagtgaccaattaaaaaaactaggacgactctcctttttttttcaatttgattgttgtggggctttttcactttcaggcacatgtgtctgacaaaattaacccactatggtaatttgagacaataaaaacacttacttcagtacaaagctttctccaaaatatgattggccctgattcttgatgcaatataatagtcttcccctttcattagactgtcactctgcaa

SEQ ID NO: 1563715 - DNA, 4001 bp, Homo sapiens
ggtgtggttctttcccacttctgatgggctcaagaaaattttgatttttgtcattttcccagcttttgtttcatggtttgactgagagtgtcaccctttactggtttctacatatgaaggagaaaggttgtttatgagatgtttcaaaattcacgggaaacatttgacaaaaatggccacatattgagcttcaaggcacaatacaataaattcctatgggtcgcaatcccagagtatgttctctggtccacatactcgggcggctggagatcctctgaaaagaaaagcaatgggaaagtcagcagctgctctgaaattcaacaatacactcataggaaaaagtgctaaaaatacaaagacttgggacccagaagaaagcacaatgaaagctaacctatattaacattaacatgaatattaatatgcaaatctcttgaggaaataagcgttatctgacttctcctaaaggctgaccatcctctgcataacttgatgctaggggcaaggaacatatactactcctagcactggattcatatccttaaatgaccatgattacaaacactgaaaacaaaaacatcaggtaaagaatcacaaccctgtccccccaaacaccagactgcatatcagtgcaaggctgttgtgggttcagcctggttcactgcccccacactgggacaatgactgttgctcatagactgcaagtcactcattggctacaccactgaacactagggcatgagccatttctgtggacactccctaagcctactgacacaaacctggaagtaacgaaggtttctgtttaaaaagaaacgaaaagattatcgtcatggcaaaaaaagaatgaactgcaatagtgatctcagagtcgaggaagctggaaaatgaacggattcttgaaaattttatttagctgtatgtacactgtaacttggcctcatttgcttatttacatggattcgtgatgggagcggtgttgaaaacatttaggagggttaccttgcttcttgtatcagcgtattcactttctctgttgctgtatggcatacagtgaagttctggaaaattccaccatccagtcacaggagaatgagacagaaaaaggtaaagatcagtgcagtaataatatcaccatatagatagcctagaaacataactaacaaaaatgaccgtttacgaaactgaggaaatgaaacacgatcacggaaacacccactatttttccttggagcaaactgcactacagatatattggagctgacaatgtttagtactgaggggaaaatgcttgaaacattgcaggatgccacacgccacatgccccccaagtcggaagggcaccacccaccccagcctccggtggtgtcccccttggcgagccactggtctttcaggccacattcagtggctctgaaaagaccctttgggttcccgtggtgctcgggtgctcctgagggagcgcacttgctcctggtgtacctgaggacagccttcgtgccttcggactcggcgagcttgcccatctgccccggcagcagcaggcgcacagccatccgggtctcccaggcagtgatggtctggcgcttggtggagcgggccaggtgaccagcctcggtggcgatgcggtccaatatgtcatgaaccaaagaatccatgacactcacggcctcccgggaaaggctgaggccctggtgaacctgcttcagcacccggcggaaataggtggcgaagctgtccccgcggcagttggagtggcacctgcggggcccatggcgccctcgcttcctctgcttgctctgcttctgggacgtagtggagttggcctctttgggctcctgggtgatcagctgttcctcagaggtcgtctcagaggaaggtccagccatggcggaggcagtggccattagatggcacgaccagacaatggcggttgtggaccggggaagccggggcacttcggtacgcagcatggctccacgtctcgggccagcttcacgtctgattggatgaagtgtcacgcagggagcctctcagcaaacctacctgcgttgaaggtgactggatggtcccgttgcgtggcatctcgtcaaccaatcacagtgggcgtctgcgggcctaagcgccccttgtggcccagctcggagaaagttacacagatagatgcctcacggggcaaaagcgcatccgcccttctcagctgatccatgccacactgtgagcactttgaagggtgtcactgaaaactcccaaagtttagcaatttcagctcatgatccctgaggagagacagacctcctgagcccaagtccattatgccggaagaatgactgtggccacgtgtggaacaattgtcacccatctcagaagctactgttatcctgggctaagccaccctggcttgagcaggaactccctgacatggccgcctgggcatcaaaggacctagcggtctggctccgggcttcagtactgatcaacatcttccgtgaatcaggagaatgagaaatggccataccccagcctccaagcagacaatagaaacagaaaggcacttttattaaaaacatatgacaacactcgacatcgaccaggtttaaaaaaataattaaaaaaaaaaaaaggaaagcaaaacaacaaccacaaatcacaactcaaaagctggaaatggctaataagtttaagagatattgggttaaaaaatatcgccttaaatctcctaggaagcccctgagggagagaaagggattccagaaatggaaattatgttcaagttagaaagagagctttcaagagtctctgataatatacgcaaaggcattccttaaatgcatttaagtaacattaagttgcaggaattgaacaagaaagattcttaagaaatgctgaagaaataaaggtcatcgatgaactgtcatttcaaaggtcaggctttcaagtgtatttcctgtcatgtctttagcaaacaacttattctactcctaataaattggttcacgattaagaaggacaaaaaggctcatttttgttgttagataagatcgtatatggtaagctctgtgactgaactctagtacaccatttctgaacagtcccctttacaaatgatgatcttataaatctacttaaacgtttagcaagacaatccttctcgtagtttggtacaaggcacaagagacctgtccacaacaatctctgtattcatatcagtaagtcagcatgatatttttcttaaaaaaaaaaaagcaaacaaaaaacagggaaagagccacatcgtttttcttcacaatctgcaaggttaaacctcccagggaggctctcactggttcatttccgggtcacctccccacactttcagccatggcttgtggtgcctcaagggctggaaagcctttattgcctgagccagtggtgactatggcatgagctgctctcacaggatgttcccatcatctacgtgatgcaaaattgtaatatatagtccttattttgtttctctaattctttttttttcttttttttgagacaacaatctgtcacccaggctggagtgcattggtgcgatctcagctcactgccacctccacctgctgggttcaagaggttctcctgcctcaggctccccagtagctaagactacagggatgcgccaccacacccggctaatttttgtacttttagtggagacggggttttatcatgttggccacgctggccttgaactcctggcctaaagtgatccatccacctcagcctcccaaagtgctgggattacaggcatcagccactgcgccctgcctgtttccttaatttttaatatagtcataatctttattgcatcagggtgttttccattttattttaagttcgggggtacatgtacagaatgtacaggtattttagagaggtaaacgtgtgtcatggggcttttctgtgccgattatttcatcacccaggcattaagcctagtaaccattagttatttttcctgatcctgtccc

SEQ ID NO: 1563716 - DNA, 4001 bp, Homo sapiens
aggactgggaaacgggtcacggcacagaagctgacaagaggtgacactgcatgaggaccacttggccagctgagacccagccaggagcccacgccctggccctgcctgtcactcctccactgggagaccagagactgttcatgcctccagcctgacccttggcttccgggtctgagaaggaaaggactggaatggagcatttctcaggtgcctgccagtcctgaacctccaaactcataaggcaaggcaaacgctgagggcaagttcagcactgcagcaaaggggtggctggactagcccagcaccgccaggggccactttgccccaagtttgatcatgcctgtcaccagtactccttacctacacagctgttctcacgagggtccaggctagggggtggagccctctgggaagacagctactcacagtaaccacaaaccccatcttccccaggtggggctggctggcgcccatgcacaccccaggtgggaagaggaagaaactgatgcattaccgggtacacatccactctaggatctccaagcggtactctgaggggctgcacagcagttcctgaattgtctttggctctgtgatatacagaccctcgaggaaggggcagtttaggtcctaagcaaggaaaaggaaagcaacattcactgaaagtcccagtgtacatcatttcattttatttatttatttatttttgagacggagtctcactctgtcgcccagcctggatggagtgcagtggcatgatctcggctcactgcagcctccacctcctgggttccagcaattctcctgcctcagctcccagggtagctgggggattacaggcatgcgccaccacgcccggacaatttttgtatttttaatagagacggagtttcaccatgttggccaggctggtgtcaaactcctgacctcaggtatctgcccacctcagcctcccaaagtggtgggattacaggcgtgggccgccgcgcccagtcctcagtgtacatctgcaagctcccaggaccctttcctttacccgcgtcctgccatcttgccaagagttcaagtccccccattcttaaccccacatctcccgcggcatgcagaccccacctctttcaagtactcccactctgggctcttgtggcagcaggacctaggagcaacgcctgagactaagacttaagagagagtcctaggtttcgggactgagggaaaggggagagggaaagggagagggaccactgagccagtcgcggacaggatgggggagtgtctggggggaggagcgagcgggccgaggggacctgggacagctccctaacctcgtgggccagctttcctcactgctgcagtgagggctctgtcctgtggggctgtagagggcttctggaggctatcacccctggcatctgacaccaactgacaccaagccctagtctcgctgacttgacagagtggcacgaggctctgcccatctgtccccccagaccccgcaagatccctaaggccaggcctgggtcctctgtgtctgcacttgctccgagcgcccagcgcgggtactgcagttccacaggcggtgctggccccaactaccaggcacgggccgtggagacagcaagaacgaaggcctggggcacaccaaagggcaaagatgaatgatccacaagcaccccctgctgcaagggaacagggcgcagccggaaccggcgacggtggccgcgtggcgccgcggacttccgcagcaagccctcccgggcctcgggcggggccctccccggtcccccgccctggagtggctttctgggccaacagcaccttcagcttcccgaacacctccacagccgccctggacacgctgctgtcgccctcgtcctctgagtagtcgtcgccgccacggccgcagccagcgtcctgccccgccatgtttcgcgctccgagccgcgccccgcccatgccctggcttcactggccggcaagaccgccaatcaacctccagcgttcttcccgcccacccgcctgcgcccacccccttcccgaccgacccttcccattgggcgacatctccgcctgcgcgggccccgggctcccaccccccgccccggcaccacccagaggcaggaccacagtgaagcgggcagggcggacacagggaagggggcggggcggacacagggaagggggcggggcggacaccgggaaggaggcggggcggacaccgggaaaggggcggggcggacaccgggaaggggcggggcgaacgggccaagctggctctgagtcgcaggccttgctggcgtcgcccctgctgccggccgggaatgatgatgcgttgaagcgaggctcttccaggagggggcgctcctgccttggtcgggttctcctgggccaccaccactaaggggcaccctggttcccaggaggaccaaggggagccttgggtgcagaatggaactcggactgaagcgttcctctcccagcgcggggctccgtcttctcttcaccatgctcacgctgtagttagaaggaaatttcttgtcactcaccagctgtgtgcctttgaaccagttacctaacctctctgtgcctctttgccctcacctaatggagctaatgagagcaccttacccactgggttgctaatgaggatggcaggcggtaataattcctgtggaatccctagaacagtgcccggcgcatgcgaagaaccacgtaaatgctcactattgtaatacatgctgggccctgctcccctcacggctcctggggctacctgtggctccttcctatcctgtctacttaacaaatttttctacatccctcaggaccctcaaactcaatgcgtctgcaatgaaatatgtcagtcgctcctcccccagacctgcaaagcccccagttcactgaatgccccttacccagggacctgctgattgggcaaggcaggaaggagttggagggtggcttgtgcccagtagccaggagacagcagcaggcagctgccactgtgccctcctctgtgccctaccctgccatctcctggagggtgggatcagggggcaagtctatagtcagggagacccagggacctgctgggaggcaactgcagtcatccaagtgacaggaggggacttcactccgtcctgggaggagggagcgggcaggagtccgggggtcacaggaagggacctcagcctgggaggccccgacacaggcccagcgaagtgcctcaaggttgctctctacccttccacgtggctgctgcctcaggcccttctggtagctgagggctgtcaaaggctttgggatttttttttaagcgtttttttccctcttttttgtttttgtttttctttctttctttttagaaaatttcatctcaatcacagccccagctcagacattcaaattcttgtgggtttttctgtggatctttcctaggactggggaatttggcggaagaaaccacggcagtgtggcagcctcccccaaccctccccatattctctgctcctgaggaccgggaagaaaccagctcctgtgtactctggaagaaaatctccctcctccacccagctccacggagccagtgtgctcaacaggcctccccaacctcagcagttcagtctatgggaccctgaggaactggcagggccttgagaggcgaagatcatcttgagaggttatggaggccatccccctcatggagaacctgttggccagccctcagcccctggagatggtcgctgaagacccagcagcaggctgcagcttccctgcccacgccaccccaccacccaccacccaccacccaccacctgccacccaccacccgcccccagaatcatagcacctcccaggcatcttcctccggaaaagctggaggctggggagggaacagagaggctgctgggcctctcaggaagggggaaagaaggggcccagaggtagaagcttctggaaatgtggactcaagctcagtccaagaaagcactcctcccaga

SEQ ID NO: 1563717 - DNA, 4001 bp, Homo sapiens
caatgcttggtacagaatgggcagtgacctctcagaataggctggctgactgaagaaatgaataacagcgcaaacattagtactcagtaagcacaccatgttgcttctgcccttcacgacttactgattcaagccacactttaatataaaaaatctaaagtagacatgaatgaattaaaaatgaaagacagcttttccattttcattttcttatctaaagaatggacagcaagcccgttaagtgatggcttacttttatatacgaaaatactgaaatggctatacgagcaaaagttatttattaagacagctagatctagactaaggtttctcaaccttggccctcttgatatttggggccagctgattctttgttggggggctgttctgtacattgtaggatgtttaggagcactcctgccctctattcactttcctctcagttgtgacaaccaaaaatgcctccagatattggcaaatgtcccctgtgggaaggggggattgcccccctccagttaagaaccactgatgtaggcacaagtaaactttgggaagttggggctggtttagagtactcactacgttctcatgtactacctcaatcatcatgacaggcctgtgaaacattattatatcttcatcttacagatgacagactgaggctaacagagttaacttgtttagagtcacaaacctcaataagacgcaaaataacgaccagacccagggtgcctgactcccatgcctaccagcctcagcagcatactacactgcctcttcctttagaggctttccagactttttttaagacacagtctcactctgtcacccaggctggagtgcagtggcacaatcttggctcactgcaaccttggcctcccaggcgatcctacccacctcaacctccaaagtcgctggtactacgggcacccaccagcacgtctggctaatgtttgtatttttttgtagagggaggtttttgccatgttgcccaggctggtctcgaagtcctgagctcaagcaatccacccacctcggcctcccaaagtgctgtcacaggcgtgaaccaccgcacccagccgtgaattatcttttgtttttattttctaggcaaagggccgattacctttcattttcccttcatgcatcgggcatcctgaaggtggggacgctgaagcatttgaggcctgaactgcaacagcaggagcagatggagacaaacccatggctggaaacagtgttgactgtaaacaattttaaatttccacctgccaaaacaaagagacagattaatgtctctggactcagactattctctcgttagtcctaatctggtcaacccttgttcctcctctttgtcatcccatgggcatctaccaggcagggtactaacttcgaaggacagctttaatatattgcccccttagggaaatactgtgaaacccaggccaacctctgggggcacgtatgtatctaaggcagtgaggattttgggactgaggtgaggcagtcgctgagaaaccacgtcacagccaggaggtacaggcctgaggcgggagtggggcgaggatttccgaggagtggtgacccgggtggaggaggggaggtccattgagcctagacttgacccccatccccagagccttagcgaggggctgggggtccgagaagggtgcggcgcatgaataggaattcgaagaaacgaagggacaccagaggtcgagaagctgccaagtgtcttccccacaccgtcccggcgcttgcccacctgctccagcccgtggtccccagaccaaaccggccgcggccagcctgcccttctgcacctaagccctcccccgggctgttccgggaggccggtaccgccttcagtcgccaacccgaacccagagcagcagtgacttcacgccgccgccgccgccgccgccgccttcctctcactcggtcaccgctgtggctgcggtcaccgccggcgttctcacgcacccctacttcctttttagaaggcgggacttccgggcacgcgggaggcgggctgaagagtaatattttccgtcaatcacggagagcgggttccgtcccctcctcgccccggcctgtaactgctgcgggggccgctttctgggcccgcccctccaggccaggagcctttttcaaaatgtggcggtggcagggaaggttgtctgctccagaggcttccctagagtgaagagctctactatgtatgctttatgcggcagaaggagtgctttggaggagtttttaaatttgttttttttttaaatcttatcggttttaattgtagcaatgattcaagaaacgttagtaggtgcccataacttcggtggtggagatccaaaagtgaacaagacagtgttctggctgctaaattcttcttaactgggtatgtgattttgaatgtctgtattttcatttacctccaacagaaatttagcattttcttccatcagggatgtaggcaataaatcctagtactattagctgtatgtggcactaatacacattacagataaattatgtcacatatggttgttgtgcctgtctcaaaatatcatccatccactactttgaaattaaggtaatttgatcttgttacttaaagtgttaataaagaaacatatatctttctatataactatagtggctctgtgaaatacgtccagatgtcccctggtgcagaaagtgttgggggctcacagctttcagctgagtctccaggaattgtcctctgcctaagagaattgcctcacacaaaatcacttcccctccttggggacgatctgcatcctatgagggtctctgcaagggcacataagtccaggcccctagccccaaaggggacaactcagaagggccatcccagcatcagaactgcctacaggatagcccaaggattccatttcaactatcacagctcaacttctctctttacccacaattcttttgtccctcccacaattccttttcactcccgcaattctgttttgttacccacagttctgtctcccacaattctcagttctttccacaatcttctgtctctcccacaattccttatttctcccacaatcccatgtcactcccaaaattctattccttcccacaattcatttttctgtcccacaattccttgtcttgctcacaattctcttgtttctcccatgattccttgtgtctcccacaattcacttttctgtcccacaattccctgtcttgcccgtaattctgttgtttttcccaaaatttgctgggtttcccagcaagcctttattctttcctacaaattcttgtatctctcaaaattctgtttcccacagttccattcctcccacagttctctgtcttttccatcattccctatgactctgtctgtcacaattcctcaaaattattcatttccacaatgttctgttcattcacaatactctgttcttattccccagtctctcccataattccccattatctctcataattctgttctttcacaatattctttttcatgatttcctttctcccacaattctcccttcattctcataattattccgtctctcccacaacactgtattctctcccatggttccctgtatctcccagaactctctgttctctcccccaatttcctgtctctccctgagttctctgttctcccacaattccctgtgtctcccataattccatgtttctccccacaatttttggtttcctctcacaattctctgttctctcccacaattccttatctcaaccataattctgtattctatgctacaatttcctatctttcctataattccccatctcccccacaattctttgttctttcgcagaattctccactcttacaattctccattccctcaaaatactccatgattgttcacaattccccagtctctcccctaactcccattctctctcataattctgttttctcacaatattctcgttcacaattttctatcccacaagtgtcc

SEQ ID NO: 1563718 - DNA, 4001 bp, Homo sapiens
ggggttagtgctgggagccgtgcctgccactcaggactagggcatcccaaggccctcccccagccgcctgcagggggcttttccctcacccagactcttccagctcttgcctgggaccgaactcaccctgaccctgccttctgggcaaggccagggtcctgtgggccaacgggcagtcagtaggcaacttgggaactgacccttgtgctaggggcacaaaacgggccaagtagccaccaagaaaaaggatgccacaaagctgtcgtggacagcagcaggctttctgccctagagactaagcaaggctactaggcagaggcaacaacaaacggcccccacgaaggccgtggtgcatcagccatacctgaagagagaggttcctccccttcccaactaacgggctttgggttttgcagggaggcagaagagcgggtggggtaaccccctggatccgcagaagcggggagacacacgactacgcaggccgctgaggggtaactggaattcagcttgtaaaccagaaggcaccagattaggagaaggggcgacttggaaagaaatgctgcagaagtaaacgtggaaagggagaggcggccctgccgccggcccgtcctaggggtccccaaggctccggcattacccgggtcggcggatgttaaactctgcgtcctaagagcgcttcccttccctccctttttcgagagacagagaacgaatctgtaatctagaaatggtcatttctccagaatgggcactcgagatgagggagagctgagcaggcgcaggagaagggagggagggagggaggggagctctgcctgcgccaaggggacacatccgcccgccccagccccagccccagcccgctgggtaacggtgtgggtctgaagtcaccaccgctggcgacagcccctctccctcaccagtcggactaggggctttcttttaactaacgaaaaccaatcctcaaacacgggagagacaagggaacggggagaagatcagagaaaagcactgaagcccggcacagcaaaggggaggggcaagccgatcagtggggagggagggggaggaggggagaagggggagggggacggggagaggggagaaggacgggtaagggaggaggggagagagagagggaagggtagagggtgagggaggagatggagggagggaggagagggagggagcagatggagggagggaggaaagaggagggagagggaggagatggagggagggaaagagccgaagacccagcgggctttgcactcacccgtgttgtacacgtgcagttcgtccactattccctcgttgccgccgccaaacaccacgatgagctccttgatggccacggcgcggtggccgtggcggggccgtggcaccggacccgaccagcccaccactcgcttccagcggggctgcagaagcaccgctggcaagttggcgggcgacacggccgaagccatagttccgggaaagggtgcggtggggagaagtcaacaagcgggaagggagcccctcaattcctttcacacaccccctttcgtctaaggcagctctcacggagaagcggtttctcacacagcggtagacgactccatggaggccgccatcttaactgccctccttccctttggctcttccctttcttctcgctcaccccgtctccgcaagagccgcccgaaactgtcgagcgcctaggctcaagaagctggaggccgctgagtcccgtcgccccgactacttgtccgggcgctcccgcttacaagctcgggcgggaggccctgggagccgccatcttgagccgcctctctctcctcccttcctcagtcgtagccctcccccgccggaaatggcggagccccggcccggttcccacacccccaagtccccagcactggccggcttccggggcgggtggaaaggagccacaagcgccgcggtcgtcgcagccccgccggcgctcagaccacaattgtgggagccgccatcttgagaccgtcccgcttccccgcccagcgccttagtgcagccgccgctcccgaaacagcctcgacacacctaacgaatggaggcgggccggaggccggtggaaccagctcgagctctcgagggccgtttgggggctcgcgccgtacggcttgtgaagtctcgcgcctctccccttagtccgcctctgctgctcaggctgcgcctgccgccgtgggagccgccatcttgagactagctccccgttcccccctattctcttcctcctaggtcagttcttccactgcacaccaaactcaaggcggtgtccgatcctcacttcccgccttatgactccttcccacaggagccgcttcaaagagctagagttaggccccgaagcggcaactgtacggcagaagaagcggtaacggcagggcgctcatgcctcctccctgggagccgccatcttgtgtgaagaagtaacaactaaacatggcggcagcggcgccggcggtcgggcgaggaggcggagccgggtgacgtcaccgcttccccccactcgccctcgcaccgcttcgcccctgggcccaagcctcttaaaggacccctgcgctgcctcgcggcgggggtgggggtcggcgctgccgcgcgctgggctaaagctcgagtcgcgctcagatcaggtgcaggcgcaggcgcgccccgccccacggcccccccaccgggcgagcctccacgcctccgccctgggagccgccatcttgccacttcccctcgcccggccgtccgcgggcgtcaatagcgactttcagcacaaaacaaagatggcggcggcggcatctcggaaatgcccggatgagactgctaacccctccgacgcgctcggccccgcccccttgggaacggtctctcgggttgataagggacgcacgcccgaagaactgcctttaaccagcactggggacagcggcacgcaggtggccggggttggcgaacagccactgcagccgcgcctgcggccgggaagcgagcattttcgcgccctgcacacccagcagccgcaggaggcggcccgaggcgcgccgcgggggagccgggggcggggcgacagtgggaggcgacgcagccgagcgccggcgcccgggggtggagcctccgcccgctcccaggctcccaggctgcggggcccgccctcgggcgccaccgcctccgcccgcgccgcagcaaaatgagccgggccgcgcgccccagaccgccgcgcgctcggccgcccccactgccgagaggcccgcagtcgggccggtggcgcacgagccgggcgggcgaccgcgggaggcgtccgcgtcatctcgcgtcacctcgccccgcccgcttcccaggcttcgagtcccgccctgcgcgcaggcgcaccggcgctgctcggatcctcccttttcggagatttgaatttcccccagcgaggcgagtgaggcgaaatacccgtatggtgatagctggccttttcgcgccaatactgtaagtgctcaccgcagccctgggaggtgggtcccggcctcgcccccacgtttcgcctcctctaggaggccgcccgggcgcggcggcggcggcggcggcggcggcatccgccctgccacgcgcaggccgcagcgcggggacccaagctgctgcccgggagcggcagtcgccagtagaaatggacagaccggtcctgtcagagcctgtggcttttgttgtaaacgtctagaagttcagttaaattacaagatctaccagatctaccggcgggcagaattattactttgaagttactgaagttatgcgtcctgctggaagaccttgtaatttaatgcgttagtaaagaagcacacgtcaccctctcacacattttcaacaatatttttaaagtcgcctctcaacatattacatgtattttgtaatcgtctgtgttttagttcatgcagttggaagtatccatttgagaagggacaaagagaagaattcttgcctgtctgtgccaccacctg

SEQ ID NO: 1563719 - DNA, 4001 bp, Homo sapiens
agcgattctcctgcctcagcctcccaagtagctaggattacaggtgtgtgccaccacgcccaactaatttttgtatttttagtagagacagtgtttcatcgcgttggtcagaccggtctcgaactcctgacctcaagtgatccacctgccttggcccccccaaagtgctgggattataggcgtgagccaccatgcctggcctccttaaagtattttaacaaagacatcaactcatacatatttttttaggttgctgcatgaacagataatagaggtgaggttggaagtaggggaccagggaggaggcctctgcaagtctaggtgagtgatgatgatggtggcagtggaggtggtgaggagaggtcagatggtgaatatattttgaacatatagccaaaaggatttgctgattctttttgaaaagtaaagcaaacgggaggtttcatccttctgtttcagtacaaacgtctcttcctctataaaggcttctgggaagcccggatactagtttaggatcctctattatacacccttgaatcccctggtcttaagtctgtcttcattaaacacctcatactgctgttggctgtttaatgatctgccctcctactcatcaatccgctcctagagaaggacccctgtctgttgtttggtacatttgtatcaccaactcttggcacacaataggcactcaataaatgtttgttagctacataaaagaaccctttcaagtgtgagccctacctccccaaatcatctgcttccagtatccaggctggggtaagaaaagatttattcttgctaatgggctctaagtgtgtgtatttttgtggtttggagacagcctggaggacccagcctcacctgtcatcccagaggcaatggaattcatttaactgctcatccaacaccaagccagtgccagccagtgcttcagcctcaaggttcagatcctgcagaggaaaaaaaaaaggagacacagatccattttaggccctgagtcagagggaactgtccagggtggggaacctttgggttttgattgtcatacgaggctaaactgcagccaggccctgctcaccatcccttgcagtcccacgattaggtcttcttccattgcttggccgagcttcttcattttgcctttcttctttacctccgctagattggggatagagcggggaacggctccctttttaatatttcgcttctgtgaatcagagagaagggtcagagtccagggcatgaccaacttgctccctctccccctcatcagggcgggtctagggcctcaccgaagtgacactggagtcctgagggggcgactgggggttctgcctacttcttcgctgcctggttgtggtggaatcctggccggttgaggtcatagttgaggaggcttggcccctgccgcggttctgggggtggggggaggagcgtgggtatgtgagggggctagtgtgccctgaggaccccacctctctgcccttttccaggctccgccccctctattagattccattccttacgcgatctgattctccacagccttccaaactccgcctctctcaggccttctccctccactcaggtggccattctacccggccccgcccggcccgctagactccaccccttttacacgattctctttccctggtcttgccctttcacggagcaatgagcccccgggctcacacagtccgtcttagggcctgccctttccaaccaatcaccgccccttctactctcctaagccccattcccagaccctctaagcccagcccagaccccattccttcacgaacctgccctttcggcctatctcccgggataatcacccaccctttcactcagccggccccggccccgaccccggtttcgactccacccttaacgattcacttaactccaccccttatcgggccggaccggtaccttccactccgccagatcccgcccctagcgtttcaaccagccccgctcctcaggggactgccccgttccttcaaccagctccaccccctgcccagacccgaccgctaacgtttcgctaaccctcttcagccagtccctagccgccttcggtcggcctccgcccccttcccgcctccgccgtcgacgcgctgtactcaccgctccactcattggacgcagcccctttctcaaactccgcccttggctcgctccaccaagtttctggcgacctgtggggacgcgagcgctcaggcttttcttttccattgggcctcgtctctcgactgcccgcccagatcccgcctccagaggggaccgtgcctcaaggccgcgcccctcgcgcgagccacacctctcgcgagctcacaagcggcggggcggtgcgtcggcgtgctacgccagctgggctgagccacaccgcgagctcacaggcgacggggcggtgcgtcggcgtgctacgccagctgtgctgcgcctacgtaaaaggcaggcgccggcggttcccgacagggctgcggtgcaagctttttcttgcctcggctatcgtcgctgtcgtcccggatgccatagccgccgcccctccgtccctgtccagtcacttaggagcccttcgggtcggcggtgtctggagagcaagcaaggaagcgagggaattaggaaggggcatcttaccttttccccgcgacttcccgcgcgacgcgccgtgatgacgtagcgcgggcgggctggttgtggctgggccgagagcgaggttgccactggacgttggtggtggcggccaaaataggcgtggtgacgatgctaaatgtgaggattttccgagttaatattcactatggtggtacacaggaaacactggccgaatattagctattaatattctgccgcaatattctgagtggaaggagtcttagtgggggcagggaatggtaatgatagcaagtattatgtgacaggcatcgttgtaaaccacaattctatgaggtagttcccattattaaggctgctttgcagataaggaaactgaggttacgggacttaaccatgtgactttgggcaagttgctgaacagttctgtgctccgtttcctcatctggaaagttgtgataataatagtgcccagggccagaatggccttgaggatgggagttctcatgggcagcagctctccctatctgccccctccaacgggtaaccactgctcccaagcagtaatagaaagtgtgtgtgcgtctggggagctgtccctaggcaccccctctcccccgcaactcccactccatgtctaaatgtcagctctgcaggaggccggtttgtcctcctaatctccctgtctcattctccaccatttcctaccgggctataagctgggaccggagagataagcagtccgggggttctgcatcagactgacagattgacggtctcaccgcccagtagctttgccctctgatcctcttgaagatgtcctgccgcctcttccctctcacccctcctacgtgaacctatcttttgtctcagcgcaaaagagttgcagacctaagacctttaaacccctacactcaccaaagaaaacacatacaatgataacacactacaaaaaaattctagagttctgatacctgcagcctgatagagtagggagtcttgcaaagggtcaaggcccatttttctgttggatcagaagagaggtttctgaagagcaggggtcagcaaactttataaagggacagagagtaaacatcttaggctttgcaggccacatacggtctcagtggcatttttctttttttctctttttaaaaaacaaccctttaaaaatgtaaaacagcccacagtctggctttggcttgaatgccatagtttgccgatctgtgctgtagtgtcaggccttggtctctatctggctggtattcttttgcaggattgagggtaggggccttttttcctaaggagaggtattccttttgtgtgaggtgtgtgaggacagggattcatgggcagggtcaggtcacttctagtgt

SEQ ID NO: 1563720 - DNA, 4001 bp, Homo sapiens
ttagtagagacggggtttcaccgtgttagccaggatggtcttgatctcctgagctcatgatccgcctgcctcagcctcccaaagtactaggattacaggcgtgagccaccacgcccggccttctttggtcttgatctgtctccagcctcacccattaaagtttggtgctggtggtgggttgtctaaaagtcttaggttgaactcacaccctcaaatctggcttagaatgaaacgaaatcaaaagaaaaatggaacacctcctagctgaacacctttttgtatgagacaggttttaatacccaaatgtactcaaaatctccacaatgcactgcacctacccctgggatacttaaccaagcaatcgagctgtatttctaatgaaccttaactgcttcctgcactttccactcccctgtcccaagttttcttttctttttctttctttctttcttttttttttttttttttttttttttttttgagacggagtttcactcttgttgcccaggctgcagtgcaatggtgcaatctcggctcactgcaaccttcacctccggggttcaagcgattctcctgcctcagcctcccgagtagctgggattacaggcgcccgctaccacgtccggctaatttttttgtatttttagtagagacggggttttgccatgttgggcaggctggtctcaaattactgacctcaggcgatccacccacctaggcctcccaaagtgctgggattacaggcgtgagccatgctctcggccccccaagttttcttaattcttcaagagctttcttgggattacaggcagattacaaacactgtgaatactttcacagaaagctaaaataattttttcaaaagaccattcttttccttgccccactgtgaagcaggatattaaggctacgaacacctagcttcagggctatgttcaagaaagacaacttacctcatctgcttatgcagtgcatatgcttcaatcaaagaatgcaccatactggcctaaaaacatcagcgtaaaaaaaaaaaaagaaaagcagaaatagtctctttaaagtttaattcagcaaaatccccgtcaatctcaccatcctgaacaaaggaacggattaattttgtttcaactggcttcccttctgttaacagttacaatacactttagacaatacagatacaaagtatcaaaatcactaaggtgaaagctaccgggccttaggcaggtgatggaacaccttccccctgcagcttgttttcccacgacttcagcggtcccctatgagtggaaactgcgtcctctcccctcctccgtaccccctcccccactcctacctgtccattggacgtcccgaagagacatgctgcgctctcagaaacgatatgagaacacttccttctgatacagctttaggtatctgatacagctactcgaaatttctgaagatttcccccagcccagtgtcctctccgcttcctaacgctctttcgtccaccgcccccacccccacccccaaagcccatggtctttcatcccgacttcccttacccgtttggggatcttggccagggagtcacacatactgacatactcgggactatagatataaaccgggaccagcgactgcccactgtccgccggttcctccggctcctccatcttccgcttaaaaccgttccgcagccaccttccagatctggcttttttcggactcggccagggttccagttcctgctcctctgatcggccgcagcggtgctccctggtcaacattccctcctattcttgagatcgccggagacactatcaccgctccccatcctattgaaggaatggatgggacttcccagaccagactcccctcatttagtgaccacagttcaaggaaaagggtttggcagatgtaaaagtccaaatagctgtcaattaggatcgattgtttttatggcacaaataagtagggtcaaaactaaccatccttgttgccctacggggccatttgagatgaagtcagaccagtttcacagcatgctgggagatgtagtttccggaggtttgagcaacggaagagccggggctaaacactaaaataaccgcgatttttagtttcagcgctaagaccaaaaaaaaaaaaaaaaaaaagtagcctcaactctttatgaattgtttcaatctgcaaacacatccatttcatccatttaaccatataaacacagatagaacgtggccacctagagcccccaccatccagctacatcagctgcctatcctaaggataggctttttttttttttttttttttttggtgggggcgctatttaatggcacaaatggtttgaaaagtttacacagtaaattctgtgatgcaattttatagttcatttcttttcatcattaactatccatgtccacatgagagttaacaatctcaataatttactctggcaaatctgatagtactttcccaagagactggctggtgcagtggaaattgcttggtagattccgatcaagcaatgatgtcaaatgtaactccttgaacattcatgtggtaggaaggttgcaagcagtggtgtttggaaactgcagctcttctcctcctacctcctcttgtttctgcagctaaacatagattagggaaatattttaggtttggtgtgagggtccagtttaagactatctgaggcggttttagaattaccatcagcatttggaggttcctggaggcccctatgatctgatacaagctggccagtgctcaggatcttaattctcatggcaacctaaactgactgactaacaccactgggacaacctaatatccttactatatttaaagtctggcttgctttttagactttaaacatttattgaagattgtgacatgcacattggccatattatctcatttcatccttgcaacagtcctataaaggaggttgcaatacacccattttacagatgcagtttagagaaacaacattcaaaatcacatacttaacaagcagataagtaggaattcaaaattaggtcagcctgacactgaagcctttgaacattccctttattatataaacttgattcgtccaggatgactttgtgttatgatataactttgttcaccctccattttgtatcccttcaatacttattctgaaaatcttgggggtgttttggtgatgtgctctgtaactagaatgtaagatcttatgtttctttaatttatgtcttcccatagtaactagttaaaagctctgcagtcattcattcatcaaacatttatctgatattaagtgtacagtacagctgaggattcaaaggtaaattatgatgtgatctctgctctcaaggaatttgcattctttttttttttttttttttttttgagacagaggagtcttgctctgtcgcccaggctggagtgccgtggcgcgatctcctctcgctgcaagctccgcctcccgggttcatgccattctcctgcctcagcctgtccaagtagctgggactacaggcgcccgccaccacgcccagctaatttttttatttttagtagagacggggtttcaccgtggtctctatctcctgacctcgtgatccgcccgcctcggcctcccaaagtgctgggattacaagtgtgagccaccgcgcccagccagaatttgcattcttatacagaagatggggcaagtacacaagaaaccaaaggcaatgcagagtcaatgaatgtaggatgcttagcctacttaataaataagcattaagtactaaataactggcatttaataaatggtaactagaattcatctttgatggcatttgagagggtcttaggaggtgggcaagattttgcttggtgaagatgggagccaggagagggcatgctgactagaatgaacagcataaacagtaacacaaaagggaaaatttctagtcgagtttagctaaaagggccagatcatgaagaacattgaataccaggctaaagagaatagactacat

SEQ ID NO: 1563721 - DNA, 4001 bp, Homo sapiens
tctgactagatcagaggattgggtaacaatgtgaggtcaatgcttgtaatgccatttaagtcacattcatcacttcagggcatggctatgtgtgaatctagaatcagaattaggcaccaagctcatttagaagtttaataaatttaattttaatgagacatcttgtttggtattaaaattcatgagactcccagaacaggttctctggacctttattagaggataagaaatttatttgacaatttaactttttgaccaccggagtaggaaaattcatgtctacaaactatacctatgtatcccacaagctttctgaaattgagtcatttcaaatttagtagctgcatacaccgttggctccaattagtgacctctacggggattttttttttcctttggaattcatcagtttacacctctgtgttcataaaatgaagagaatggtttctgcatgcctttttaaaaggaaacactgctagggaattacccagcaatatgatgagcagaaacaaggtcacattcacaatttaagatgagctcaacatcatttatatttagaactggatcaatccagaatcgtttctcagcttggcttattagctgtgtgaccttgggcaagtagctttacctctctgagctgcagggttttttttttttttttttttttaattagtgacatgcaaatacttcctcctaacttgcagggttttgaaatgaaggaatgatatacgtaaccaagcaggtcagctgtctacaaagagtatgcagacatgtttatagatatatgaagcctcctggtgattatgtgtcatagtgttaactgtgtcaaggctttcggtagagctcagcatagttctgtcttgagttaaaaacagggttttattctttgaattctacttgaattcctcttggctggtgaagttcacatgtgctaagactgactaccttagtacactgccaagggtttcttaatgcctcggattgatagagcagctgttctcaaacgttcacgcgcttaaaatgcagattctgattgggcaggggtagggtggggccccagcttctacatttacaagtagcccacaggtgatgtccccggtgctggtcaccctaggcagccaggccacttgacggaccttctgtgcctctacactgttgacggcgcgggataattccttatggttgcatagggcactcctgtgcactgcgggaagtttaacagtatcactggtctggactccactagatgccagtgaccccatcactcctcgccagctgtgacagccaaaatgtctcctgacatcgccattgccagatgccctcagggctgcaaaaccgccaggtagagaaccgctaccatgcaggatgctaccatcaaagtgcgcccacagcagcaaccttggagcaggcaggcaagtatcctccaggctactttgcagacggggaagctgaggctgggcaccgctcaaggtcgcacgcatgcgtaaccgaaaagagagcgcggaggtcccgccgcgcctcgctctgaggagaggacgcggagccgcgcgcccgcccggtggaccccagggactgctcccacgtgctccggccccacgcgcgggccgccgaccggaagcgggtgctggggccgcgtagacgccgcggccacgcgcgcccgccagcccggacatgggcccgcgggcgctcctggccgccgcccgacttcggggccagccgggggcagagcgcgcgggagcccgagcgtccctgcatgaacaccgccccgccgcggcccccaggccgtgacgtaccccgcgccgaccgtccccacgcccacacaagaccgcccttactggaggcggcggctgcacactacccacccagaagaagtccgtccatgtcaaagatgaggtgggtgacgggctgcgggggcgccgccatggtggcgccttctgggtctgggtgggggcgaggaggaagtgcgcgcgcacccgcccgccccgcgcacgcgcactgaggaccttctcgcgcgcccggggtcgctctgcgcacgcgccttccgcggcccctcgcccggctccgagcccgcgcgtcctgggctgcctagtggcgctccgcgcacgcgcaccttgggctttcgccgcagctgtagctgcagacccgggatgcggcgcgggccggcgctgtatgtttacccgcatcaattcctcctcacttcacacccggaatcgggccaagctactcagccagcggccgcgcagagccgaggccctcgtctggggacaaattcagtgcttgagtttggatcaggggtgtgaatgaggaaggagggacagtacaaggggctgtagagtggggaaaggggattgaagatgctcagggtggtatcacttctagccatcaggttgcagacaaatggccttggtcaggaggtccctgggtgggttcgcccgagcccccagtccctggaccgtgggtgggtttttctcagtttcgcttgcccgcctccttgcggtcctggaccgcgacttgaaccggcagccgcgcatgcgcagtgtgcggagaggctgcacaacctccgtgcctgcatctctgagcatcccaggctggtgcattgtcccagagcaaagccaagctgctcaaggaggatgctgaaataatactaacagtcaacatgtcttgctggttgtgccttcttaggtatcatctgtcttttgggctgctctgagttttctttcttttttaacttttcaaatgccacctaaacagctttcttttttttttttcccgtttgccatcgtcaaaaaaatacttttttgtccctgtttctatttcgtgttcgtttatgtggtatattcacgtttaaggaaaaggattggaccttttgagaagcggaaataggagaatttcaagactttaaaaacgtgagggtgtgctgggcgcagtggcccacacctgtaatcccagtacttagggaggcagaagtgggagttgggggaatagtttgagcccagaagtttaagaactgcctgggcaatatagcgagaccctgttctccacaaaaggggaaaaagacaaaaaaaaaaaggtgtaaacatgagagtgtatttctagtttagtgcagacatagtggacaggggcatgcctggattcagcaagaattattatctatgatagacaaagtgcacctgtgtctgtttcctcctgggtaaaatggaggtgataaaggaggtgaggcaggccaagcccttagtaccagtgcataatatatagtcaataaaattatgtgttcttagaggtggtactataagagagcttcccccatttaatgcaatcgtgatttccctttgaggacacgggatttcagagaaggcaatttatgagcaaattaggtagggacttgcgcctcaaatacagtcgttcgtggtttctgtattagtttactacagctgccatagtaatataccacagactaagtaacctaaacagcagatgtgtattgtgtcacagatctggaggccagaagtcctagatcaagatgtcagcagtcttaattccttctgagggctgtgaggaaaggacctattccaggtctttctcctcagcttgaacctgctttcctttccctgtatcttgtcctatcgtcttccctctgtgtgtgtctctgtgtccaaattttctccttttataagaacacgattcttattggactaaggaccaccctaataactacattttaatttgattacctctgacaaaatcctgtttccaaataaggtcacattctgaggtagcggggatgaggactccaacatatatttttgggaacacaattccataatagatgcattgcacacacatagctgtggtacctacagtaagtatgacagtatttcccacctggagtctgtagaattctccctcccagtttccttccattctctggaaacaaatggatgcacacatgtcagagttactgttatttttttggtattgtaaccacctcacatttctgttta

SEQ ID NO: 1563722 - DNA, 4001 bp, Homo sapiens
caacaacaacaataacaaaggagacaatacaaagcagcctacaagcaactaacaaagacaataattgacgtgggaattctaggaaaagtgaggtcagtaacacttgcattagattaatttggaaggcacttgtggaggggtggaatttgagttgagtttccaaagtgggtaagatgtgaattatgtagaaggaggacatcctacgtggaggggacagtaatggtataaggagcaaagatataaaggtagattgttctcactaactgaacattaaagagagttgtgccctgaagaataaaggaaaataaggctcctgcattacaatgaggccagattatgaagttctttaaaattcgggtggaattaggcttgaaacaatagaaaataaggggccaagaatatgttggttaaagaaagtgatttgttgaaagaagtgttcacagaccactaaggatttggggcacaggtgaagactgcctaggaagctcctacagtgactacatgggtgctgatgagaatttagattgtaaaggaggaacgtgtgagaaggctttcaaaggaaaatttaccagtacttgataatcccttaactatgagaaatagagaaaaatccagattcctctgtaaaattgtcaggagtctatgatcagactgtggagggcaattaataacaatactgtacaatctattcatcaataatagacaggcaggttgttcttcattgttccccacaactgctgagtaataaaagccttaatataagtaatataacagccttcccaatgaaggggtgcgggaaagggcttctcaaaataatatttgacttcagtgattctagcagagacacagaggaagaagatggactcagcaccaaacttgatatggagactaaatatttataagagattgtcccaagaagagaaaaaggcaagaaaggaaaatttcttactctgagcctccacaatggacttcattctgagtctttccaaagaatttaaggttcaaaatcattgtcacctcaaatcagagctcctttaagattaaaagttagattcatttgaataattagtgtttatttttccaaacagtttcttatctgataaacttctatttcacaaattcttctagagttcattccgttattcaacatctaatatctggaaatttagaatgtgccttctcaaatttataaggctcattttgaagctggatttactcagtaggccagtttaaactaaatggcagatctctccccatcaactggtgcttgaaacatcacaaggcctgggatgttccctgggtctctactttccaaattcagcacagaaatggctcagccccacctcttccagtgaaaccgaaacagcgcctgtgcaaactccacgcctattctcctcacagtgacccaccccgcccccaccaaggtgctaatgcgcaggcgctacgctctcagtgcctttgagtagggctgtgagaaatctactgtccagtgaaatctagaagtggtagaattcaatcccctcctttcttcggaggcagaggcgccacttcctcctactacccgtccagaagcgcgtcccaaacatcgctctctctccgagcaaggtccttcgctctctggcaatccccattgtatccctatccgcagctcgtttctaatctcactcagccgccagccttcgctaggaggatagaggcacttggctccctaggatccgcaccagttttttgtctgcctgtttaggccacggaacctatggacccccccacccccaacctcgccccaaactaggaaaagcattatcccggtgctttgccctccctccttcgcccttctcacccacttagtgttgagtgcttacctcgggtgtggtgcggttacgaaaggaatcagcggaacccagatcaggccgctgctggggcaggcggattcagcgagatttttcctgggtctccagtgccgcttcagacaatgaaatcagcgtgtccgatcatcaattctcatcatgatcgtgacgtcacaaaagacagcggccaatgggagcctgcgatcagctcaggacagtccctggcctcagcccagaacccaagagttgggaggggggaagagagatggctgcctgcaactggactgcctcttcctcacacaaatcagctacatctacggccagggctctctataccttcctgaatagctgtgaacaccgagcatccctgtgactatagtagttacatgccagccatttgagcaggtgctgcctggccttccaacttgacattgggttttaacaaaattgttacatgctgccaaaatcaaatgatagcataaggaaatacagtcctttgtggtcagtgttcgattgacaggtaaatattcagttttactaaaatcaataaggtgtccatcgagcctttagaattttacagtaaaagcaagtgtactattatacgtgactggttggctctgatgactgaggaaagaaactatggtttttattcatccaacctcaattcctattctggcagaagcttcttgggtgatcaccattataccattccagaaaagaagtcaagccacatgttacatcatttaacagtcacttgatatacttcccagatttgctggatgccatgagagatatagaattcattgattctctgctatcatagaacttgcaacatcgtttggaagacaagattagcacacagtaaatattcacaacaataaaataaagtacatgatcatgtgctcagtcattaactacagacaagagctacattatttaattattggagacatcagtgaggtgaaaagtcagggaagcattttatgtaattaaaacttgagatggttcttgaatggtggataagagcagatggaagtcaccgtcttaaaggggaaagataggcaaaggtagagacgtataaattcatatgatgtgaggaagcccatgatgaaatcagcttgacaaatagagggcatatgctgaggactagtggtagatggaattggctaataataaaagcctttgaaaataggcagataacttttatttgattaaaagccaccaaaagccataaagcatgtgacctcaatcctctatagtcaattatctacagaggagtttaggtgattttttaaaacaaaagccagattatgctcaacttcagattgttcaatggtttcctttcacatatacaataaaatgcagatttcttaccatgtcctcaaagccctaaatgatctggcctccgccatctttctgacctcacctcctgtcactcagccactaattcacaaatatattaatcttctatttctcaaacaagtcaagctcatgtccacagcagtgaccctgtactgttgtactgtctgatctttatatgacttactccatcacttgattgaaatctttgctcaaatgcaacctctttaaagaggttttcctatttaaaattgtgatatccttaacactctctatacccttttttctgtttcatttttcttcatagtatttattattattaaatgtattttatatatttagttattgcaaatgtaagctctatgaaggcagggatttttgtctgttttgtttattattatatccctcaaatctagaaagcctctaaatacaaagtagacaaataagtaagtacgtattgaatgaatgactgaaagcacatttttcaagtcattaatttgcattttcagtaacattgcgataggctggagtgagagagaccagttagacagttgtaatgctaacccagcttctaggtgacacacccctagattagggtgttaaaaatgatgaaatatgagactttcaaagaaggaattatatgggtaaagtggaggattcagaaaaagcctattgataattgattaacgtattcataaattacgtttatgaattacctgaaactgaagtgatatgagaaaaaggatcagagtccctacccttgaagggtttataatgcaaagacacaagaagact

SEQ ID NO: 1563723 - DNA, 4001 bp, Homo sapiens
caagagtgaaacacgggtctcaaaaaataaataaataaaataaaatataaccacttagatatttcatggtacagtggaaagcgttcaggcaccagaaaatagtaagttctagctctggattcatcatttattggttatataaccttgaacaagtccctaacttcctgagcctcagtttcctcatgtcttaaatgaggattgtctctactttgggcccctcattagtttgtaataaaggtcaaataatatgaaagatgtgaaagccctgtgtaagcttttcacttgggcaaggatattttttttctcagctaagcccatagagaagaaccagactgatgaggaaaaagaacaggaagaaataaaaggagaaatgaaataagtaagttgagaaagaatcctggaaaaaagtaaaaaatacaaaataaaaaggaaggcagaaggaataggcactcaaaggaaggaaaaaagaaagaaaaattctaggctatttggatagtttagttaagatatactgaaaccttgtgccaacctggagagaagatcagccaatataaagttaagcctcccttacctttaccttaccttcctgccatcccagtgtcacctgggtctggtccctattattcataacaatttgcattgctgtgttccctagaatttgcaaactgttcctttattgcgacaatgctcttttctctccctccatctccctttctcagttatactactttgggctagacaggctcatcctaaacaaaggattactcaactgaataaaggaatgctgagccatctttggggccctgtcttcaatctctcagcagccttcctaataaaccctccatcaaaattcaccttttggtcctctgctttcttaactctgtgatagaaaacataccgatttgaagttaaagaccttgattcaaatcctatctcttgtctgtgatagctatgtgacctttcaataaattattttagccttagtcatctcatccaaaaaatgggatgatatttttttcacaggattgtcttgaggcccaaataaaaccatggatatttgagtccctagcaaaaggattgcttgtcatataatagatgctgagtaatgaaaaactgaacgtgttatagattcacacatgcatgaaacctttagaaaccatctttttcaatcaccctcatttgatgtataaaaaactgataccagagaggtgcaaggatttgctcaaagtcacgcagccagttgttaaaaatagccagaatttgaaccaatgatttctaaaagatttttgctatgtagaaactaagactactcaaattcagatgtttagcttagttaagctatcatttattggcttactctgtgccaatctggtctcaaaatatgaaaccaaacatggttatttttaagtaactgagttcccacttacataatcctcagatccatcacctcaataaattcctcaacctgtgaaacagaagatgagcaagctatttcgacaggaaaatgaactattctgtatggctccaggattggccctgaaacagacaagccagtgtagtcctggctattttggcgagaggaacaaaaggagcctattgtctcctttaactttcctgcacatcagccaaacctcctccaactttttggccactgactttttctcctagtggccaggactcccttaaacccagctaaataaacgtttttgcacaggaaggcaggtgaggtagagtttgaaaagagagaaaagaaagcttacctttgctagagaaaactactccatattcatgtcagcggcccattaatgctgcactgcagaccccagcctgagtccgccagccatgttcagtcagtatcttggttacagggcctttctcctaaattaagtccaggattccaatttggcagggtttactgggatgggaggatgagggagggggaagggctgggtgccctcttttccagaaacaaaactactggaatgtcctgttcctctggggcctggtttgatacaaaacccgggatggttctttacccatatccgggtgttttacaaatcctggttaggatctcaggaggaattacaagggggtgggttgtacttctgttatcaggacttgctaattggtctttgctgagaggagaacactgtcagtgtggccagccaaagctcatgggtagatttcaacagctccatttaagaaatgaggtagaaattgaaagagcctccatctcaccacctcttccccttcttgctctgaagcacaattgtcagccctgactattattctgaggtcatggctgcttagtcataagtaaaaataaaattggcaataaaacaaaggactttttttctacattctaagccctatgttaaccattttacatgcattctcttatttaagtctcacaattatcctgtgagatgaatactctaattctctctattttacaactgaggaaaattcagctctgagagggaaggtaacttgtccaaggtcacacacttaggaagtaaaagagaagagagatttgctgggtctgtctaaacttttaaccatgaaaccaccacacacaatgtgctgcttaggggagaaacacagtactttcaagggggtagaagggacttcacaattattgaaagcctactggccaccagtcactggtggatttttttatatatacattaactttgcctccgtcatttctagcagattctagagtgaaattttatattaactatatttaacattttccacctgaggaaaccagatatagctagaagatagcctggattaacacaggtcaacaccctaaaaactaagacatggaagaattgaaaatactaaaaagaaaaaaaaaacaaaatgttcccccaacaattcagggtaaaactggagtctggatttgtttaaagtcaaaggtcattcccattcctggtggaaagagagaagagtgaaaagtcactgtcctgagtcaagtgaccaaggttctcgccccacttgctctaggagtaatcagctatgtggattttgtggatttggcccactcccttctcttctctgggcctctttctatttctacaatgagggtcttaaactagatatggaccctcccagccctgtaaatttacacatctagaattccatgaagaaagtatagtctagatattaaacatagaagataaagaggtttcaaagacacaaagtatagggaaagaatgagtggggagcaatttgtggcgacaggtctgagaatactatgcctctctaaaaaggactgcatctacccaacagacccaggtataggaaggggacaggtatgatgggggttccaccacctgatattcttactttgtgatgaggagatcttggctaggagcagacacttttctccaggcaggctgggcacattttcctcttctgaatttaaagtgtctggagcagggtccagggaagagaacattcagaagactgaggtggtagggcaaagtctgggtcataaaccactagagattcttaagtgtgctcagacacttaggcgctgccccatggactgcaactcagaccaaggcaggtggaagcaccagtaggaaggaaggaggagccaccagcctcaactcccttagaaatgctcagtggtcaagggaagcttagccaagccatggcagcccctagaattatctgcctcgcacacatgtgaaccttgaagcaagaaaggggaagtggagacaaaactgattaagctgagatccaagtccaagctctaaggcatttatgacagggaggggaagggataaggcctctgctctgactcatgaaagacaacaagaacaggtcataatagacttgaatcaacacagtgaagactgcaggaggccaggtaggccaggtttccaggtttgtattattcattcaccaatttcactgagagtacaaacagcacccaccttttctgcaaatccggggtacatttctggttccttctcctggaggtcact

SEQ ID NO: 1563724 - DNA, 4001 bp, Homo sapiens
cttaaacccagctaaataaacgtttttgcacaggaaggcaggtgaggtagagtttgaaaagagagaaaagaaagcttacctttgctagagaaaactactccatattcatgtcagcggcccattaatgctgcactgcagaccccagcctgagtccgccagccatgttcagtcagtatcttggttacagggcctttctcctaaattaagtccaggattccaatttggcagggtttactgggatgggaggatgagggagggggaagggctgggtgccctcttttccagaaacaaaactactggaatgtcctgttcctctggggcctggtttgatacaaaacccgggatggttctttacccatatccgggtgttttacaaatcctggttaggatctcaggaggaattacaagggggtgggttgtacttctgttatcaggacttgctaattggtctttgctgagaggagaacactgtcagtgtggccagccaaagctcatgggtagatttcaacagctccatttaagaaatgaggtagaaattgaaagagcctccatctcaccacctcttccccttcttgctctgaagcacaattgtcagccctgactattattctgaggtcatggctgcttagtcataagtaaaaataaaattggcaataaaacaaaggactttttttctacattctaagccctatgttaaccattttacatgcattctcttatttaagtctcacaattatcctgtgagatgaatactctaattctctctattttacaactgaggaaaattcagctctgagagggaaggtaacttgtccaaggtcacacacttaggaagtaaaagagaagagagatttgctgggtctgtctaaacttttaaccatgaaaccaccacacacaatgtgctgcttaggggagaaacacagtactttcaagggggtagaagggacttcacaattattgaaagcctactggccaccagtcactggtggatttttttatatatacattaactttgcctccgtcatttctagcagattctagagtgaaattttatattaactatatttaacattttccacctgaggaaaccagatatagctagaagatagcctggattaacacaggtcaacaccctaaaaactaagacatggaagaattgaaaatactaaaaagaaaaaaaaaacaaaatgttcccccaacaattcagggtaaaactggagtctggatttgtttaaagtcaaaggtcattcccattcctggtggaaagagagaagagtgaaaagtcactgtcctgagtcaagtgaccaaggttctcgccccacttgctctaggagtaatcagctatgtggattttgtggatttggcccactcccttctcttctctgggcctctttctatttctacaatgagggtcttaaactagatatggaccctcccagccctgtaaatttacacatctagaattccatgaagaaagtatagtctagatattaaacatagaagataaagaggtttcaaagacacaaagtatagggaaagaatgagtggggagcaatttgtggcgacaggtctgagaatactatgcctctctaaaaaggactgcatctacccaacagacccaggtataggaaggggacaggtatgatgggggttccaccacctgatattcttactttgtgatgaggagatcttggctaggagcagacacttttctccaggcaggctgggcacattttcctcttctgaatttaaagtgtctggagcagggtccagggaagagaacattcagaagactgaggtggtagggcaaagtctgggtcataaaccactagagattcttaagtgtgctcagacacttaggcgctgccccatggactgcaactcagaccaaggcaggtggaagcaccagtaggaaggaaggaggagccaccagcctcaactcccttagaaatgctcagtggtcaagggaagcttagccaagccatggcagcccctagaattatctgcctcgcacacatgtgaaccttgaagcaagaaaggggaagtggagacaaaactgattaagctgagatccaagtccaagctctaaggcatttatgacagggaggggaagggataaggcctctgctctgactcatgaaagacaacaagaacaggtcataatagacttgaatcaacacagtgaagactgcaggaggccaggtaggccaggtttccaggtttgtattattcattcaccaatttcactgagagtacaaacagcacccaccttttctgcaaatccggggtacatttctggttccttctcctggaggtcacttgaaaaacattttaaagttggtgtctacagaccagaggttggcagattttttctataaagggctagctactaaatcatttatttccagagcatacagtttctgtttgccataactacacaaatttgtctttgtagctctcaaggtatatcattgtgccaataaaaattaatttacaaaacaagcagcaggctaaatagacttttttttcaatatagacatttgcaatatggcatcactgttaagagcatgaaaactgaaatcagatattctgaactgaaatcccaactctgccatttcctgattctatgattaaagtaatttaatccccctaaacctcagttttcaaatggagataataatattacctattttataagactgttataagaacttaaataaggctatacgtattaactatttagcacaataactggaacatagtaaaggcaaaaattagagttataatttttaatttttcaattctaaataattgttgaaatctaaataattatttcctcgttaggacacaaactgtattaacttgtgtcaaaaaagaagaatgtttcaagaatcctggcttcacattctagttatgctactaaagagcacacagtgaccctggacaagtctttttgcctttctatcactcagtttcttcacctataacatgaaaaaggtggtctagatttgggtttctcaaaattaattttggcagcagaaccctttccccaaacagaatcttagtaaacacccactacttatggaagatgaaagtgatttgttctaggtaaggcagggaaggagatagaaatgggcaagggtgaagagacagaggaacctgtccactgggtatgactggtttcctagacaatgtgattgtgtctggagcaccagtaagaaatgtctaggacactaaaaacagattggaaaaccgtaagaccagaatatccttaagggtccttcatgtgttaaactctgtcactagaacatcttttcgtttattcattcaaccaatatttccaggttactcatctatgggccatcaataacacatggccctggggtggctacaaagaggagaggaccccagggaccttcacattagagtcaacatggtctagggtgagaagcatggcatttggagtcagaaagactaaggattgtatcttggctgcctttttctgagctatgtgacctcgggcaaatcacttaactttttcgagcctctggtccctcatctgcagaacaggaataataacacttccatgactgaaatattgtgaggattaaatcagctggcatttgtgtgaacccttagcacagtgctcagcatgttcagacccccagtaaatgttgttttccttcctatattttccacagttaaattttgtgacagtatcaggtaccaggagaaaattaaaagccatgggcagtgccttggcacagacagtctaacccctttacctcaggatcctctgatgagcttgcccttagcagtttcttaaaaagaagacctctggggaaaggtggaggggtgcagggaagagggggttgtcccccagaaaccacatctctgaagccactccccaccaccacttctgaccagcagactctgttatgctttggaaaggttgctctgcattgctgtgatgtgtgacagccctaggcttgctctgggta

SEQ ID NO: 1563725 - DNA, 4001 bp, Homo sapiens
gaagcgcgctggtttgcgagttacttctcaaaagcgatcaagtgctccaaatggagccgacccaagtagggtactcagtgttacgtttacagaactgctatgttttggaaactacaatcacaaagtgggaagggtagagagaggacacatttggtgggggtgatagaagcttgaaatctatgacttaagactatctggtcatctgctaactgttaacacaattaaaaacaacaactcttaccactgctgaacacaagaccaaagcaggagaactatacgtaggggacatctgaaattgtcactattgttgatgtgttttggcttactaaaaaaacggctttacaacacgggagatctggaaagtgagcaggtacccccgtactattagttcaattcatcacttcgtcactatctaaagggggagggtgtataaaaagggctagtcgtgctcatctgtaacccagaatgcaggtccagccgagaacactttctccaaagtttccaaataaaaatgcagctgcggcatgtcatcgtccctgtcccaccccccagcttcccgccatcttttccttttcccacacccaaggtcatcatgtaaaactaaagagctccccttggcagcagccgcccaggaggctgcccaacagagacccgcagcggcggcccgggcggggcgggaccgggagcgggggagtcccggccggcagcaggcagcccgcctcggcccccgtgccgggtcaccgggacacccgtaattcaccttccattttgtcaaaagcctcctgatgaaagaaagtgcccctgaaatccgccgctgtcatccccgggggacgcgcggggccgggggcggcggcggtggcggtgcgcggggggtgtgcggccgggccggcggcagccgcggcactggtggcggcgtccgccgcgcctcggagtcccactcgctaaaatggctgatccgcgcgcggccggcgcgggcggcggcgacagcggcgaacaaagcggcccgggccccgccgccgccgcccgcccgtcggcccccaccccgccccgccccgccccgcccgggccgcccgggggctcgggggcccgggccggacctccccgccccccggcgcggggcgcactcctcgggataacaaaggcgcccgtgcagccatgacgctcggccgctccagggcccgcagcggcgcccccggccctccgagccgcccgccccgggccgcgggcgccggggccgaggccggagcccgccgggcgccccgccgaccgctccgcccgcctcccctgccctcgccggaggccagcgccgcgccagccatgttagcggcggcggcggcgccgggcgggcgggaggcgagaggggggcggccggcccgcgcccccccgggccaccgggcgctccgcgacggccatgttaacgcagagccagcggcgtagcctgcgggcccgcgcggcgccgggccaagcccgggagcgaagtttgcccgtgcggcggcccccggcgggcaccagccgcgcagcccccggcgggcaccggccgcccgttccccagcggagtccgtcgcgggccggggaactcccggcccccttcccgctgccgccgcccagcgcccacagcccgcagccgcccctctgctcgcccagccgccgcagccgcagctgcccaaacatctggcctcgggggccctgggttcccggctgcggcccctggggccgccacgggcgggcgtccgccgagggggccgacccccgaaagcggggagctcggggaacgcgttggaaaagttgaaacacctgaattgcttcttccttcccggccgcctagcaggagggaaggcggagggggcgggaagggaatggggagtagaggcagggggaggcggcggcagggcgcgctcacggcggcgcgggccggaaagttgtgcgggcgctgcggcggcggcggcggcggcggcggcggcggcggcggcggcggcggcggcggcgggagcgggcggtgcgagacgtacctgtattgttcgctagtctgggcagcgcagggcacgacgcgcggctcagcgctccccagcctcgcgctagctgcctccacgagagccgcctgattggccagcgggctctgccgtttaaaacagcctcctcgcctggccattggctgcgggcctcatgcatattaagcaggcgtggacgcccattgggcgcggctgctgggatcattcattcaaacagaacgacccgccggcgccggctacggaggccaaacagggaaagacctagtctcgcctgcccgccccgcccacctcgccagccccctcggggaacagaactgggatcgccaagggctttgaagaggtggccctgcgattcccggaggcctcggcctctggcgtgggaagatgaagtccagccccgctgcgctgccctctgctcccaccgcaccgcggccttggcgcccctggcctgcagtcagctcccctgcccggggaaacacccctgggcccaccacgaagggccgatggtagaccacctctacccggttcggccgcggcgccgcgacagaaacgcggcggcagctcgctcctcgatgcctggcggagggcagctgcttgctcgccaagacctcgggatttagtcctcggatctcgctgcctatccgaaagccacctgattccgcttctgcggatcgtgctcaactaggctctttccactaaatgccagaaggtctttatttgcgcccgaaattgcggaaccgacgggctaaaagaggaaaacaaaatttggcaagagcagagaatttgtgagaaattgtagttttgtgggcaaagaataacacttttcttcttaccctcttcactgtctcggttcaaggccctcattccctctgctctcctgacacaccctagagcaaagaattaaagcttcgggaatgaatgagtgaatgaatgaatgaatgggatttgacttgatctccactttgccattggctggtggtatggccttgagctagtcacttctttggggattcaggcaatgtttttcaaagtataggagccgcagtgtcacttctgtaagggatgttctgaaattcgtggggccggtgcctggatgactggcaggtgttgctggaattcaataagaggaaggaacggccggggatactaaatatcctacattgcataggacagtcccacgcaaggaagaaatactccacttcaaatgcaagtatcagccctatttggaaagaaagtatctgagggcccttgcctggaaagaatgaaagggtgagaaaaagagcagtttaaagattgacagttggagaaaataatgcaaaggaagagatgtcatgagtttggtttttcttttctttgaaaggccaagagatccagctatttatgagtcctatattcagaaataagccccaccagaacatgaattttccaaatgctgcttccagaaaccgtggctgagtttgaggtgtgcaaaggatctggcttcacagggcacctgcttcttcacccctacgccccctcttaccaactcctctgagcctcccagccaagcctgagcccctgaagctggtgctgttggctcccatcatcaaggttccaatccagatcaaaaggcaaagatagaggccaagcgcggtggctcatgcctgtaattccagtactttgggaggctgaggcaggcggatcacgagatcaggagttcaagaccagcctggccaatctgatgaagccccgtctctactaaaaatacaaaaaaattagccaggtgtggtgatgcatgcctgtaggaggctgaggcaggagaatcgctttaacctgggaggtggaggttgcagtgagccaagatcatgctactgcactccagcctgggcaacagagcaagactccgaaaaaaaaaaaaaaaaggcagagatagtgctgcttttgacaagagcaggcaggtattgtgtcactaacccaggtccccactacagactcaggagttcagagatctta

SEQ ID NO: 1563726 - DNA, 4001 bp, Homo sapiens
actacaatcacaaagtgggaagggtagagagaggacacatttggtgggggtgatagaagcttgaaatctatgacttaagactatctggtcatctgctaactgttaacacaattaaaaacaacaactcttaccactgctgaacacaagaccaaagcaggagaactatacgtaggggacatctgaaattgtcactattgttgatgtgttttggcttactaaaaaaacggctttacaacacgggagatctggaaagtgagcaggtacccccgtactattagttcaattcatcacttcgtcactatctaaagggggagggtgtataaaaagggctagtcgtgctcatctgtaacccagaatgcaggtccagccgagaacactttctccaaagtttccaaataaaaatgcagctgcggcatgtcatcgtccctgtcccaccccccagcttcccgccatcttttccttttcccacacccaaggtcatcatgtaaaactaaagagctccccttggcagcagccgcccaggaggctgcccaacagagacccgcagcggcggcccgggcggggcgggaccgggagcgggggagtcccggccggcagcaggcagcccgcctcggcccccgtgccgggtcaccgggacacccgtaattcaccttccattttgtcaaaagcctcctgatgaaagaaagtgcccctgaaatccgccgctgtcatccccgggggacgcgcggggccgggggcggcggcggtggcggtgcgcggggggtgtgcggccgggccggcggcagccgcggcactggtggcggcgtccgccgcgcctcggagtcccactcgctaaaatggctgatccgcgcgcggccggcgcgggcggcggcgacagcggcgaacaaagcggcccgggccccgccgccgccgcccgcccgtcggcccccaccccgccccgccccgccccgcccgggccgcccgggggctcgggggcccgggccggacctccccgccccccggcgcggggcgcactcctcgggataacaaaggcgcccgtgcagccatgacgctcggccgctccagggcccgcagcggcgcccccggccctccgagccgcccgccccgggccgcgggcgccggggccgaggccggagcccgccgggcgccccgccgaccgctccgcccgcctcccctgccctcgccggaggccagcgccgcgccagccatgttagcggcggcggcggcgccgggcgggcgggaggcgagaggggggcggccggcccgcgcccccccgggccaccgggcgctccgcgacggccatgttaacgcagagccagcggcgtagcctgcgggcccgcgcggcgccgggccaagcccgggagcgaagtttgcccgtgcggcggcccccggcgggcaccagccgcgcagcccccggcgggcaccggccgcccgttccccagcggagtccgtcgcgggccggggaactcccggcccccttcccgctgccgccgcccagcgcccacagcccgcagccgcccctctgctcgcccagccgccgcagccgcagctgcccaaacatctggcctcgggggccctgggttcccggctgcggcccctggggccgccacgggcgggcgtccgccgagggggccgacccccgaaagcggggagctcggggaacgcgttggaaaagttgaaacacctgaattgcttcttccttcccggccgcctagcaggagggaaggcggagggggcgggaagggaatggggagtagaggcagggggaggcggcggcagggcgcgctcacggcggcgcgggccggaaagttgtgcgggcgctgcggcggcggcggcggcggcggcggcggcggcggcggcggcggcggcggcggcgggagcgggcggtgcgagacgtacctgtattgttcgctagtctgggcagcgcagggcacgacgcgcggctcagcgctccccagcctcgcgctagctgcctccacgagagccgcctgattggccagcgggctctgccgtttaaaacagcctcctcgcctggccattggctgcgggcctcatgcatattaagcaggcgtggacgcccattgggcgcggctgctgggatcattcattcaaacagaacgacccgccggcgccggctacggaggccaaacagggaaagacctagtctcgcctgcccgccccgcccacctcgccagccccctcggggaacagaactgggatcgccaagggctttgaagaggtggccctgcgattcccggaggcctcggcctctggcgtgggaagatgaagtccagccccgctgcgctgccctctgctcccaccgcaccgcggccttggcgcccctggcctgcagtcagctcccctgcccggggaaacacccctgggcccaccacgaagggccgatggtagaccacctctacccggttcggccgcggcgccgcgacagaaacgcggcggcagctcgctcctcgatgcctggcggagggcagctgcttgctcgccaagacctcgggatttagtcctcggatctcgctgcctatccgaaagccacctgattccgcttctgcggatcgtgctcaactaggctctttccactaaatgccagaaggtctttatttgcgcccgaaattgcggaaccgacgggctaaaagaggaaaacaaaatttggcaagagcagagaatttgtgagaaattgtagttttgtgggcaaagaataacacttttcttcttaccctcttcactgtctcggttcaaggccctcattccctctgctctcctgacacaccctagagcaaagaattaaagcttcgggaatgaatgagtgaatgaatgaatgaatgggatttgacttgatctccactttgccattggctggtggtatggccttgagctagtcacttctttggggattcaggcaatgtttttcaaagtataggagccgcagtgtcacttctgtaagggatgttctgaaattcgtggggccggtgcctggatgactggcaggtgttgctggaattcaataagaggaaggaacggccggggatactaaatatcctacattgcataggacagtcccacgcaaggaagaaatactccacttcaaatgcaagtatcagccctatttggaaagaaagtatctgagggcccttgcctggaaagaatgaaagggtgagaaaaagagcagtttaaagattgacagttggagaaaataatgcaaaggaagagatgtcatgagtttggtttttcttttctttgaaaggccaagagatccagctatttatgagtcctatattcagaaataagccccaccagaacatgaattttccaaatgctgcttccagaaaccgtggctgagtttgaggtgtgcaaaggatctggcttcacagggcacctgcttcttcacccctacgccccctcttaccaactcctctgagcctcccagccaagcctgagcccctgaagctggtgctgttggctcccatcatcaaggttccaatccagatcaaaaggcaaagatagaggccaagcgcggtggctcatgcctgtaattccagtactttgggaggctgaggcaggcggatcacgagatcaggagttcaagaccagcctggccaatctgatgaagccccgtctctactaaaaatacaaaaaaattagccaggtgtggtgatgcatgcctgtaggaggctgaggcaggagaatcgctttaacctgggaggtggaggttgcagtgagccaagatcatgctactgcactccagcctgggcaacagagcaagactccgaaaaaaaaaaaaaaaaggcagagatagtgctgcttttgacaagagcaggcaggtattgtgtcactaacccaggtccccactacagactcaggagttcagagatcttaaggccacctcatccatccctctgtcctgttagaaccagcttagtggttgcctgccttctgcttgcatacctccactcatagggagcttaccatcttccttcatggcagtt

SEQ ID NO: 1563727 - DNA, 4001 bp, Homo sapiens
tctgctctcctgacacaccctagagcaaagaattaaagcttcgggaatgaatgagtgaatgaatgaatgaatgggatttgacttgatctccactttgccattggctggtggtatggccttgagctagtcacttctttggggattcaggcaatgtttttcaaagtataggagccgcagtgtcacttctgtaagggatgttctgaaattcgtggggccggtgcctggatgactggcaggtgttgctggaattcaataagaggaaggaacggccggggatactaaatatcctacattgcataggacagtcccacgcaaggaagaaatactccacttcaaatgcaagtatcagccctatttggaaagaaagtatctgagggcccttgcctggaaagaatgaaagggtgagaaaaagagcagtttaaagattgacagttggagaaaataatgcaaaggaagagatgtcatgagtttggtttttcttttctttgaaaggccaagagatccagctatttatgagtcctatattcagaaataagccccaccagaacatgaattttccaaatgctgcttccagaaaccgtggctgagtttgaggtgtgcaaaggatctggcttcacagggcacctgcttcttcacccctacgccccctcttaccaactcctctgagcctcccagccaagcctgagcccctgaagctggtgctgttggctcccatcatcaaggttccaatccagatcaaaaggcaaagatagaggccaagcgcggtggctcatgcctgtaattccagtactttgggaggctgaggcaggcggatcacgagatcaggagttcaagaccagcctggccaatctgatgaagccccgtctctactaaaaatacaaaaaaattagccaggtgtggtgatgcatgcctgtaggaggctgaggcaggagaatcgctttaacctgggaggtggaggttgcagtgagccaagatcatgctactgcactccagcctgggcaacagagcaagactccgaaaaaaaaaaaaaaaaggcagagatagtgctgcttttgacaagagcaggcaggtattgtgtcactaacccaggtccccactacagactcaggagttcagagatcttaaggccacctcatccatccctctgtcctgttagaaccagcttagtggttgcctgccttctgcttgcatacctccactcatagggagcttaccatcttccttcatggcagttccttccatctccagccacctctgagccttaaggtcaacatctccacacagggtaatccctcacccttcagatagttcatggcaggccaggccttttctccagacagacagcccctccctgctccttctacaagcagtttcccagggcctgacctgcccaagccactccctcttcccctgtctccacaaggcctagaggggagcagggtttccacaagtgatctgaccaatacctcgcctctgccagagcaccctagcctctcaaggttgccaggcctttctagaccagagattcaagttggggtccagctactgcccagcaactgcccacagtggcaagtgacacggcacagttggcaggcaccttggtgggggaaccagggtggtgggcccttggatggatgacaagggtcacacaagcccatgccaactcacaagcagcacatgtatacacgtactcacgtatgggcacacccagggcattcccagaggcagcagcttcaagggcaaaccagagaaataagagcatctcccaacccaaactggcccccagttgccaccctcaagatccatgcttccctgccccactgccccaaccctgcccattgaccatctatttctccccacatacttcgaatgatgaaaggattgcgcttacgcgcaggaagtatttccatcctttgcataggaaatatttcgatctctgctctcaagaaagctacctcttatatggagctgaagcacttggcctgaagctgaactacaaactggtcatcgtcagaacatgaactcacagaacatgactatgacatcactgagtgacagagatccaaagatggctccctgctcctccccatccccccagccacccacctaccaatggaggctcctcacagccagattttctccttaacacctgcccgtgtgcggcgacatgcctgagcaaggcctgtggcccagtgggctcctgccttagcagaaactttcatgtatatgtattgcatgtctactaatcagtaacagaagggagatgagatggagtggggagtaaggctggaaggaagggacaagatagaggctttgggctctgtcactgatttcctggtatgccttttcacatgtcacctgagggctccgagcctcagtgtcctctatcaaaggtgattccacccgcctcatccacccagaccactgccagtcttggtggtgagggagactgagtgaagacggtctgcttgtcaccagtcaaaggccaaccaggagaggcctaaagactagtttggaaggtgaaaaaaagaaagaaaaggtgacagaaagccagggatgcctgggcacaccctagactcagggagcccaaggcaggctgccttctctgcagcaaagctcaatgcccgttagcttgaggatacctccagcagcagcacccaggtcagcgtgcaagggcttgagggaatgaaggatactctaggcctctgcccgggccctacctggaaacaggcaaagcccatccacacaggagaacctcaaaccagaatcccttaagctgcttggctgcctagagaagttacgaaaacattaaataagaaatgggatgaagtgtggcaaatgctatttaaagaggttttcagttcctgtcagttcaaggcccctaaaagactaaggggaatcctcatcgttcaacaaaaatgaaaccctggtcccctggcccactgcctacacactccacccaccctcccacagttcccaaagtcttcatttgagtaccttgggccaacccagcctccttttaagaatcatgcctggccgggtgcggtggctcacgcctgtaatcccagcactttgggaggccatggtgggcagatcacctgaggtcaggagttcaagaccagcctggccaacaaggtgaaatcccatctctactaaaaatacaaaaattagcctggtgtggtggcacctgcctgtaatcccagctactcaggaggctcaggggggagaatcgcttgaacctgagaggctgaggttgcagtgagcagagatggcgccactgcactccagcctgggtgacagtgtgagactccgtctcaaaaaaaagaaaaagaaaaaaaaaaagaatcatgcctgtaggccaaatgtggtggctcacgcctgtaatctcagcacttggggaggccaaggtgggtggatcacctgaggtcaggagttcgagaccagcctggccaacatggcgaaaccccatctctactaaaaatacaaaaattagctgggcgtggtgatgggcacctgtaatcccggctactcaggaggctgaggcagagaattgcttgaacccaggatgcacaggttgcagtgagccaagatcgtaccactgaactccagcttgggtgacagagtgagactctgtctcaggggaaaaaaaaaaaaaaaaaaaaaggaatcacgcctgtaaacccagcactttgggaggccaaggcaggaggatcacctgaggctaggagtttgagaccagcctgggcaacatagtgagacccccatctaaaaaaatcaatggaagtgtagacagagtggatttggggggtaggggtggaatgggattgttgaacaaaatatattaagggaagccaggtgtagtggcacccacttgtagtcccagctacttgagaggctgagaggctgaagtgggaagactggttgagcccaggagctcgagaccagcctgggcaacaaggtgagatctcatctcaaatatatatatatatatgaaccagatg

SEQ ID NO: 1563728 - DNA, 4001 bp, Homo sapiens
ctacagaatgggagaaaatttttgcaatctactcatctgacaaagggctaatatccagaatctacgaagaacttaaacaaatttacaagaaaaaaacaaccccatcaaaatgtgggcaaaggatatgaacagacatttctcaaaagaagacatttatgcagccaacagacatatgcaaaaatgctcatcatcactggtcatgagagaaatgcaaatcaaaaccacaatgaaataccatctcatgctagttagaatggcaatcatacaacagatgctggagagggtttggagaaataggaatgcttttatactgttggtgggagtgtaaattagttcaaccattgtggaagacagtgtggcgatcccccaaggatctagactagaaatgtcatttgacccagcaatctcattactgagcatatacccaaaggattataaatctttctataataaagacacatgcacatgtatgtttattgcagcactattcataatagcaaagacttggaaccaactcaaatgtcccagtgatagactggattaagaaaatgtggcacatgtacaccatggaatactatgcagccatagaaaaggatgagttcatgtcctttgcagggacatggatgaagctggaaaccatcattctaagcaaactatcacaaggacagaaaaccaaacaccacatgttctcactcatatgtgggagttgaacaatgagaacacatggacacaggacagggaacatcacaccccggggccagtcggggggtggggggctggaggagtgatagcattaggtgaaatacctaatgtaaacaacgagttgatgggtgcagcaaaccaacatggcacatgtatacctatgtaacaaacctgcacgttgtgcacatgtaccctagaatttaaagtataattaaaaaaaaataagaaggtggcctctggagttcctaactctggaatgtactaaccatatgattttaggaaaactatttttctgagtttcagtttcttcatctgtaaaattaatgtaatagtacccacctcttgaggttgttttaaggacaacatgtaaagagattaatttggaattagtatttaagacagattggagaagggaaaacctgtgggtagggaacagttaacaaagctattgtaagcactgagcctaggcaaagacagtaaaccactagactggagacagtggaaaaacagcaaaggaaaagaagtaggacaagcgactgactcctctccactctcattcatcttgcaaattcctttttttctgttcatttaacataatctgggaacctaaaactacactttgaagtatatggtctgtctctggacattattaactgtttgctcatttccttagagctacaaataaccatctgatctctctcttcaccatttcaacatctgcaatatgttctcccaaatcccttacttcagtcagttaaaaagcaaaacaaaacaaaaatcatccatctttttacacaatattttcaatcttttctttgtaatttattccttcattcttaaacttgccaatcaggcctcctgcaaattcccacggaagcagggttccctaatttaacaaaacacaaaattcaaaaagaaaaccaatcctgccatttctgggcttaaggaaacctgaaactttccttcaaaactctgcagcattgctcagtactttagtgcctaattcctacaacgagctaagatcagaaaaatcactacgtaataggaatcttaaaatgcgcaaggctttgagaacatgggttttcaacatacagcttgctctttcaggatctgtcttcttatttgcatatatttctgagcaggaagttatgcgcagtacttttagtctccgcgtgaaaaggtccttcatgctaatctaattcaattcagttctcctttttctttcttcttctcctcgccctcttctcagggaaggaatcgtcaaaaatcaatgtttcaacagatctcgcggtgctattcgagattccctattaaaaaaaaatagaattgatgcaaacagcctgttccttccggggttttgggctggaactgcagcgcttagagagctcggtggaagctgctaaaggcggaggcggggctctggcgagttctccttccaccttcccccacccttctctgccaaccgctgtttcagcccctagctggattccagccattgctgcagctgctccacagcccttttcaggacccaaacaaccgcagccgctgttcccaggatggtgatccgtgtatatattgcatcttcctctggctctacagcggtaaggagagtggggagtccacctttgttgttttcctacacaccagtcctctgctgccccagaaccattaaaatgcagaagttcctctggcagcttctcctttggaagactcatgcatccccgatcccacccttcttcttcccttttttccctttgttgcatcgatttcatttttttttttttccacatagagttcagctttgtttgcttcgtgacgttggggggcacatttctgctttgaaggaaaacgaaagctaccaagttttgggagatgggagatggtgctatacggtctttagggttacgtgaagtcaagtaaaatcgcacactggtgagtttcaagagtgagacatttgatgaatacgccctaagtactgagacaaggaggagtgcacttctgtaaaggatgggggtacacatgctgtaactggtggggattgagtggaggcctaccgaggcattgtaattattctgggtgagtgagaccctggtaatagagttattttgagagtgtgtagaagaaagtggttaacttgagcttgaaggcctgttagaactagacaaattgggaggggaagttggtaacaatgacgtaaatttttttttaacttaatatgacacgagattcagttttccccccatattgtcccttattttgactgtttctattctttcaaaatattttacttttaaatttctctcactgcttcaagtatattgagaactggatagggagctcagtggcttcttgtgtagtggcagcctgagttgctgctgcttcaaatgataggactttctctttcatggattcacttactcttaatttagaataacaaattttcagcagctgtcgggagaatatgataaactggggtgcaagatgagtgtatatccatgataaatgaaagtgcttctgctttttacaactcaagagaaaggcagacagtggcaagaacagatgtgtgggttcagattgtagggtataggaaccccttccctcttcttgagctttagagcagcagctaatccaggttgttgtgtgtttttattttttggcttgtttatttacacctgagaggatgtggaatggaagtggaggttatgttaaatcacaagaaccttgatatttgaactttgtcttctctggccaccatgtgtggatatgtttatgcaattttggaatatcagaaaatttaatcttacattttttgaataagtttaggttaaaaaaaagaacaccttttatatttcctttggacctaattttatgagcctcttgctttattattttccatacatgttgtctaatatttcaaagtaaaatttgagttgctcagagtctcaactcaatccaataattgtaaagtccaacttaatgcctttagttaaacccctaatgagactgaacagatcaggcagttagttttgctttgggagtcatacagtttcaatactgttatttattctttgctttctccttcctctaccccttctttaaaagtagattcaacaagaaactgctttcagaatttctattcaagtaagaataactgcacctctctttgttaagtcttaagtttccaagagccttagaaatggctgctgtcttctattatttcctttattggactcctttttttttttatttagatttcaacttttattttagattcagagggtacatgtgcagatttgatg

SEQ ID NO: 1563729 - DNA, 4001 bp, Homo sapiens
aatatttaataacatgagaaattacttatgctataattgtaagtgacccaagagcacaactgctttacaatatcaactgtgtacaaaatacatgttcccataccctttgacactgctagaatccttccaggaatctagtcaacagaaatacttacaaatgttccttgcagcactgttagtaatggcagaaaattggaaacctaaatagccatcattagaggaatggctgaatgaattatactttatccttaaactggaatgcaatgcagccatttaaaaaaaatctatctgccttgacccagaaagatctccaaaatacattaaataaaagaatatacatagtatgatcctacttatagtaaaagattggcatgcatgtatatacgtatgtaaataaataaaagatctggaagcaaacttgtttttgagagaactgaagggtgggggggtgaagtgggcttttcgctttttaccctatatacttctatacagttttaattctttacatttgctgtactgggattttttctttttaagttagaaagaacatattagtggttactctgagtgggaggtttatggattttccatgttatttttccaatttttttatgcagccttaaatttctacagaaataattacttttacttcagcaaaaaaagtaacataaaacaaattaaaatgtttgcatttctgggatttggtataggaaattttataaaattttctaattttgtatgtggatggtttatctgaaatggtctgggagcactgggcctcttggaaacaaagtacaaagtgtaataacggccataaaactacactgaggaaacgatttaacaaacatttactgattgccgattatgtgcctagcacactgcatctgcagtgataacagttttcctattaaccatcctaaggtctcagtgacagatttacaagctgtttttttatttcattttgcaggatttttttttttttttttgcttgccttatccctgggataacccgtcccatttaattccctgcaccgctctattccttaagagcccttctgtaggggcagagaggttctacttcattactgcgtctcctgggaaggccatcaggactgctggctaaagtgggaaccaggactctttgtgagttaagaatttgtgtatttatatgtgtgttatacacattttttaaaaaactgtaacgacatcaggttgagcagtcgtctccgggtggtgaattatgtgtatttttaaattttatactatattgttatttttcaaatgttcgaaattgaatatgtagattgttgttatcagcagaaaaataaacattattcaaatactctattcagtaaagtaatttattgggcgcctttgtcaagcacgcatttgcctagatgtgactctacagataaaattcacttggggcctccccttacagacaatcaggcagtggagactgagtgcctgaatggatagaccagcactcagaccactattttcagtatctgtttttcttaactcagggccgtggttttcaaacgtttttcgccttacggtcacccttaggggtcccccgagaccggcccagacagacagatatacaaaaacacatacacagtcatgagcgtccaccatttccccaccaggcgcagcacaggcggcttcccggcactgagatgggggggaggagggagagagcgcgaggggggaggggaaagcagagaacgaaagaggcggaggcggcccccgaaccccgctctggtcttcatcatcaccacccctgggtccccagttcccacccacacaccaacctctaacgataccgggtaattttcctccttcttccctcaaacggctatagcgagacggtagacgacgaccagaactacttctgctcacgtaagcgagtaatcacgtgagcgcctacgtcatgtgagatctcggtcacgtgagcaactctcggcttaaactcgggatcactaaggtgccgcacttccttctggtatggaaatagggcgggtcaatatcaagaaaggaagagggtgattggttagcggaacgtcttacgtgactgattattggtctacctctggggataaccgtcccagttgccagagaaacaataacgtcattatttaataagtcatcggtgattggtccgcccctgaggttaatcttaaaagcccaggttacccgcggaaatttatgctgtccggtcaccgtgacaatgcagctgaggaacccagaactacatctgggctgcgcgcttgcgcttcgcttcctggccctcgtttcctgggacatccctggggctagagcactggacaatggattggcaaggacgcctaccatgggctggctgcactgggagcgcttcatgtgcaaccttgactgccaggaagagccagattcctgcatcaggtatcagatattgggtactcccttccctttgcttttccatgtgtttgggtgtgtttggggaactggagagtctcaacgggaacagttgagcccgagggagagctcccccacccgactctgctgctgcttttttatccccagcaaactgtcccgaatcaggactagccctaaactttctctgtgtgacctttcctgggatgggagtccggccagcggcccctgtttctttctctctctctctctctctcgttctccttctctttctctttctcttctttcctctctctttctctctctccctgcccggttctcttttttcactgctccttgcagagcagggccaccccataggcagtgtgcccaaagtagccctgcccggttctattcagacccttcttgtgaacttctgctcttcctctgccgggtgctaaccgttagaacatctagggtgggtaggaggaatggggaactaagattcgtgccattttttctccttttggggtcgtggatttctcggcagtatctcgagggagttagagagaccataaggtcgctgagatctctcccacctcgcccatgagcgtggcatcaggctggaaggttgacatggaggaactttatacatttacacctttgcgtgagggttgaggctggattagataggtattgaacatatctgaccctcacaatccttatctgtaaattgggattacaaccttttaatttcagggagctgacaaaaaaaatctgaaaaatagttcttatctcacacaggtgagttttcaaggagataacctatttaaagtacatagcacagcgcttgaccattcaactgcgcttacagagcaaatgttcaatgggaaaatgaatgtaaatctacaaatctgaatgaatatgtgtatttttctggagagaggatatttacctttcttcaaattctcaaagggctctgtgatttaaaaaaggttaggaatcactgatagatgttggtaaaaggtggcagtcacagtacatttctgtgtccataagttattcctatgaatatctttatagataaagtcaggatgttggtcagacatcacagaagaaattggccttgtaagtttcatgtgaccctgtggtacagtatgtgtggcaattttgcccatcacggatttttttttattggtatttgcatctgattataaaactaatgcatgatcattgcaaaaaatgtagataaagaagagcaaaatgaaaataaagatttccccccaccgttccaccacccagaaataatcatggtttaaatgttaatatacaaccttacaattgttttctatataaatgaaaacatagatttctttatttcattattttccataaaaaatggatcatgtttatgtcatgtttggctaatggcaagaccctggcacccagtctgggctcaaattctgcctcattgttacttagccctgtgacattgggtaaattacactttttttttttttttttttttgagacggggtctcgctctgtcgcccaggctggagtgcagtggcacgatctcggctcactgcaagctccgcctcctgggt

SEQ ID NO: 1563730 - DNA, 4001 bp, Homo sapiens
ggtggtgcgcacctgtagtcccagctacttgggaggctgaagtgggagaatcccctgagcctggggagaatcacccgagcccgggaagtcgaggctgcagtgagcagtgattgtgccactgcactccatcctaggtgacagagtgagaccctgtctcaaaaaaaagaaattggcagaattaagtaagttgatgtttagagatgaaaaatcaacattttttcctcagcaactgaataaaaacaacagccactaccatttttttgagtacctatttgtagcctattttttaactggtattactcgagagagagagagctaggttcgagacagagctccttctcttaataactgtatgacctagggtatgtctgttagcctctctgaggcttcaaaggttcctcatctgtaaaatggtaataatcataccattgctacagggctgttttgaagactaattaggactatgtaagtaaacatgatgatggctattattactgttccccgccaggggccatgcaagggttgctgattcacatagactgtcttataatcctctcaataactccaagaggtagccagcacctcagatatacataaaatgacttaagcccagagaggtgaagtaagttgcccacagccacacaactagtaaatagcccaaacaagctggattcccagttagactccgttaatagcactgctctttaccttaagtcattacaatgcctaatatgaaatagaatcgcttctttcttagggttcaagtggttaattatttaatgtattcattcaacaaaccatcatcgaggacctcttacaagccaagtactgtgctaagtgctagagttacggcggtgattcctgcccttaaaaagttttagtgggagaaacaacaggtaaccaggtcattgccaaaacaacaaaaataatcataataaagcaggctaaagcatatttaactggccggggttttgactattttagcaagcatgatcagaacggttgaggagggaggccagcagcttggccggttcaacaaacaagaaaaaaccagtgagggtggagctaagataccagaggctgattacggttaagaatgttcttgaaggtaaggaccagattctcattttctatatcctggggcatcggtcagcatggaatctggattctagcacatgtgaatttcggcttgaaatgacctaatgccttttccctagttccttcgtgtgtcaaatacgcatggttaccgctaccagagctgtagtggggcttcaatgaggccatgagcatctccataaagatgaactacagtgtgtgcaaaactaaaggcaaaacctggtccccacacgccctcccaggtggtcgctttccgtgccgaggcccctccagaggtgccccgagaacctcaccatcgcaccccaaacttccagggaagggcctctcccgagaaagcccccacgcccccaccccgcgccatcattcccgaatctgccctcggcccctccccgcagcacgctcgcaggcggcacatgtcaaccaaaacgccatttccaccttctcttcccacacgcagtcctcttttcccagggctcccccgaggagggacccaccccaaaccccgccattccgtcctccctgccgccctcgcgtgacgtaaagccgaacccgggaaactggccgcccccgcctgcggggttccctgggcccggccgcccgagcccgcactgcggatcccgcgcctcagggcccggccgccacctgccgcgtgggcctgaaccggccagggccggcaggccgagctgctcaccacgacgccagggctgcgggtcgccataacggagccggccggcgcgcgggctgactgctcaggaggaggaagccggtggcggagcagaggaggaggcggaggcgcagcaagaggcggcgccgcgcgggaaagccgagaggttcgcctgagggctcgtcgcagccgcctgaagctgaggagaagcaggccccgccctctgcccgccccgccacgccccgcaggccccgcccccggccccgcccgcgcgcctacgccggcgcctaccagtttgcaggctcactaggtagccgtgggaattttctcccagaagaagccgaggctcccccagcgaagcccctttccctcccaactcagtctcctattcagagggctccctgattcccaaacctaccggcgcgcgttgcttcatggcggccgtaaaccgggccccggctcttcgggttccagtcatcgcgtgaatccttggaccagacgtcccattcccaagaccttgcactacctgtggcttccattttcctgactcttggcccagtgcttccccaaacccttaactggttgtaacagttgagacctagagtcctagagtcacccagatcagggtacacatctgagaggacacttaactgctctgtagttttgtacaaatcagactctgagcctctatttttgcctcactaaaatgagcatattagcccggcgcggtggctcatgcctgtaatcccagcactttgggaggccgaggcaggtggatcactcaaggtcaggagtacgagaccagcctggccaacatggcgaaaccccatctctactaaaaatacaaaaattagctgggcgtggaggcgggcgcctgtaatcccagctagtccggaggctgaggcaggagaatcacttgaacccgggaggcggaggtcgcactgagctgagatcgcaccactgcacttcagcctccgcgacagaatgagactccgtctcaaaaataaataaaaataaaaataaataaaaatttaaaaataaaatgagcatattaacaatacataaacaggatcattttgagtattagaggagtataggtatgcgtgtgtgtatgtatatatatatgcacttaggacagtacagtcagcaaatgggaactactgttattactactgatctttatttttgcccacacaagttcttatattgaatctgaaaacaaaaatatgttcccctgctaattaattctcagataggtcaggtaagcaagcaacagttgctccagcaacaccatttcttatatactcaaccctatagctccagcatccaccacagtgcccagcacatagttggtggcctccctcttattaaggacgctgaggggtatgtgatggcaggagatttgtaaaactaggcaagtcattgagcttctctggacctcagtctcttcatctaaaaaatgagaataataaacctgggtaacatggtgagactcagtctctacaaaaatgaaaaattatctgggcctggtggccatgtgcctgtagccccagctacttgggaggctgaggtgggaggatggcttgagcccaggaggtccaggctgcagtgagccaagactgtgccactgcactccagcctgggcaacagagaaatatcctgtctcaagaaaaaagaaaaagagagagagagagaataataactactgccatgaagagttttacgagaattctaaaaatcatttatgtaaagtacctcatatagtatttgccacataataggtgctcaagaaacagtagctgttataattttagcatgtatgaatttgtgaagtccatacttccctactttccctgtcttccctctttatcctggagaggcagcaggctgtaatggaaaagggatgtatgggctttggactgagttcaaatcctgggttccccactattatagcattttgactttgggcaagatccttggtccctgcgtgcttggtttcttatacgtcaaatgaggttaatatctctgtcacagagtgtggtgaagattaaacaaaataatatatgcaaaagtgcctagcatagagcttggctcaatacatgatgataccaatgttacgtgttccataataattttgccttaaacagttcactttcttctagcctctaagacttttttttttttttttgagacagagtctcgctctgctgctctgctggag

SEQ ID NO: 1563731 - DNA, 4001 bp, Homo sapiens
gacactggtgtttccgtgactgagtgtgcaactccctccagtcccactgctacagaaggggcaccggttggcagcagtgtttctgagcagtgctgttggcactggggccactgagtgggagaatgcagaccacgagctgagtcctggggtgggggcatgtccctcctggagacaggctctcccagtatctcccttgctgagctctgctccatccgtttcctgttctatctatgccatgaagcggcaagcctaagaatagtccagaagtcctgggaaatctgtccctgggcagcactgggataatcacttgcccctcctgagcctcagttttcttgtctgtaagataggaccaattatgtcccctgttttgaccaactgagtcaccgtggggatgaaatgtagaaacctttaggccactccaaatgtgaggctgtgtttacctgttgctctaagctcaatgtgccaactgcgtcacaggccaaataaggaacaggccgttctcaggcaattctgtggctgtgcaccctgtctttaccaccccctagaattcccagccctggctagacttctacgtgcccccaaacctactggggaccgtgagggaccctttgtccagctgcagacataagggatagtggattttttgggaatcctgaatttctagcactccaggcatctcctgtcctgaggttccaggaacactctgaaaacccaatgaacttgtgcgaagaagccagatgcagtaacttacaaggttgacctctcagcttccccaagagctcccctggtgcccaggctggtagtcctaggcctgctccccctgagggcagcttagggtgtgagccagggtagtgggaagctatgggggtggccccggagctctgcttgccagctgcccctgccttctgcttggccactcactgcagtcaacctctttagcctacccaataggtggctctcctcatggtgtcgcataaagattccctgccattacaccacctttgtatgtaatggcattcattgggtccctaggaaaatatttctgaaacaggtgggtcacaaattcaagccctcagcagctaaactacggagtttctactgtaagagggattagtggcattggaacacaagaaagtgccttgggtggagggaagggggaggtggtaaacagtacggggggaaaagtcaggttttactcatttgagttgtgaaaaggaaggtgtccacacacctgcacacacactcacagtccaaccttcagagaaagggccagtgaggttggtagttgcagagcaagagggacaaggtggggctgtaaagttcagtttctgagatataatatgtcactaggatttttgcatttagaagcccttcctccaccccctcatgctgtgaggaacaaagaaatgaatctctcatacaggaattcatatatcagggctcctggaagtataagaaaacagtctttgtggggagcagggagtcccacaaacctcagaagatccctccaggattgaagaggctttttgctgagaagcagggaatttttcctacgtgtgtcccaagagccatgttctcccgaggccaaggctgggccttggctgcatgttgaagaggcttcttgtaatctcggctggtctctgctcccaggagccagttcctctcaggcagtgaatgacaaaggctcaaatgctctagattttggccttttggggaaagactgggggtaggaggcaaaaaaaaaaaaaagggaagagaactggccgaactgtcaagtgttcggttttccatctccttaattctaacaccaactggagttgctgtgtatgcatatatttgggattcagtacctggaaggcgaggagaactctgtcatctgagcagggcttctggttgtctctatggtgtggtatgattttcattattttcccagaaccgtccttccatggtttccaatgaaaaggctgatgattctgggagcataaaggtcagcctggcttgcatgcgaagcagcacaaggccagacatgcatttggttcctgtaatctgagacaacagtgggaggtagttacaagagcactggcctgggagtccagagacctgggctcatgtcttgactctgacactaatgagactatatatatatatatatgaccctgaggaagccacttgctcacttttgggctcaacttccttatctgtgagatggcaaggttgactttgtgattcaagaggcacttccctgatctgacattccttgtcacatgtttacctttactgtcttcctcaaaggctgaaggactgccaaagactcagggccttagcccggggggaatgacttagacctggttctacctgcattctgtggcatttgcatcactggatcccaccaggccagcagcagctgcagttgttctgggcccatattacaagggtgacagcagggtaccctgttcaaattagaacagaaatagtggaaacttcatattaaagaaagcatgacattctttccagaaagcatagattatgccttcccctcatcctgagcattctcttcaaccctggctttctagctgtctctcattttgtgaaaacgttcatactctcaataataggcaattctgtcacaaagatggaaggcatgcaaactactgagttgactggtttctgttcttacgtgtctctccaaacggaatgaatagcagtacttaatgaaaacactgtccggcaattcaggctttaatattataaacaggctgggtgtgttatatgcatcactctcaatagtcatttagtttcccccacagaacactgagttttatttttctagcctaacaaaacgtggggctcaaggagttaaaaaaaaggaggtgccagggtgctgtatatgctaaatgaatatgtgctgagaaggtaggataagcactggaatggggctcatagtagacccaaccctgtgaacaagcagcccaatgaccggccctctactgatgaagggttcccaccatttcactagcagtgaaattccctttttttttttgagatggagtctcactctgtcaccctggctggagtgcagtggtatgttctcagctcactgcagcctccacctcctgggttcaagcgattctcatgcctcaacctccaagtagctgggattacagacatgcaccaccatgcctggctactttttgtatttttagtagagatggggtttggccatgttggccaggctggtctcgaacttgtgaccgcaggtgatccacccacctcggcctcccaaagtgctggaattacaggcatgggccactgtgcccagccaaaattcccacttttcactgacaacgaatggaagagtcagctcatgcagggcttttaaagctacaataagccaaggcctagcaaccataggcagcaggccagactgttcctggaatagtcatctcacttctttgggcctcagtttccactcttagaaaatatcctgggctcggtttggtggctcacacttgtagttccaacactttgggaggccaaggcaggtggatcgctggagcacagaagtttgagaccagcctgggcaacatagtgaaaccccgtgtctacaaaaaaaaaaaaaaaaaaaaaaaatacaaaaaattagctgggcgtcgtggcatgtacctgtggttccaagctactcgggaggctgaggttggaggatccattgagcctgagagattgagggtgcagtgagccatgaccatactactgcactccagcctgggtgacagagtgagaccctgtctcaaaaaaagagaaaaaaaaaaaaaagaagaagaagaaagtagcctgaccaggtacctccaaaaagctggtttaggggtatagtaaagaggaatccaatctcaaatgagtgcttttaaagagaagagagcataggtttggagagcacactgccctgtggggtttaattagggctctgtgagttcatcagaacctcaattttctcatccatgaaa

SEQ ID NO: 1563732 - DNA, 4001 bp, Homo sapiens
gccagagctgtttgcacatccttctcagaggtcaccttcaaagagagaagtggagaaggtattcatctcccagcacccactcttcccactaaacctgagggagggcagggcagggcatgcccagtccttgggtgagaagagatttgtgagaagggagaggccaagagaaaggttgtaaaacttgagagataggctgggtgcggtggctcatgcctgtaatctcagcactttgggaggccgaggctggtggatcacttaagatcaggagtttgagaccagcctggccaacgtggtgaaaacccgtctctactaaaaatacaaaattagccggcatagtgacacatgcctgtaatcccagctacttggaaggctgaggcagaagaatcgcttgaacccgggaggcagaggttgcagtgagctgagatcgtgccattgcactgcagcctgggcaacagtgagactctgtcccaaaaaaaaaaattgagagagtaggtcaaaggtgaaaatattaggtaatatagagcagtgttgcaaaaacatttttcaaatcaataccttcttgataaattcacatgctcctgaagattcttaattgctgtggatcagagcactaatgcaaccctgttgtgaggctgggtgcagtggctcacacctgtaatcccagcactttgggaggccgaggcgggcggatcacgtgagatcaggagttcaagaccagcccggccaacatggtgaaaccccatctcttctaaaaatacaaaaaaaaaaattagctgggcgtggtggcaggtgcctgtaatcccagctacttgggaggttgaggcaggaaaatcgcttgaacccagaagatggaggttgcaaggagctgagattgtgccactgcactccagcctgggcaacagagcgagactccatctcaaaaataaaaataaaaaataaccctcttgtgagaattattgataggaagataaactagcttttttgtatccttacctgctaagatgatttcatcaagtttcactttctgtagtttgtttcatgaaaacaagttttttgactttgtaaatataaaattacaaggcacaaaatgcattttcaaaccatacataactcctccaggagattgttacgtccaatccccatcctcattgttgtgaatcccagctttagagaatccttatcacaggtggtcccacagtgcttgaaggctcaggccaaaagagacaaggagatgggtctaccgcccccatagaggagacccttatgggagggacccccacaggttcccaggccggtgttggtgacctcatgcacaccctgggagaggagaggtgaccccacttacgtcggctggggcgaaaacgcagttgtttcctaacttcttggcttgggcctccccacccgagttgggcaggtccagaagcacagcagaggctccctgccccacaagtcgctccgccgtggccaggcccaggcccgaggctcctccggttattaccgccaccaggccctgtcaaaagggacatggtcagggtcagctgttacattgcccagaccatccccacgctgtcgcctgcctgttctccaggcttctgaggagaaggggggaggggagaggtcgtggtcacccctgcgggtaaactaggtgtgctgcttctcctcagcgttgggacctcgggggcagaagggatctcatccccagacagcccgtcccgtgacgatagatagatagatgattgatagatagatagatagacagacagacagacagacagatgcgccgcggagtgctgactttcacctcttgagcccaacggccacaataccaggcctacataagcatgaccctttccctcgaaaccgatctctttctcctagttccacggccgcgctgtcccggcccgtaaaggaaggcaagcaacagaggcaaagaaccttctaccttcacgctccgacacgctgctgccatcttgtcgccggccactccacgggatggggatgggggcgcgggcgctcgttgattggccgaggcgaagcggcggaaggggcggatgcgacgggccggggcgtctgccgctgccgcatgagacgtgggggcgtggcctggtacgctagtcctttggccagagggcggattccgcctgctaaggtatccccagagttatttcaactggggaaagagaccaatagcagaagtacaataccacaacacccctcgccctactctctagctggccttttggcaagtggcctgctccgcgtgggggaagaggggtggatattgagaacggatgcctttctcctctgaaaaagtcttaattcaagtatgaatgtatttgagactcctatatgctagacggtgtgcggggcacctgggatacccagcggaataataaaagattcatgccttccaggagggcacagtccaggtggagaaagagaattacagtacagacacagacgaatggacggaaccagattctgggacactcagacaaggagatccaaagatgaggagtctgagttagagagagagagagccatgtaaagagaaatatgttgaggccgagataggaagagagatgccaggtaggatcacagagagatgaatgtggaaagccgctaagagagatgcttggagacagacattctaggacagctgctgagaagcacaaacctaaagaggcaaaaacatctttcatcagttcaggctttgctactctcctctatctttgtctaatttaagtccaaaagcccagatcacacactgcagattggacttcaaccagagactattatttaagacccaggtctttgtcatcctagaacatctttcaggcagcttccagaagctatgtcattagagtcttgagcccagatatctaatctgtcttccttctatacttttcctcaaaccaaggtcttcaggccataaatcttagcccaccatttcagcctcagaactgctttatgttttctctatctgaaatatctccccccacttgctttctcacccaggaagattcccctccaggccttctagttgttgacagccaccacactcataatcactacaccgtatttaccaaaggatttagcacaccggtctcacaattttcctatctacatgaagtgcttccatcaatttatagcactcttcatccggcccaatatgctgtagccacagtggcctcctttgtgttcatctttgcattagctgctccctctgcttggaatgctctcccctgatctttgcatgactgcttttattttttttcattcagaactaagcttaaatatcaccttcccagaggggtcctccctaaatattcaaactgtagccacctagacactatcccattgcatatttgaattatcttcatagcacttgcatgtccgtaatccattttccaaccttagggccagatgtgctgtggaattcagagtttttttcaatttgagaaaggaagacatgtaatttatattacataactctttaaaaaaactagtcaaacataactttttgtatagtctatattatataactattgagaaaagcctggagcatcgtaatgaaatattaatatttctgaagtgaaaggtatgaaaattcacaccaagtgtgaataaagactataaatagcctcacactacttcaggtcaggttttgtcatctattgagtttgggctccaaagtatgaaaaaacaaccttatgcttttcagaagttttggcattgcaggattgtgcctacaggcttgtgagcctgcatgctccgctaacctggccttgtttgtgtagttctccccctgctggaaggtaagccccatggcaccaggggcttgtccagctggttcacctaatgccgagaacactgcttggcgtgtacaagacacttaaaacaaatgtgtgaaataaatgaattaatgaattaatcttggaagaatttccaggcacagtttcatgattctttcacctgcccaactccgggaaccttcacct

SEQ ID NO: 1563733 - DNA, 4001 bp, Homo sapiens
taaataaacaaaaggaaactgcaagtcacaaggatggactacaactaccaaccatctacgcccctgtgcaagagaactctactggcccaggaggcctttctggaaaaggtcccagtccccaaaggaagctggggactcgcgttcacatcgtcaaggtttaccaagttgtggcgggcctttccgtcttggaaaaagcctcaaaatggcagattagggtgtccatggccggcggaaagggtctttgaagttgcagaccaggagggaagaagattctgggcctcccccatgcagtgtcagctggcaacagaatgcaccccggctgggttggaggccctgggtactggctcttccacaccaggggcccacctaccaagggcagcaggagcatctgcacctcctgcgccaggcgcccttcagtgcttccacttgagcacctctccagacaccagctagggtgacagtggtacaaataccagactcccctggcctgctcacctcacagggtaatgtgctgtggagtcagggggacacagcaaccgccagatgacatggctggccccggggaggacgacacgcagatacggctacttggcacctgtgatattttacacactcgagaggggcccgcaccatcctcagccctctccccacattcactcttagttcatgtcacctccacccagagggggacacaggcccacagcgatggccccacaccctgcctgaggtcgcccacttcccaggaggcagtcctgggacttccacccgaccaggccccagagcccaccgacttaacccctccagaggcttgtcgttcattaccttattcaagatggagaccagcctttttgcggagaaaatgcgggtgaaggtcctgaaagtgcattgacgccgttttcggaagccatacaagtttagctggcggaagaagctctttatcgaagttgtggcaaacactttgtgtgcgacgtcccttttgagaatctccttttcaaagagtttttgattgatcactctacaagccccactgtcatcccaccagatggacgaaaactggttgctgctgaccagtctccacagtttctgtggaaaggggagggagaggagattatcttctccctggggcgggacgtcaccgtcagggtgcggccttctgaacgaagcttcctcggccagaggttggaaagcgatttcttctgtcagcagcctcaagttagggctcccagtggaccccgggtcgtcccaggcaggggaaggatctgctgggtgaaggtaggtctctgactgcaactggggagggaaaggcaccctttccaagccatgatcctgtcccctcgaatttctttcttcacagcgagccatactcaatgatcgcttgtcctccatctggcaaacttgctagtgcagtgtggccagcagcaccccttggcagtcatgtaaccagccccatgacatcataaaggggctctgactgccggggggtggcatctccacccccagcaagttgtgtaataaagggccaaggcagacaagtagctgcccatctgcatgtgcacattctggtcctcacagtcatttcaatgggaaagatgacactagtgcacaagagtgccgaggggccctgccacaccgtagatgcagacctggagcggtccccttgtcctagagctcctgagccaggcacaactacagcaaagccctggctcaggaaggtcagagctcaccgtctgagtcatgggcccacagaccccagcacatgactgacactcggaagcacagaacaaagggtaggacggtgcccatgggtcaggctgtagccacgccaccctttccaccctgtcctagccagaggcagcaatgtgctccatacagatcctcctaacacacccacactgtcggtccccagcacgcagatgcccgacagccccttaggcaaatggcttagctgactgccccaccacacgccgtcgccatgcagtccagtggggagtcggaggcagcctccttcctgcctctcctcggcctgcacgtgtccccccaccaggcagagacccttctacaccccgggtgtctgcggtcacatcgcggtggggcatgcagctgttggccttcgagcatgttttgttttccttggccagtgtctccagagaaacgcacgtgggtttgtgtccagcggtccatctctgcaacagttgttcctttgggattggatgctaggaggtcacgggagaggtgtccatccaaagcagtgtctgtgtcacacactgtccccacacacagggccacctctgcacagactcccccgactcgattctgggcacagagctcagtgaccttccagagactgccacgaaccggtgatgcctccacgcttgagacatcctgaccgcagggcccaaggcgcactggctcagggggtgacagtgaggggtctgcaaacagactgctgatgctcaacccggccgctgccgagctgtgtgacttgggcacgtcacttaacctctctcggcctctgtctcctcccggggataagagtagtagcacctgcttcccggggctgtgaggatccagtgggacgtataggaactagcgaggcaccggcagttgggtcagagctactgttgtcacttcacaaggcattttcttcaacagcaagtcggaaatctcatgagcctaaggcagaatccacctgtggcctctggttacaacccacaggactgaaaatccttccagccacagcaactggtgaatttcctggtcaattgccacaagtcatgagctgaaccccacttgagtttcagttcaggcagaactctagagacgactagggcaagctagacagcgactgcagagccttttgttgcagcgtgagcagtcctcagctgttgacatcactggggagcaaacgaggaccaggagcggtgaaaggacagtgtctgctgcagattgtcgtagcacccaaggaacactccagaaagcctcctaagcagtaacaagtgtggcaaggtgtagcccagccaacagtggcatctgcgaggcgtcccctccttcctcccactaccccgtataccctgggacctgtgcactgaaggactcattctaaaggctgtgcccctgcagccgccagcctcactcactggctgcctgtgccagctagagatttctttcctctgaggctggctgagaggaccactccagtttcctggcccatccagcaaagaagatacacatcatgcacgtgtaaaatgaggaaccggtttattgaacagcttaaggagagcaaaaatagtggctttagctacattttttacacactgagcaggaaagtctaaaccatcccgttcccctgtaccccaaagagaacagggcttgctggaggccagtgccaagggcggagtcgtgctcgcagcagacttgaattaaccccatgtaggccggcgagcagttgcccgcgtgaaaacaccaccctcttctcctggctgagaagatcaaagctctttttttaccctcttttcagcaaaggacctatttgttttcaggcaggaggatgttaaacttgcagcctctgacacacggtggaacctgcagtgcttggagaaacggcacgcacacgtgaaaacatcatgcctactccaaagccttcttgttgctggcaggagggaagcttgagactttcccacgcatagtcgtgacccgcgtggccgtttctgctctcagcaacattctctagtgttccggcttcaagcagcgcttgtcaggtttgaagctagccactattctgagaacgtcagaaaagcatggaccatctcttgcttggtgttgccgttgtggcagtagcagctactacgtacctgcacgagttccagggcagaagtggcaatgtcccatgaaggcgtggcaccccacggggggggggggagtgtgccacgggcgtccacttctgcagcagaaggcatgtgcctacagcacaagcttgtaaaaaaatacttgaacagaatatg

SEQ ID NO: 1563734 - DNA, 4001 bp, Homo sapiens
ttaaataaacaaaaggaaactgcaagtcacaaggatggactacaactaccaaccatctacgcccctgtgcaagagaactctactggcccaggaggcctttctggaaaaggtcccagtccccaaaggaagctggggactcgcgttcacatcgtcaaggtttaccaagttgtggcgggcctttccgtcttggaaaaagcctcaaaatggcagattagggtgtccatggccggcggaaagggtctttgaagttgcagaccaggagggaagaagattctgggcctcccccatgcagtgtcagctggcaacagaatgcaccccggctgggttggaggccctgggtactggctcttccacaccaggggcccacctaccaagggcagcaggagcatctgcacctcctgcgccaggcgcccttcagtgcttccacttgagcacctctccagacaccagctagggtgacagtggtacaaataccagactcccctggcctgctcacctcacagggtaatgtgctgtggagtcagggggacacagcaaccgccagatgacatggctggccccggggaggacgacacgcagatacggctacttggcacctgtgatattttacacactcgagaggggcccgcaccatcctcagccctctccccacattcactcttagttcatgtcacctccacccagagggggacacaggcccacagcgatggccccacaccctgcctgaggtcgcccacttcccaggaggcagtcctgggacttccacccgaccaggccccagagcccaccgacttaacccctccagaggcttgtcgttcattaccttattcaagatggagaccagcctttttgcggagaaaatgcgggtgaaggtcctgaaagtgcattgacgccgttttcggaagccatacaagtttagctggcggaagaagctctttatcgaagttgtggcaaacactttgtgtgcgacgtcccttttgagaatctccttttcaaagagtttttgattgatcactctacaagccccactgtcatcccaccagatggacgaaaactggttgctgctgaccagtctccacagtttctgtggaaaggggagggagaggagattatcttctccctggggcgggacgtcaccgtcagggtgcggccttctgaacgaagcttcctcggccagaggttggaaagcgatttcttctgtcagcagcctcaagttagggctcccagtggaccccgggtcgtcccaggcaggggaaggatctgctgggtgaaggtaggtctctgactgcaactggggagggaaaggcaccctttccaagccatgatcctgtcctctcgaatttctttcttcacagcgagccatactcaatgatcgcttgtcctccatctggcaaacttgctagtgcagtgtggccagcagcaccccttggcagtcatgtaaccagccccatgacatcataaaggggctctgactgccggggggtggcatctccacccccagcaagttgtgtaataaagggccaaggcagacaagtagctgcccatctgcatgtgcacattctggtcctcacagtcatttcaatgggaaagatgacactagtgcacaagagtgccgaggggccctgccacaccgtagatgcagacctggagcggtccccttgtcctagagctcctgagccaggcacaactacagcaaagccctggctcaggaaggtcagagctcaccgtctgagtcatgggcccacagaccccagcacatgactgacactcggaagcacagaacaaagggtaggacggtgcccatgggtcaggctgtagccacgccaccctttccaccctgtcctagccagaggcagcaatgtgctccatacagatcctcctaacacacccacactgtcggtccccagcacgcagatgcccgacagccccttaggcaaatggcttagctgactgccccaccacacgccgtcgccatgcagtccagtggggagtcggaggcagcctccttcctgcctctcctcggcctgcacgtgtccccccaccaggcagagacccttctacaccccgggtgtctgcggtcacatcgcggtggggcatgcagctgttggccttcgagcatgttttgttttccttggccagtgtctccagagaaacgcacgtgggtttgtgtccagcggtccatctctgcaacagttgttcctttgggattggatgctaggaggtcacgggagaggtgtccatccaaagcagtgtctgtgtcacacactgtccccacacacagggccacctctgcacagactcccccgactcgattctgggcacagagctcagtgaccttccagagactgccacgaaccggtgatgcctccacgcttgagacatcctgaccgcagggcccaaggcgcactggctcagggggtgacagtgaggggtctgcaaacagactgctgatgctcaacccggccgctgccgagctgtgtgacttgggcacgtcacttaacctctctcggcctctgtctcctcccggggataagagtagtagcacctgcttcccggggctgtgaggatccagtgggacgtataggaactagcgaggcaccggcagttgggtcagagctactgttgtcacttcacaaggcattttcttcaacagcaagtcggaaatctcatgagcctaaggcagaatccacctgtggcctctggttacaacccacaggactgaaaatccttccagccacagcaactggtgaatttcctggtcaattgccacaagtcatgagctgaaccccacttgagtttcagttcaggcagaactctagagacgactagggcaagctagacagcgactgcagagccttttgttgcagcgtgagcagtcctcagctgttgacatcactggggagcaaacgaggaccaggagcggtgaaaggacagtgtctgctgcagattgtcgtagcacccaaggaacactccagaaagcctcctaagcagtaacaagtgtggcaaggtgtagcccagccaacagtggcatctgcgaggcgtcccctccttcctcccactaccccgtataccctgggacctgtgcactgaaggactcattctaaaggctgtgcccctgcagccgccagcctcactcactggctgcctgtgccagctagagatttctttcctctgaggctggctgagaggaccactccagtttcctggcccatccagcaaagaagatacacatcatgcacgtgtaaaatgaggaaccggtttattgaacagcttaaggagagcaaaaatagtggctttagctacattttttacacactgagcaggaaagtctaaaccatcccgttcccctgtaccccaaagagaacagggcttgctggaggccagtgccaagggcggagtcgtgctcgcagcagacttgaattaaccccatgtaggccggcgagcagttgcccgcgtgaaaacaccaccctcttctcctggctgagacgatcaaagctctttttttaccctcttttcagcaaaggacctatttgttttcaggcaggaggatgttaaacttgcagcctctgacacacggtggaacctgcagtgcttggagaaacggcacgcacacgtgaaaacatcatgcctactccaaagccttcttgttgctggcaggagggaagcttgagactttcccacgcatagtcgtgacccgcgtggccgtttctgctctcagcaacattctctagtgttccggcttcaagcagcgcttgtcaggtttgaagctagccactattctgagaacgtcagaaaagcatggaccatctcttgcttggtgttgccgttctggcagtagcagctactacgtacctgcacgagttccagggcagaagtggcaatgtcccatgaaggcgtggcaccccacgggggggggggggggagtgtgccacgggcgtccacttctgcagcagaaggcatgtgcctacagcacaagcttgtaaaaaaatacttgaacagaa

SEQ ID NO: 1563735 - DNA, 4001 bp, Homo sapiens
agtttaaataaacaaaaggaaactgcaagtcacaaggatggactacaactaccaaccatctacgcccctgtgcaagagaactctactggcccaggaggcctttctggaaaaggtcccagtccccaaaggaagctggggactcgcgttcacatcgtcaaggtttaccaagttgtggcgggcctttccgtcttggaaaaagcctcaaaatggcagattagggtgtccatggccggcggaaagggtctttgaagttgcagaccaggagggaagaagattctgggcctcccccatgcagtgtcagctggcaacagaatgcaccccggctgggttggaggccctgggtactggctcttccacaccaggggcccacctaccaagggcagcaggagcatctgcacctcctgcgccaggcgcccttcagtgcttccacttgagcacctctccagacaccagctagggtgacagtggtacaaataccagactcccctggcctgctcacctcacagggtaatgtgctgtggagtcagggggacacagcaaccgccagatgacatggctggccccggggaggacgacacgcagatacggctacttggcacctgtgatattttacacactcgagaggggcccgcaccatcctcagccctctccccacattcactcttagttcatgtcacctccacccagagggggacacaggcccacagcgatggccccacaccctgcctgaggtcgcccacttcccaggaggcagtcctgggacttccacccgaccaggccccagagcccaccgacttaacccctccagaggcttgtcgttcattaccttattcaagatggagaccagcctttttgcggagaaaatgcgggtgaaggtcctgaaagtgcattgacgccgttttcggaagccatacaagtttagctggcggaagaagctctttatcgaagttgtggcaaacactttgtgtgcgacgtcccttttgagaatctccttttcaaagagtttttgattgatcactctacaagccccactgtcatcccaccagatggacgaaaactggttgctgctgaccagtctccacagtttctgtggaaaggggagggagaggagattatcttctccctggggcgggacgtcaccgtcagggtgcggccttctgaacgaagcttcctcggccagaggttggaaagcgatttcttctgtcagcagcctcaagttagggctcccagtggaccccgggtcgtcccaggcaggggaaggatctgctgggtgaaggtaggtctctgactgcaactggggagggaaaggcaccctttccaagccatgatcctgtcccctcgaatttctttcttcacagcgagccatactcaatgatcgcttgtcctccatctggcaaacttgctagtgcagtgtggccagcagcaccccttggcagtcatgtaaccagccccatgacatcataaaggggctctgactgccggggggtggcatctccacccccagcaagttgtgtaataaagggccaaggcagacaagtagctgcccatctgcatgtgcacattctggtcctcacagtcatttcaatgggaaagatgacactagtgcacaagagtgccgaggggccctgccacaccgtagatgcagacctggagcggtccccttgtcctagagctcctgagccaggcacaactacagcaaagccctggctcaggaaggtcagagctcaccgtctgagtcatgggcccacagaccccagcacatgactgacactcggaagcacagaacaaagggtaggacggtgcccatgggtcaggctgtagccacgccaccctttccaccctgtcctagccagaggcagcaatgtgctccatacagatcctcctaacacacccacactgtcggtccccagcacgcagatgcccgacagccccttaggcaaatggcttagctgactgccccaccacacgccgtcgccatgcagtccagtggggagtcggaggcagcctccttcctgcctctcctcggcctgcacgtgtccccccaccaggcagagacccttctacaccccgggtgtctgcggtcacatcgcggtggggcatgcagctgttggccttcgagcatgttttgttttccttggccagtgtctccagagaaacgcacgtgggtttgtgtccagcggtccatctctgcaacagttgttcctttgggattggatgctaggaggtcacgggagaggtgtccatccaaagcagtgtctgtgtcacacactgtccccacacacagggccacctctgcacagactcccccgactcgattctgggcacagagctcagtgaccttccagagactgccacgaaccggtgatgcctccacgcttgagacatcctgaccgcagggcccaaggcgcactggctcagggggtgacagtgaggggtctgcaaacagactgctgatgctcaacccggccgctgccgagctgtgtgacttgggcacgtcacttaacctctctcggcctctgtctcctcccggggataagagtagtagcacctgcttcccggggctgtgaggatccagtgggacgtataggaactagcgaggcaccggcagttgggtcagagctactgttgtcacttcacaaggcattttcttcaacagcaagtcggaaatctcatgagcctaaggcagaatccacctgtggcctctggttacaacccacaggactgaaaatccttccagccacagcaactggtgaatttcctggtcaattgccacaagtcatgagctgaaccccacttgagtttcagttcaggcagaactctagagacgactagggcaagctagacagcgactgcagagccttttgttgcagcgtgagcagtcctcagctgttgacatcactggggagcaaacgaggaccaggagcggtgaaaggacagtgtctgctgcagattgtcgtagcacccaaggaacactccagaaagcctcctaagcagtaacaagtgtggcaaggtgtagcccagccaacagtggcatctgcgaggcgtcccctccttcctcccactaccccgtataccctgggacctgtgcactgaaggactcattctaaaggctgtgcccctgcagccgccagcctcactcactggctgcctgtgccagctagagatttctttcctctgaggctggctgagaggaccactccagtttcctggcccatccagcaaagaagatacacatcatgcacgtgtaaaatgaggaaccggtttattgaacagcttaaggagagcaaaaatagtggctttagctacattttttacacactgagcaggaaagtctaaaccatcccgttcccctgtaccccaaagagaacagggcttgctggaggccagtgccaagggcggagtcgtgctcgcagcagacttgaattaaccccatgtaggccggcgagcagttgcccgcgtgaaaacaccaccctcttctcctggctgagaagatcaaagctctttttttaccctcttttcagcaaaggacctatttgttttcaggcaggaggatgttaaacttgcagcctctgacacacggtggaacctgcagtgcttggagaaacggcacgcacacgtgaaaacatcatgcctactccaaagccttcttgttgctggcaggagggaagcttgagactttcccacgcatagtcgtgacccgcgtggccgtttctgctctcagcaacattctctagtgttccggcttcaagcagcgcttgtcaggtttgaagctagccactattctgagaacgtcagaaaagcatggaccatctcttgcttggtgttgccgttgtggcagtagcagctactacgtacctgcacgagttccagggcagaagtggcaatgtcccatgaaggcgtggcaccccacggggggggggggagtgtgccacgggcgtccacttctgcagcagaaggcatgtgcctacagcacaagcttgtaaaaaaatacttgaacagaa

SEQ ID NO: 1563736 - DNA, 4001 bp, Homo sapiens
aagtttaaataaacaaaaggaaactgcaagtcacaaggatggactacaactaccaaccatctacgcccctgtgcaagagaactctactggcccaggaggcctttctggaaaaggtcccagtccccaaaggaagctggggactcgcgttcacatcgtcaaggtttaccaagttgtggcgggcctttccgtcttggaaaaagcctcaaaatggcagattagggtgtccatggccggcggaaagggtctttgaagttgcagaccaggagggaagaagattctgggcctcccccatgcagtgtcagctggcaacagaatgcaccccggctgggttggaggccctgggtactggctcttccacaccaggggcccacctaccaagggcagcaggagcatctgcacctcctgcgccaggcgcccttcagtgcttccacttgagcacctctccagacaccagctagggtgacagtggtacaaataccagactcccctggcctgctcacctcacagggtaatgtgctgtggagtcagggggacacagcaaccgccagatgacatggctggccccggggaggacgacacgcagatacggctacttggcacctgtgatattttacacactcgagaggggcccgcaccatcctcagccctctccccacattcactcttagttcatgtcacctccacccagagggggacacaggcccacagcgatggccccacaccctgcctgaggtcgcccacttcccaggaggcagtcctgggacttccacccgaccaggccccagagcccaccgacttaacccctccagaggcttgtcgttcattaccttattcaagatggagaccagcctttttgcggagaaaatgcgggtgaaggtcctgaaagtgcattgacgccgttttcggaagccatacaagtttagctggcggaagaagctctttatcgaagttgtggcaaacactttgtgtgcgacgtcccttttgagaatctccttttcaaagagtttttgattgatcactctacaagccccactgtcatcccaccagatggacgaaaactggttgctgctgaccagtctccacagtttctgtggaaaggggagggagaggagattatcttctccctggggcgggacgtcaccgtcagggtgcggccttctgaacgaagcttcctcggccagaggttggaaagcgatttcttctgtcagcagcctcaagttagggctcccagtggaccccgggtcgtcccaggcaggggaaggatctgctgggtgaaggtaggtctctgactgcaactggggagggaaaggcaccctttccaagccatgatcctgtcctctcgaatttctttcttcacagcgagccatactcaatgatcgcttgtcctccatctggcaaacttgctagtgcagtgtggccagcagcaccccttggcagtcatgtaaccagccccatgacatcataaaggggctctgactgccggggggtggcatctccacccccagcaagttgtgtaataaagggccaaggcagacaagtagctgcccatctgcatgtgcacattctggtcctcacagtcatttcaatgggaaagatgacactagtgcacaagagtgccgaggggccctgccacaccgtagatgcagacctggagcggtccccttgtcctagagctcctgagccaggcacaactacagcaaagccctggctcaggaaggtcagagctcaccgtctgagtcatgggcccacagaccccagcacatgactgacactcggaagcacagaacaaagggtaggacggtgcccatgggtcaggctgtagccacgccaccctttccaccctgtcctagccagaggcagcaatgtgctccatacagatcctcctaacacacccacactgtcggtccccagcacgcagatgcccgacagccccttaggcaaatggcttagctgactgccccaccacacgccgtcgccatgcagtccagtggggagtcggaggcagcctccttcctgcctctcctcggcctgcacgtgtccccccaccaggcagagacccttctacaccccgggtgtctgcggtcacatcgcggtggggcatgcagctgttggccttcgagcatgttttgttttccttggccagtgtctccagagaaacgcacgtgggtttgtgtccagcggtccatctctgcaacagttgttcctttgggattggatgctaggaggtcacgggagaggtgtccatccaaagcagtgtctgtgtcacacactgtccccacacacagggccacctctgcacagactcccccgactcgattctgggcacagagctcagtgaccttccagagactgccacgaaccggtgatgcctccacgcttgagacatcctgaccgcagggcccaaggcgcactggctcagggggtgacagtgaggggtctgcaaacagactgctgatgctcaacccggccgctgccgagctgtgtgacttgggcacgtcacttaacctctctcggcctctgtctcctcccggggataagagtagtagcacctgcttcccggggctgtgaggatccagtgggacgtataggaactagcgaggcaccggcagttgggtcagagctactgttgtcacttcacaaggcattttcttcaacagcaagtcggaaatctcatgagcctaaggcagaatccacctgtggcctctggttacaacccacaggactgaaaatccttccagccacagcaactggtgaatttcctggtcaattgccacaagtcatgagctgaaccccacttgagtttcagttcaggcagaactctagagacgactagggcaagctagacagcgactgcagagccttttgttgcagcgtgagcagtcctcagctgttgacatcactggggagcaaacgaggaccaggagcggtgaaaggacagtgtctgctgcagattgtcgtagcacccaaggaacactccagaaagcctcctaagcagtaacaagtgtggcaaggtgtagcccagccaacagtggcatctgcgaggcgtcccctccttcctcccactaccccgtataccctgggacctgtgcactgaaggactcattctaaaggctgtgcccctgcagccgccagcctcactcactggctgcctgtgccagctagagatttctttcctctgaggctggctgagaggaccactccagtttcctggcccatccagcaaagaagatacacatcatgcacgtgtaaaatgaggaaccggtttattgaacagcttaaggagagcaaaaatagtggctttagctacattttttacacactgagcaggaaagtctaaaccatcccgttcccctgtaccccaaagagaacagggcttgctggaggccagtgccaagggcggagtcgtgctcgcagcagacttgaattaaccccatgtaggccggcgagcagttgcccgcgtgaaaacaccaccctcttctcctggctgagacgatcaaagctctttttttaccctcttttcagcaaaggacctatttgttttcaggcaggaggatgttaaacttgcagcctctgacacacggtggaacctgcagtgcttggagaaacggcacgcacacgtgaaaacatcatgcctactccaaagccttcttgttgctggcaggagggaagcttgagactttcccacgcatagtcgtgacccgcgtggccgtttctgctctcagcaacattctctagtgttccggcttcaagcagcgcttgtcaggtttgaagctagccactattctgagaacgtcagaaaagcatggaccatctcttgcttggtgttgccgttctggcagtagcagctactacgtacctgcacgagttccagggcagaagtggcaatgtcccatgaaggcgtggcaccccacgggggggggggggggagtgtgccacgggcgtccacttctgcagcagaaggcatgtgcctacagcacaagcttgtaaaaaaatacttgaac

SEQ ID NO: 1563737 - DNA, 4001 bp, Homo sapiens
gggttaacaattgtaaaactaaatgctcattttaactttatcacaaattaaatgacgttatattttagtatcagaacaaattaaagacaaatccaactcatatctatcttcctcccctttgggggaaaagcgttattgcaaaacgaaagaaatatagttatatcatcataccaatcaatattaggcaggcatggaatggggaaaatgtaaaacccaaagtttgaagaggtatgggcttcaacaacataaaaggataaagtcacacattaatccattatcacacctttgttaaaagtattcagaatgctgaagaaaccaaatctgcactcaaactagcactaccaacacagaagtgaaatcgtaaattttaacaatctggagggattggaatatatatacaaatacagaatgggaaagaaaagttgcaaaagaatttttacaatagcagtccagtcgcgcagtggagacaggttttgtatcattgacttgcaagtcaatttgtgtgctattagtgtgccctttcctgctcatgagagccagattaaaagggcacttttaccacaaagtttacagaatcaagtttaacattagttattttacttcgaagctgaaataaaaatacttagcaatttccaagtattccaaacaaacatacacagattttccatctgtattctgtgtatctccagtcttattcctgtggttatatggttcaaacatatatgcctagggacaaaatttactaggaaagtaaagcaaggtgcaaagaaagttcaattagtaaagctatataaacagctactttaaaaaagaaatcaagaaactgcattttgcacatagtacataagctaaacatctgagttcctaggacaagtggggttggctaccagaaatggacagctactaaatttgttcttggtatttttcctctttgcaataaaaagcagtcatgtaataatcaactgtgaccttcacagacaagattaataaagcatagaaaagacttaaaaattacatttaagacactaccctaaagatttacgttcttttacacatcggtgccccaacaaacacaacaaaaagaagcgtcgctattcaagggggctaggaccaaggaccaaggatctcagcaaagcaaacgtaaaaggagtgccccgcgaggctggccaggcggcccgctctgcagtggcgcccgtggcactctcctaccttggggaaccaagcctttttgtccaggtcccactcgtagggagtgtccgtcggctgctgcccgagagaatcgggttctccgccggcatcggtctgggtgtcaccatccttgccgtctccgtacaattcttgcattcgcaactgctcatcaaactcatcgttcccatccaagttggtgccgctcatgtttcctacctagctcaggagcagggttcagaagaactaagaggccgaaatgacgctggagctgagcagagaaagggaggtcaaccgcgctctgctcgcgccccgccgccccccggcccgcctccccgctgcgccccagcagtccccgggaaatcgcggccgctcggcggctgcaccgcccccctctctgcccgcccaccgcgcgcgcgcgctgatgctgtgagctcggccgcgccgccgcccacctggcttgctccgccgggcctcggcaccgccgctaggtccagggcgctgcgggagcgcgcaggcgcgctgccgccgccgccaccgccgccgccgccgaccggatctgaggcgactgcggctccctcggcaacgtcaggaaattacttctaaactaagccctgctcaggccgacgcagccgccattgtcggcgcgtggcgacgtcgcgggtcgcgccgacacgcccactatggcgtcaaaaagcgccgacgccggcatgcggcgcgaggcccggggaggcggggcgccggggttggggggacccgctgctgctgcgcgtcgacgcccaccggggtcgggtttggggcggggcgagggccactgggatcccgcggcgcctcaagggccttgagctccgcggggtccccggcggatcggccggcccgggagggaaacggaaggaaggcgtgggaatattccctcgcgggggtggccgggcgggtttcgcgagggcgccatcttaggggagtgggtggggcggacaggacaaatttctctggcttcgagaaaacgacgcgcctccttcgcccaaaggcccctcccccgctcaggaaccgcgtcttttacttgtttctttacgacacccggggatagacaccggatcttgttcatcttggtagcctaaactcctggcaccggctctggtgtctaatgcggaatgagcgaatgaatgaacgaatgaggggtagaagggccaactttctttttctggtgtcagccttctcctttatcggtctcataccttcctctggctggagttcgactccgtgggaaggatggaaagggcagcagttgcctgcctcttgtactgcagatttcagtggcgctcgagcttcgaacttgaaacttaagcataaatgtaaacatcccagtgtaaacaccagctttattggccgggaaactccgcttctttgtcattcttttagaaagacacagcatactttttgttctaaacagaactttgttttcaggaattacactcattgctgaaaaggaaaaggtccatatttttaagttgggcaggtatttattgagcccctactaagtgcagggcactgcgtgaggctctggcgacccaggagttgacaagacaggcacagctcaggggagacagaattaagatggttggcacctgacagatatgagatgctggaggacagcagttctcaaactttttggttccaggtcctctttacactaaaacattgaaaaccccaaaaaacgtttgtttgtggtttatacttaccaatatttctgcacaaaaatgaaagcggctgttaaaaaatactaattcattaaaataataaggaacccattagtgtaaacataaatatcataacccgggcttgaggtccgggaaaaccttaccagaagaaattatttcactattccagtgaccttcacttctaaacatagcagttgagtactacttctagaaaatcctggctccccacacaccagttgtgtgaatctatggtttcaacgataacaacagtttttaatagtttgggttagtttttttttaaattacatttctttttcatgaagttctcattctggcaggaactcttggagaactgaatttgtgtgcacttttatgatataggtaatgtgagttttattaggcttaaactttgctaaatattttttcctggatccaaaaatagcatacagctgttttcagcaatgtgttattgggctcccatttcattcccgagttcacagcataggtgataatatgcgacaccaccctactgcacatatcattgagtgccggctctaccacaaccgtcttttgagcaggtgacttaaagggttccttatgcttatgtcccatgtcacccagccatcctggcccaaaggctgcccagggtctgtgtggtgacctggcagatagctctgcattctagactggatttgactgagccagtaagaacctctcccagaaagtttgagtatggaacatacagggatgtggtcagagtagcaaagaagcaaggagatactcccagggaaggtaaaaggcagaacagaggcctgctgtggagaagttccccacgggtgagaggagcagctgaagcagcgaagaagggtcactgagtcactatactagtgaggcagtggagttgagaggtacacacattgtacctgtaatggcattctgtttggtcgtgagaactggcagtttataattgcacaatgctgtggtctctgtgaggcctggttcctattttttctcatttccctgcatattcatagaataactccctaatgactgaggtaatctgaaagcatctctgtctttgtaacctgtcttttacaa

SEQ ID NO: 1563738 - DNA, 4001 bp, Homo sapiens
agttatacaacttaacacaaaagtgtttctgtggataatagttgtagttattaaggtataaatgcaagaatagtcaccttctatagaaaattgtgcatacggtgataaaaaataagacacaagtacttagatgatcaatgcaaaagtctgagatacgatttaaagcattttaagtgatgctggcaccttttctagttgtttcatttattaattactacctctctacactacttgactaaggctacaaatacatacaacaaaggaagaaccagataataaaacaataaaaaccaacagtcaatgaataatctaaccacagaatccaattttctcttactgtacagatgcaccaatatacatgtacaataagtacttaaatatctgtatgcagagagcacacagaacagaactctgatttggtatataaagaatggggttaacaattgtaaaactaaatgctcattttaactttatcacaaattaaatgacgttatattttagtatcagaacaaattaaagacaaatccaactcatatctatcttcctcccctttgggggaaaagcgttattgcaaaacgaaagaaatatagttatatcatcataccaatcaatattaggcaggcatggaatggggaaaatgtaaaacccaaagtttgaagaggtatgggcttcaacaacataaaaggataaagtcacacattaatccattatcacacctttgttaaaagtattcagaatgctgaagaaaccaaatctgcactcaaactagcactaccaacacagaagtgaaatcgtaaattttaacaatctggagggattggaatatatatacaaatacagaatgggaaagaaaagttgcaaaagaatttttacaatagcagtccagtcgcgcagtggagacaggttttgtatcattgacttgcaagtcaatttgtgtgctattagtgtgccctttcctgctcatgagagccagattaaaagggcacttttaccacaaagtttacagaatcaagtttaacattagttattttacttcgaagctgaaataaaaatacttagcaatttccaagtattccaaacaaacatacacagattttccatctgtattctgtgtatctccagtcttattcctgtggttatatggttcaaacatatatgcctagggacaaaatttactaggaaagtaaagcaaggtgcaaagaaagttcaattagtaaagctatataaacagctactttaaaaaagaaatcaagaaactgcattttgcacatagtacataagctaaacatctgagttcctaggacaagtggggttggctaccagaaatggacagctactaaatttgttcttggtatttttcctctttgcaataaaaagcagtcatgtaataatcaactgtgaccttcacagacaagattaataaagcatagaaaagacttaaaaattacatttaagacactaccctaaagatttacgttcttttacacatcggtgccccaacaaacacaacaaaaagaagcgtcgctattcaagggggctaggaccaaggaccaaggatctcagcaaagcaaacgtaaaaggagtgccccgcgaggctggccaggcggcccgctctgcagtggcgcccgtggcactctcctaccttggggaaccaagcctttttgtccaggtcccactcgtagggagtgtccgtcggctgctgcccgagagaatcgggttctccgccggcatcggtctgggtgtcaccatccttgccgtctccgtacaattcttgcattcgcaactgctcatcaaactcatcgttcccatccaagttggtgccgctcatgtttcctacctagctcaggagcagggttcagaagaactaagaggccgaaatgacgctggagctgagcagagaaagggaggtcaaccgcgctctgctcgcgccccgccgccccccggcccgcctccccgctgcgccccagcagtccccgggaaatcgcggccgctcggcggctgcaccgcccccctctctgcccgcccaccgcgcgcgcgcgctgatgctgtgagctcggccgcgccgccgcccacctggcttgctccgccgggcctcggcaccgccgctaggtccagggcgctgcgggagcgcgcaggcgcgctgccgccgccgccaccgccgccgccgccgaccggatctgaggcgactgcggctccctcggcaacgtcaggaaattacttctaaactaagccctgctcaggccgacgcagccgccattgtcggcgcgtggcgacgtcgcgggtcgcgccgacacgcccactatggcgtcaaaaagcgccgacgccggcatgcggcgcgaggcccggggaggcggggcgccggggttggggggacccgctgctgctgcgcgtcgacgcccaccggggtcgggtttggggcggggcgagggccactgggatcccgcggcgcctcaagggccttgagctccgcggggtccccggcggatcggccggcccgggagggaaacggaaggaaggcgtgggaatattccctcgcgggggtggccgggcgggtttcgcgagggcgccatcttaggggagtgggtggggcggacaggacaaatttctctggcttcgagaaaacgacgcgcctccttcgcccaaaggcccctcccccgctcaggaaccgcgtcttttacttgtttctttacgacacccggggatagacaccggatcttgttcatcttggtagcctaaactcctggcaccggctctggtgtctaatgcggaatgagcgaatgaatgaacgaatgaggggtagaagggccaactttctttttctggtgtcagccttctcctttatcggtctcataccttcctctggctggagttcgactccgtgggaaggatggaaagggcagcagttgcctgcctcttgtactgcagatttcagtggcgctcgagcttcgaacttgaaacttaagcataaatgtaaacatcccagtgtaaacaccagctttattggccgggaaactccgcttctttgtcattcttttagaaagacacagcatactttttgttctaaacagaactttgttttcaggaattacactcattgctgaaaaggaaaaggtccatatttttaagttgggcaggtatttattgagcccctactaagtgcagggcactgcgtgaggctctggcgacccaggagttgacaagacaggcacagctcaggggagacagaattaagatggttggcacctgacagatatgagatgctggaggacagcagttctcaaactttttggttccaggtcctctttacactaaaacattgaaaaccccaaaaaacgtttgtttgtggtttatacttaccaatatttctgcacaaaaatgaaagcggctgttaaaaaatactaattcattaaaataataaggaacccattagtgtaaacataaatatcataacccgggcttgaggtccgggaaaaccttaccagaagaaattatttcactattccagtgaccttcacttctaaacatagcagttgagtactacttctagaaaatcctggctccccacacaccagttgtgtgaatctatggtttcaacgataacaacagtttttaatagtttgggttagtttttttttaaattacatttctttttcatgaagttctcattctggcaggaactcttggagaactgaatttgtgtgcacttttatgatataggtaatgtgagttttattaggcttaaactttgctaaatattttttcctggatccaaaaatagcatacagctgttttcagcaatgtgttattgggctcccatttcattcccgagttcacagcataggtgataatatgcgacaccaccctactgcacatatcattgagtgccggctctaccacaaccgtcttttgagcaggtgacttaaagggttccttatgcttatgtcccatgtcacccagccatcctggcccaaaggctgcccagggtctgtgtggtgacctgg

SEQ ID NO: 1563739 - DNA, 4001 bp, Homo sapiens
attgtcagaatggctgatatgtacgtaaacttcttcatgaaaaatttaaactctggagcccagatatcttttttcattaccgtgtatgtgaggtcgcaattgtctgcaaactggggagctcagaggttactcagtgcgccgcatttcctcaccccccgccccccaaatcatcttagctcaaccatatatgagcgtccctcggttagcctgcctaaaaggtatgaggtaaggggcatatgcacttagtggctcagcaatcagaggcttccttggatgggacttatactggtaatattaatgaagaagctgcgcggtactggcagtgattccagaccaaatcttttaactgccgaatgtcactcgctgaattatgagttggggagctctgttgcttaaaatacagggttctcaaacacaatgcaagtgtttgtcacctcaagtcgcatactacccaacaggaagcaaaaggcaaagggcatggcgcagaaaagaaacagacacacagacacgttttgcaatgacgaactttatgtgacatcaggaacggcaacctgttctcatgtttagcaattccgaggaacgctgtaaagactgcttgtcaggtaaaactgagtacaggaataagaggcagcgctggagactttttcgcaatccttttcaaaatatagaacagtaaccaaatgacttagataagctaattaattatttaaaaaaaggttcactggatgcctttatcctctcctcttaagcttacgtgatcaccagcagcgctgttcaaattcagctaacagctgttagaccaaacacagatccgcagtgtgttatctccccagagttacggatgttcgctgagacccgccagaaaaattagggtcgcttttcaatgagaacataataaaggatccttggttccccctctgcacacactgtcccaaaccttgcgccccctcccacttgcctgctgtcggatttcttaaaattgtagtcggtcctgcaactcagttgcatcttccgcagcccgaccctctactcagcgacattgcgttcagtttccctcctttctctcctcccactcctcacttcttgagaccccacccccgccttccgtttctgtctcggcttcccccgcgccaggttctctagacccccgcctccgcccagcgtcttcatctcgagcccccgctcccaatccccttagagacttctatgctccttccgtggaacctaagctcctctcttcttccagagactcagtctcctcgcgatttgcgcgttcagagtccctccccccaacctccgctagggccagtgcggtcctgcaggctgcagccatccgggacctgtccccgctccccaccccatcccccgcctaaatcgttggggtctcggctagcaatgccgcccggggctccaacttaccactagcgtccgggaggaagaccaggcagcggtcgccgcggcggcagctagacgagaaacggactcggctgcaatcgcccagcggagcccgcggcagtcggtgcgctgagctgcgctgcgctgcgcgccgcaacctcgcgcctcggcggagggagaggaatggagggagctcggcgcgataggaagcgccggcgagtcgacctcctttgggtgaccgtgcgccccccggctaggtttggctcttttcgctccgctatcttactctagcttagtaactgaccacctccagcatctctgcactaatcgcgtcttctttcttcttcgttggcccctaactaactacactactctaaacggacgaaggccatcacacgagcgccacgacgatcgcgacgactccgacgacaacgatgtacagacagaagaagagttcatatgcaatcggcaggtaaggggcaaggcaggccaatggagcagccaaggctagcaatctagccgctccaaaggcagtatcgggaagatcggtgcatctgaggaaggaagcgtcctcggcaagcaccagagcgcctacctcgcgcgggtgaatctgcaccacgctcttgggccaaaagcgggatgaggggaggagccaagagcagccaatcagcactcagcattacgtggcccccgggcctgtttggaccggtctcttagtgcatctggagcctgctggcagggggcgcgagaccccatggtggagatgggggtgggggtgatgattaatctgattcacaaggcctagagagtagggggaaccaggatcagccatggcaccggatagagagagagggaaggctttctcaagaatgtaccctcaaagattcatagcatacccctccccaaacacacacacacacacacacacacacccctgtacatttcatttcaacaaacagcattctcaagtcttgcaaatttcatcaagctttgaaactcccttcaagggtctctgttccgactcttgcccattcctccaacagtagcaactgaggcactcacagggtcaaacatttggtgagtgcgcaaaggccacaatcctgttataaggcccacttccccatccttgtctccccatcctttccctaaccccaaaggagaaagaaaagctcttggccttcgagccccgggaaggcacagtttagttcctttcttgaccccacaggcctcattagaaagacaccttgagggcagctcttacgggtttccaagggggtgaacatatctctctggcacagggccttgggcccacagccagtcggttgcccagtcgttgtgggggagggaggggtgctgtcaatgcaaggtcaaggcagcaagaggtgaaccacaaaggctctcttttggcaactgctgggatgccgagctgcaaccggtcaggcagagctctaaccggtcaggcagagctctttttcacaggctcccaggcgcaaccgggcaggtgcctgcggtgtcctggcggcagcgcagagaagggtgaacggggcccccttggctcagaggcaccaaaaccaagctgagtaatggagatgatcccacggagaatggggacagaagcagatctctcctaagagggaacgaaggggcgagcgggggtggtggtctcgggtcgcggccgaggtttctcggccctgtaccgaggaccggggtgggaaaagtggagattggctccccgcctgtcggaggtagctggaccgaagcaaaagatcgagcctccggtttggctacttaggaccggacggcagcgcagcgagtgtatagaagaggctacagagaggccgtacagagagaggcttggaggacctaacccggcagaacgcaaaaggggtgggagctgccggctattctgaaggccgaagtttgcctcagtagccccaaaagttagagatggagaaggaagtggaagcaatgataagggtcaggccccttccttattctggatgccctaggaacagtcatttctctctgtgcctctgtttccatatttgtgaaaggagctgtccagtctattccaaaaggggcattttgggaatcctctgattccctccatcgccactgaattcaggctttgaaatttaatttggcagtgaacatactgtcggcacccaagttctgtttcgaaaagcaaaaacccatcgcagttttcttgaagcatctgttgaatgctgctgtatgatgccgcacaggtggctgcgacagcgctgccaagtccaccgactgcacaacgctcgcatctttagaaatgctttggtagcgaacagtaatttataaatatggaagagaaaacgtatgtcttctctttaaataattaagcactcatctttaaaaactccccaagtgtccccttactctatgaatgtggaatgcttagtcttgccttttctggcgggactcgtatttattttgtcagaggctgagacatttatattacttcaaaaaatgtaaatataaatccctgtgatatttttgctaagccaaaatggatctgccgagcagcgagtggaagttagcatccgccaaaacctgttctcgctccccggctcccg

SEQ ID NO: 1563740 - DNA, 4001 bp, Homo sapiens
acaatgacataacattttttgcccattagatagggaaaaaaatttttaaacctacattatccagactccttccctcgccgcactgcaggctaacctgaatccatcttaatctaactaaaggccatatcattagttctagttccaaagccaccaattttaactactgaagctttaccttggcataaccaaaaagatccaataaagtggttttctccaaacaaaggagtctgccctcaaaggaatattcaagcttcggggatggggggaaatgcctgaagcttttaatatggcagtttttccacgtctagccaacagtgtttctccaataaatcttgggatccaatctggcttgatttgtgggcttttccattctaatgcattgttctgtccgttctaatttaaatagttcctttagagtacattttaatagccagtagtacaaatatccctatctttacttacgttttaaaatattttttttcagttattcttagccatttttttcccccggatgaactttagaatcatagtaagttccaaaaaaacttggtatatttattgaaattgcatcaactgtataaaccaatataggaaaaatggacatcactaaaatattgagccttcttattcagaagcatagtattccttctcttttcatgcagatgttcttttatggtattcgtcaataaagttttatagtttacttctaggtatttttattcgtttctcttgctattgcgaacaggttttttattattaaaatttcaaaatgcttattgcttatagataggaaaactgcctatataaactattgatatttgcctatttacaaacaaaaatatgatcaatttcgccagtaatcagggaaatgcaaatgaaaacaatgacatacgatttttttgccctttaaattggctaaaattacaaagattgataatacgtgttggcataactgtggaaaaataggcactctcgcacaacattaaagagtgtaaattagtacaggcttttgggaaggcaatttggacaaatctatcaaaattcaaaatgcatatacaccctgacccagcggttactcttctaagaatttctcctacagaaatactcatacatggcatgatacatatacacaaacccattcattatggcattgcttgtaatagtcccctccctcccccaacagagaaacaagctaatgtatatcaatcgggaaatggttaaataaactgtagtacaatcatacaatgcagctgtttaaaacccaacataaatttggattcccggatataagaagatctacaagacatattctcagatttttaaacaagcagttagtcgaaatgaatgtgtgtgtgtgtgtagtaccatttagatatcaaaacatatatatgcaacgcctagtagttacccgcgaagcctgcctgcccgcccctcaccttccctctcctctgaggccgccttcctcgaaccagtgagaaacgctgaaggcccggcctctactctctctttagggccacttggccatggctaatgccggtacctcgcatcccctctgtcagccgctctctcgccgcgccgccggcagctgccgggctgcccccgaagatgcggctagctctccgctggcgcctgccgaggcctgggggaggggagaggaggcggggttcagggagggttggggcaggccgccctgcccctccagcagcctttcccgcaggctccccaaggccgccacctccgcgcctccgcgcagggtcccgtgggaactccccccccaacctcgccactgccacccgcgagaaaccgagaacggccgcgcgtacagagctcgccctccagcccagggatagacgctcacctcggccgcaatggctccgcggggcccgcaggagcgtgcggggtccgcggccctgcttcagccctgcttcagccctgctccagccctgctccagccctgctccagccctgctcccctcgctagccctcagtcgaaagcctcctcgcttcggctcagctcaaactcgatttggggctccacccaccgcaagcgaagccccgcccctgcccctcgggagggagctccctccgcggtgaagtcgggtcccttgcaggggaccgcgcctgagctacccaaggcccagtaaatgcaaccatagaggatgatagggtcgctaagaattgggatttgattcgaggcacggtggaagccgcggaagggaacatgatttgatctgatttacctttaaaaattaacgacctcgccagatgccttgtgaagaatggggagtgtggggcaagagggcaaggctggacccagagcggagggtgggagacgacgtgggaagccgaccacccagagttcacgcgagcaaacccttaaaacacttcaggcacatagtaagccctcaataaacattcttttttcctcctttaattatttggaacggcagtgcgattgacaaggatcctgtagaggatctgcatctgtaaatacatgggaataaaaaggacctggtgggagatcacctgttaaccctacttaattattgtgggctgcggacgacattggaggggcgaagaactttgacttggaactctagctacttcgataaggtttcaatttttaataaaaagtatgtattaatttagtatttaaagacaaaagcactattaaaagaactcctgagacatcgaggaaataaaaactgtgattataccctccacttctctaattccagccctccagagcagtggttcatccctcgaattgagaatctaatgaatgggtcccccaccccaatatatacttacacataaaattttgtatatgatctcaggagatgtacagggccccttcgagatacactgtttcattgaatatttttacaattttttttttttgagacaaagcatcactctgtcacccagggtgaagtgcagtggcacggtcacgactcactgcagcctcgacctcctgggctcaaggatcctcctgcctgcctacagtctcccaagtagctgggcctccaggtatgcgccaccacgcctggataactttttattttttgtagaggcggggtctcactatgttgccaggctggtctcaaactcttaggctcaagcagttcacccgcctcggcctcccaaagcgctgggattacaggcgaaagacccggcccatctgtaacatttagtggcaacatgaagctatactttctttagcatgtaattaacttcggttgttcttttttcattttaaaattggtttcctaattacacatgattattgtaaaacacggataaatttaaagttccccttacattcatatacacaaatagaaaagcatggctttgtttttgtttttcatttaaaaaataaatagcatcctttttatgtattgttatgttaattgctttattcacttaatgtagcttgaagatctttccatgtcaatatatataaatctacctcatttatcttacctactgcatagtattccattgaatgaatatactgtaatcattcatctatggataaacacatgttattttcaatctttgactattacagtggggttttttttttactgttaacaatgctgcaataaaattccttgtacatgcttttttctgcagatgctaaaatatttctgtgagataaacatggagaaatgaaatagttggataaaggtagcacacattttttttttttaagatagtgtctcactgtcacccaggctggagtgcactggtgcgattagggcttactgcagccttgacctccaaggctcaagcgatcctcccacctcaagcaatcatcccacttcagtcttccctcgagtaactgggactataggcgtgtgctatcacgcctggctaatttttgtattttttgtagagatgaggtatcactacgttgctcaggctggtctcaaactccttggctcaagtgatcctcctgcctcggcttaccaaagtgcttggattacaggcgtgagcca

SEQ ID NO: 1563741 - DNA, 4001 bp, Homo sapiens
cgattataaagtctcttttgcttacataaattaaatattcccaaattcctcctgtctctccacagggctcagcaggatgtggttctcacagccagtggcctaagtccccagtggtcacctgagaaccaggaccactgcaccttggggaagcctgcctacaggtctgctgttagggaaggaaggagatgcaactgtttattaagggggaccctgtgcatgcactgtgtggaacagcagtttacaggcacaagtggactcaatcttgggaaaacccacagatggagagacttttactacccccattttacacatgaggaggactgctcagagggagtaattgaaggtctaatatcacatgtccaggaagtggtgaactgggatctgaaacccaggcccgcagctcccattgttggagccggctgtgcagcctctgaccaaccctctgtgaaaggccagcaggcagcagactgtggctcccaaggacccaaggaagaggtggaaacctaaaatgtgggcactcacaggcaaggggacagattgctacaacacttgatgtgacacctcttttaaacttagcacagagcaggaagttttgaaaaggattgcatgtgctttagaggccgccacttgggacagaattatttctatacctcttaaaacatggattgagtcactaataatcctttggtgctctatgcaatatatggtaattataatgaataagtattcaatttaaaaatgaaattgttaatcgtgttttaaatgaaatacatttataattaagctgattcattaataattaacaaccattaagaacttcttgaattgcccatcttaggccagatcataaattttatatattcttttgatttattttaccagtgtcctgaagagaggacaaaaagatatattcacagcactagctaataatccctgtctcaaatccgctttcataataaggcagggcataaagaaataagaaatgaaatccagcaggccatcatttcttttttgcatttttcatgatggtttctccttcactcttcaatctccatgtaaagcccctgtcccatgaacttcatgccagccagtgtgcccctctccacccacccctgtggccaccgccctctgacttcagacctttgctatcctgaataaagcctcctgcacctcagtcagagtctgcagctccacctcaggccccagcatcaggctgggaattcaacaagcctcagaggcccccagccaactccctggcctcacaaggccttcctgttcagagacaatgaggaagtctcggtgtctttatcccagccagttcctccccacagggccggcgccctcactgtcaccattggaaactgccccctctaaatcactgattcaaacaccacactggccaccccttccccgccttcagctctctggggatagcttcccctggatgtcttacagacacctacaacccaaagcgacagaaactgagaggagtcagaaacatactcatggatttacatcctttaatagcacttgttgatgacaacagcagatattcctcagctgtgacacatttttgccctggctaagcctgtgaggttcccttcaaggctctgggacccagtcttcagtcattcttcctggatttgggcatctcatcaaacaaaaagcgagtcacatcactctcagcgctgtggggctcacggttgttgtccacttctctctccctatcttgtgaagtgttgcgcatactgccattgttgctggcctccaagcctacccgctccatgatgtagtcagcaaggcaatcgagcaaggtaaggagggtatttattgtggaggaactctggctttggacgtctcgttcatcttgcacaacgcggtccacgaagctcctagggacctgtagctcatttctagaagggtcttgagtctggttgttatttgtagacgagttcttacagttctttttctctgacatgatgtttgctgggtttggctctcatcagctctgcttgattctctagctcaagtaggtctctgaggacactagtgcttagtcctgcctattgtatccctctgctccaggcccttattggtcagggagctagctgcctttgtgacatccctagactttgtgatttcattggtgtccactggtcccttatcagacctcagcctagaaatgtctatgacactgatctagtcacgctaatgactgaaccttgattttgagggaactataactctctacctgattttgacattataaaaataaatgtgtgcttcagtggaaaactttgctctgtctttaggacaccactgcaggttatctgattccagccttacattatctgtgaagtcttttatagccttttgttagttgtaggctgctgatacatgtacagcatattctttagtagaggttcggttgttcttcaccttatgaaaccagttttgcctccatttacacaatcatttaatattactgatgaatattcccatatcaactctttggtttcccttttgaagcagtcataacatctttttcttttagcatgtgttcatttcatatctgtatgagtgtcatgattttaccccatttgaaaaatatattttagtcatttttcaattaataataagatgctcagccgggcgcagtggctcactcctgtaatcccagcactgtgggaggcagaggtgggtggatcacaaggtcaggagatcgagaccacagttaaaccccgtctctactaaaaataaaaataaaaataaaaataattagccgggcgtggtggcgggcgcctgtagtcccagctacttgggaggctgaggccagagaatggtgtgaacccgggaagtggagtttgcagtgagccgagatcgtgccaccacactccagcctgggagacagagcgggactcggtctcaaaaataataataataataagatgttcaataagtttacctgtcagtgccaggtaaacagttgatagagaagtgcatcttgtgctcagtttaagcccagatgtgtatttcttgtccctcctaggtgaagccaaagcactaagagatgtttcttttctattatttaattttcttctctactaattctgtgttttccctttgactttggttcatttacagccaataactttgccattccacaagggaaaaagtggaaagaaaaaggagtctcaaatccaagcattttcaaaatccaaccattaggtttcaaggcctgagaatattctaaggcttgagactcctccctttgatgactctgatcctatgacttcacctggggtcataaatctgccctctggcctctaggttctgccctcagtcattgttcctttattttgaatggtagcatatgtttacagctgagtagttttatcagcctgcttcctcctgtcaaattttgagagtcctgtagacttctttcatttcttcctctatttgtccctttcagtctaagctggcattgtttctgctgatataacattgtcaaaaacttacaggccttttatgtatgtcatggggattcatgccattagacaagaggcttcttcaagatccctcatagaaaatcccatctctattccttgcttattctgagaagcacaccccatatctcttcaaaacaccatctatgtgattgaatactttgatcttttgatcccttaaaggcactaacaaaaggatgtctagccacgcccttgattttatctctggaggatgattttgtggcaatgaatttcctaattttggtgtcttttgcaatctggataggctgaaaatttctcatatcattgaattctggtttctttttgcttaacagttcttccctcaatttatgtctttcctctggcattttactataaacagcaataaaaaacaggccattcctttaatcctttgcatgaaaatctgctcagctaaatattcaagttcattgcttacaagtcctgctttccacataattgtagagcacaattcag

SEQ ID NO: 1563742 - DNA, 4001 bp, Homo sapiens
caaggctggtgtccctgggaggtcacgggtggacccctgcagctcccagcagtagttcctcctgggcttcagctgtggcagcaagccaatctcctgagagcatggacctccctcacagatggcaacatcaccaccagggctgagctgaacctctctgccacccggtccctgtgccaggtgttcctttgggctttggcaaaagacccagagagcgctccagatggacttccctgaccttactgtacagatgcaggcaccttccttcaggaggtcgcaaaggctctgccttgtgccctgacttccctgtgaagccaccaatcaaaggagccaagtgtgaggcaggatgcaatatgtacacgcctcccgctctcccatcaccctttcatggttccatggaaagaaagaacatccacaccccacatcttatgcctgctgaggcttctgtctttggcatatttctgttggaccatgtgtcaatggtggctgcatgttttcctatggcgtccaaatcagtgggattcaagacctggggttcctctgtaagggttctcacacccaggacggtcagtctcagggcaaggcactgcccagctacccaccgttcactgtcccctactcccaccccaacgcacacacaggcacacacacaggggaggtcagggaggaggcacacatgtcttcaccaagagcctacaggagcccagttgctggagccatcagagcctctggaaagccactatatactgccgtcctttcagcagcaaggtgggagaagtcagcatcgtcaagagaatttcattaggcacaagcagtctcccccagaggtcagaaggagaaaacatggcaagtagagatgtccctggggagtggccgcaaagtcacggagttctggaaggtcagagttgacaggatcctttgagaacatgaagtctcctcccctctgggttccaaaggggaaactagaacccagagagaggaggaaatggcctaaggccacgcagtggctcagtgtgggagcatggcctagaggtcaaacctcttacccatcagggccaggtgctggctggcagctgcttcagatggtttccagcccacctaggacctaaattaacctcttcttaaataagtgtaaggaaagaagactcggacctgaatacgcaagaccgcacacggagaagagcagaagcaaaacccccgcagcctcagaaaccctagctccttcccattccaggcgcctcgaggggaaggcatctggggctctaagactgggggactatgggggatgactggcaaagtccggttctttgccaccgggataggtggcaaagcggtccacgagagaggaaaccgtggagaaatttgagtcccggaaccggattcccgaagcggtttgagaaaggcgggccgggatacgtgagtgactgcctcagaagggctccttcaaggacactaaggaggtgacagccgccgtggcccactctcccggcccgtccggagggccccccgccacccgatgcagaccccctgggggagccggtccagggccaacttcggccaatcccctcagtgacagcggaggcggccaatcaaccccggcgcgaagccctttccccgcccctggtggggcccctagccaatcggactccagactgcttcgggtgcggctaccccaccgctcccctgcgaccgctgccgcggtcccgtggctctttccctgctcacctcccagggacggcagagaagggctggcccgagcaccgccttcgcggcgctgccggcgacggtcgctaccttcagcgccatgacggaaagtgagagcctccgcacgtcccgacacgcagataccgctctcgcgagagttcgacggggtgcgaagtttcggggacaggcgcggacccggtactgcgcacgcgcgcggtcgcaccgattcacgcccccttccggcgcctagagcaccgctgccgccatgttgagggggggaccgcgaccagctgggcccctggctcagggaggggccacgtcagtgctgccagagacgtcacaatgccggcccagccgttcggtgcgcgattggctgccgctgccacttacgcgtcgctcttcctcgtttgcccctcgtgttcatgggagctcgttttcttttcctctaggcagagaagaggcgatggcggcgatggcatctctcggcgccctggcgctgctcctgctgtccagcctctcccgctgctcaggtagcggcccagccggggcttctttcttgcgagcctctgacccacggcaggtggtgttgggggcaggagggatgcgggggtccggcctttcagggtccgtcgctgcgggccgggccttcccccgagaggcaggcggccttgggacggggggaccaaagcacctcgcgcacgtttaccggcagccaggcttttccttgtctgcccatacgaagaggagtccccgagcctccatggtgcgcccggcccccaagctgcagcacggaacgtgacacatgtcccggctcccgctccctgcggggtcggaccggagcgaagctctgtagcgctgagcgatcgcggccaaaaacggggctggaggagccacataagctaggaagggacctcagtgaggagagggagcaagagcggggcgagttagatggggagccaaaggtgcgcagggccttgagtgccaggccgaagactggcttttccggagggccctgccttacccttaccagagttttcggcagagccgaccaggggtcccgtcgatttgcattcgtgaggggctgaggtctgaactccagagtgtgtttaggaggtggctgcagcagccagccccgggcccgggggccaggactggacaggggcggctttctccacattcccttttctgccgtccttcaggccagtagccttgctgcctgcaacgttttggcagcctaactggcctccctttccgcacactcctcatctgcccctcaggaattccctgaactatagtcagggacgtatccagaggacaagcctggccataaaacccttcgggggctcccctgcgccacaggaagcaggcccaacttaggcaggacacagaagggctggcgggatctagcccctgagaactgcctccacgctgttcctagggatctgcctcctgtggtccagacccagagccttctctgacgtcctctgctgaagccatcgttctgccagggcaccacatttggacagcgggtggctgagaacattcccactttggggagcctttgtttcacaccctctgatgtaggcggcagccttcctttcctttgggcctctggttatggagaaggctaaggcaaggtcctttctctcacagctaacaagttgtgcttctggaaccagagtctctcccgtttacttcttcaggaaacgctggggccagtcttcaccttctgtcaactggccgggggcagagaccctttctctcatcttgaaagccccagtgcattgcctgcctgcagcccccacccccgatgtctctgctgaggatgccttcagtaactcgtccaggccgtttgtggctctgaattgaggctggcgtggcccccgggcctccgtgtcataggtccaagtgttggcatgtattgtccagtgaatccagcccccacctgtccccagttcgctcttcctgcacacctccagaaagccggccttgcccctccccagccttccttcacagccatcccgcctacgttgccattgcatttgtgaccgagcacttggatctgtctcgcatatcccacctggaaggggcaggaagagcgcatgggtccccagctgatccgtgctatgaggcagggccgggccatcctgccctcagaccgggatactcgagctggccttacccaggcatctctccctcttccccgcagccgaggcctgcctggagccccagatcaccccttcctactacaccacttctgacgctgtcatttccactgagaccgtcttcattgtggagat

SEQ ID NO: 1563743 - DNA, 4001 bp, Homo sapiens
ctccttgaagtactgggggatggtggagaagtttccagcgtgcaccctccagtaggagttgaagtcgtacaggcgggtggtgtcaggtctcctgccagtgaggaaagaaacgcggctcggggcgcacactgcttgctgttagggagcagaagcagaggtaagcatcgccacagcaaaacatgtctgccatctcttaggtaaccaagcaaccgccctcccgaggctcctagcaaacagcttggtagctgagtcatgcagagctcaaaccagacactgggatttgggtgtcacctaggcaacagactgcttccgggagagaaaagggaagcaatcagcccctgaaaccagcagatgcttatctcctcctacgcaatggcctccccaggcacacagagcggccagtgttgctgggggcagagccatgagggggttcagggagcagggccaccctggctagctctcacctgaggcccagcctgcagacctgtgggtgcccttctgcagcaccccttccttctgagcaccaggcaagcgcccgttctgggagaaagctggccagggctgccatgaacacatcagggccagggcgcaccttgcacccaaggagaaggccacccttgaaggtcaagctttcccatgagtggaaaaccagattttctccactaccattttccagactatgcttccctctaacaagatgtcccgcacaatctgtgccatctgacaatagctgaagctccccgcccccaaccctcagtgcacgaagcagcacacacccacagctagaggttcccagacatacctgcgcaaaggcattctggaagaggaggctgtgggatgccagttggtcaatatttggggacctcaccagcttatccccataacagcccagggaggggcgcaggtcatccacgatgatgagaagaacgttcagagcatctacacaggagggaggggctttggtgaggtaacctgcactgacactgaaccctccctcatggtaggtgctaggttactaagaggcccaaggctggaccctgcaccttaacagcctagccagggagggcgctgtgcctcagcaagggtgggagtggggctcgaggaggaagcctgagtcctgggtggcagggttaggctttggtcatggcctccaacctgggtgaggaagcgagatagtgagtgaaagatggtggaaaggaaagatgaatttaggaaaaaaagagaatgatgtatgcaggaaaggacagatggttggatggaggaagataaggaggaaaagatgaatagctgaagggaagaaaggatggagagaaggaggggagaagagagagaaatatgaatggatagaaggtaaaagggacggatggaccaatggagggaggaaaggagggggaaagatggatggatagagatgggaaagatggggggaaagaggaagggaagcacggagggataggagatggatggatgaatagatggaaagagggaagggagggatgaagggacggtaggaaggagtgaaaaatggagggagggaacgaatgatggatgaaagaaggaatggtaggagagaggaagggtaaaaagaatggatataaacaaagaaggaaggaaagaaggaaggaggaaggaagggagggaggaagggagaagagatggcagggagggcgtgggcggcacctgtggtcgagttggcctgcgtttcggatccgagggcgacgcagacggagctcagaaccagacccagccagagaaggcctcggccggtccggggtggcggcatttcggcttcgacgcggccgcttcagagcggcggggacaggctgcagcaggtggcgcagttagcagccgccgccgcagccacagagacctcctcgtcgggaacccatgaagactgcgcaacacagccgccgcccgggcccgcaggcccgggcgctggccgcagcgcgagtgcgtccgtgcgactcttccctgcgtccctcccctccggggcgggttctagaggtgcgcgtcatcctgcagcaataggcgtggccgagagacaggcgcagagcgggggcgggccagttgccttgcaagcttcgcagacccagcggcccgcaggcccctaggtgtagaactgctaggggtatagcgattcagccactgcccttaacaactagcagttacccgtctttttgcctttgcttgtgctatgcctttcacctggaagccctgcccttccttctttttataaaagacacacttcttgtaagccagcctcaatgccattctccttccatgaggccttttgagaaagtcccttcctccatctaaagggactccctttcctattcatttcttcaactaattcttattaagtatcgcaaatatgtataccaggcgctgttggtggcactggggctctatgtccctgctttggtggagcttaaaacaataaaaaaatatagagagtgtcggtgggcatacccggtctggagaaaaataaagcgtgggtgcggggcatgcttgttattttctatggggtggccaggcagggcctcactagtgaagtggcatttgaacaaaattttgaagcaagtgagggagcaagccgcattgaggtctgcaagaagggtgcgccaaacagagagagcagcaattgtggggagatggaatcctagccctacactgtactgtactgaatactattataccgtcctaatactgcaaacacagtttgattttcaactttgagaatcaatctataacaaagcccagatgacttaattatgactaaacaacaatggacaatgggaaggtacaaatacagctgtgatggtgctgtggtgcactgctcagatctcccttcaacaccaaaaattttatttccctagctggcttgagagctgttagctgtcgttagccctcatcagaaattgtcttagaaaaagataggtacctcagccaaggtcacccctgttctcaggaagcccacatcagtgattcaacttgaaggtacaaaggtgcagccccttaccccaacttgggacatctctgaaaggccatttcagcttcagagctccctgtggggttaactgaagccttttttgagactgcccactttctctgtctgttgaattttgatttcttccctcccctccccttctacaggtgttgatcctaagagtactccctaagaaacttcctgcacattactctacatcttagtcagcttccttgggaacctggcctgcagcaacagttgacaaaaagctgggaggaggaagggagatggcaggaaatgtaggcacattaatttagggttagcaatttaggattgtctcctttgccccagcctatcgcaaaaaaataataataataataataataaatcaatagtcgctgtccccagttcatagaaagagaaatacagatttagggatattacttaaagatacaaaagtaaacaatagaaaacttaaaaatggcaataaatctatatagtaaaaggagaagggaaaatggcagggagagatgaaacaaaatttgtcatgagttgataaccaatgaagttcattgatgaacacctggggtttattatactattttctgtaatcttgtataggtttgatcaatttccaaaatccaaggttaaaaatatgtacataaaaagaggaatggataagtgatctcatctatcataggaagaagtcagcaatgtctaaagttgaaaacattagaaagttgatatagaaatagcatagtatttagaaagacagggacaatctactagaagaaatgaaagtagaaacatttaaaatgagaacagaagagggaaggtgcagggcagagggcctttgctttgtatggtatgtcttttggtcctttttgacttaggtgttagtgtcctccccccaaaaattgtatgttggagtcctaacacccagtacctcagaatgtgatcttatttggaaacagggtctttaacagggtaatcaagttaaaaggaggtaattggg

SEQ ID NO: 1563744 - DNA, 4001 bp, Homo sapiens
tcagtttatattgatattctgtttctatgcccgttttcctcaccagattgtatgctcctccaaggcagggaccactcatactcacacaaatacctatacagtttgtatccccagtgcctagcatagttcctagacatcatgaccacccattaaatgttgtttaaaaaacaaacaacaacaacaaaaaaaacctaagaaagtaagcaacttttccaaggtcacacaatgaagctgtgccaggactaagatcagttcaggatgttacacatctactccagtagtctgaacagagctcctcaatcagtggaccataaaatggcctagctttgcctttcagagacatctaccccactgtaccatatgaacattgctatgatgtgatgtggaaaaggttgggagacactctgctaaactacattgctgctgttgccaaccataaggtagtaagggtctgataagtaggtataatcatctcaacaaaagcagaggcttcttggaaaaactcaggaaagtttgctctccctagggcctatgctcaataagaaccaagaaagtgacacataccattctggccccccaccacccgccaagaaagcatgcccctgaaaagcaccgccattgggcaggcctcatattatagctattgacccacctctgtattttagcctgtctttgagatgccatagcaacgagactaggataagccatggaggaattggcagtgtgattttcagcagagttgttcatggttttgggcagctcaaactctgccacatgatagcaatggcactgagttaagtagtttataaagtgttctcgagcccgctgcaaatgatctagacgcttgctggggttgacttgtttcatggtgagggctccttgaaacgctggcaccaaaaggtacttcaggtcggtggaagcaatctcttccaaatcttcatttcggctggaagagcaaaaaggaggcagtgaagcctgactaggcattcaaattgtggcccttgctttctgggggacggagtgggaggctgggctgggagtggaccagagggaggaggcacggggaacagcggccagtttcactcaatgaaagtggctgagggctcacacccaatgcctatgcaatcagcagacgctaggaagcagagtcgtaagatatcaaccatctgggaagagaggtggggaatgtaaacaatgtacacaagatcgcagtggtaagtaggaacgaaacgttctcaccactaaaggtcccctccactcaggcgcaatggctccacccttggtaaccattattaccttcgttctcagccattattactatcttcccccatacctgaacaagtcgagctgcgataacatttcggcagccttctcaaggaggtccaagcccttgaacaccttctcctggactatccgggaaccggcgggttcagtcgccacttctacttcgtccagtaactgtctaccagtttcgaacagctcggggagccgcggcagctgtaactcgtcctcagcagccatcttggggagagaggaacccggaagatctcttttccggggtcaaaggcaaccttgataaagaagaattaggcgagcgcggacaaaaccggaagaagcacctcattggtccagtagcttcactgttaacaaagcatcaaaggacttccgggagccgctgttagccggccctggcaaccgtttccatagactcattttaccaggcagcccgttacaagtcgtaggcatctgttaaaagcaaacaaacaagcaaaaccctaggcgctgttttaccatgagctcctcgtcgccgacacggggctgagaagttctgtgggctctgaagcccgggtgaggcgaggctgaattcggagcgcgaggagtgcggacgagcgagtgcgttttaggagccagtctggcgcgccccttacctcgcgagtagctccctaggttgaggagtccagggactctagccgccgcaccactcccacggtttgaagatccggtcgcttgagcgcgaagtgcaagtagcgcccccctgcggtttccgtccacccaccagatggagctccgggttcctcccagccaatcctctcccgtcctcttcccccttcaccccacacacgcctacgacccgtaggccggcgtccggtggagcccccctcagcaagattggcaacctgcaactccggtcaccgcacagccggcttcccttcgtgcacttagttcctacatcaaatgttatttctgtgcaaccttccttgtctctctaccgccttccaccctgtgcccttcagccgccaagtctgggtttctcctatgcatctctatcatggcacctaccacgctgtataattgctagtgacttacaaatctctcttatcagaatgaatttgactcatctttgcaccactctggctagcctgagtactcagtatcagtcattatctgaataaaaaaaaaaagtgatcagtttggaaagcagccaacttatgcagaacagcattgttcagtaggtagttactagctacatgtggttactaagcacttgaaagtggctattttgaatcgagatgtgctgcaagtgtaaaaaacaccccagatttcaaagacatttaaaaaaaaaagaatgaaaaatgtaaatactttttacatggactacatgttgaaatgatagtcttttggatatgttggattaaatatattattagaattaattgtacttctttcttttcactttgtaaatgtgcctgccagataatttaaaactatatttgtagctcccattatatttctactggacagaactgatggaaaacataatttcaggacttcaaagaagggacgtcattgttttgaacaaagcaatataaatacatactgattaccttaggacgcagcctgaattgtcctaggagatttaagtagcaggcacactgtctacccctgaaaataaacttttaaactagtattttaaactacatatcgttgagaagaaaaaaagcttcattaaaaaacaactagagggcaatataggacagtataaaataggtgatatgttgtattgcacaggctgttggaaaagcaagaaagggcaagtcatcccatgctaggagtagttcagaaggcttcttagacatgacatgcggtcacatagaagaatgtcaaagtttaaagggaacccccaaaatcggaggaaaaacttgagaccagaaaggttaagggacttgtccagccagtttgtgacaaagtcagtgacttctgcgttcaattgtttctactccattaaccttcagttgggtaggatttagaaagatgaagacctttaatgtgggacagattgaagccccaaactagaacagtgcttcctaagagggagaggaggctgtggcacacatgtaggttgaaaaagcttcccaggtgattctaataaaccttcccttgcaacccctgctttataaactaagaaggaagtgaggctttggcgaattacctatttggtttatctggcacctctagtaaactgacctttcagggtcaggcttggcagggaatataaagaaaaagatagtacttgtggaggagacttagaaatgtagtaattgtgagagtaaagataatttgcttctctgcatttgcttggattaaaacatgtctttactgttacttaagaggaaaaaaatgtgcacagtcttaatttggtcttaaactttgtaagtcattttttatggctttcaaaattagtctttttttttttttttttttgagacagggtctcactctgccacccaggctggagtgctggaatgcattggcacgatcttagctcactgcaaactccgcctcctggactcaagtgatcctctaccctcaagccccccaattagctgggactacaggtgcaagtcaccactcctggctaatttttgtatttttttgtagaggcggggtttcgccatgttgcccaggctgatctcaaactcctgaggtcaagtgatccaccc

SEQ ID NO: 1563745 - DNA, 4001 bp, Homo sapiens
acttgatcccttggatatccttcccttccatagaatgctttagatccaatattactctcattcttgtctcctacccctaaaagctcaataccccagtgtcaagcatgtgttagaaaatcaagctgcttgagttaatttacataaggtctaaatgattctttcgttgcccttaacttctaaacagttttgttgattgcctctaagggaaatggaattgtttgaatctcaggaaatacggcaaagatatttgagttcagggaggctttccattctccctgaccaaagtcattatttaccataggccttgcatatacacaaggtagactcttgagctttcatgcctctctccacctccccccacagtaacctttcaccaagggaaggtatgtcccagccacgcaaactcaagctaattctcttccaccaactttctactgggagtctgaagtcctggctgactccagctgttattaaatcttagctcagaagagtggggaagaggcagctcccagaatagagaaaggaactgattttgcttttccagactgaccttggacctcagcctcaaacttgccccagtgctaacactgggtaggatggaggagcaggaagaggaggatatttcgtgttcaaaatatctggactgtagggaacaagtggacagtgagaaatccaaggaagcataggtccattgtacatttttcactttgtatcaaaggattttcagattacccactctgaattttccttatctgtaaagtggaggagtaatatcgacctaacattattgttgtgttgggttagagataatacatgtacagtgccaggcacatagtgaacattacattttaaaaagatgcttattttttcttcttttcaaagggggcatccaactggtgtagggccctaaagatgccctttccatctcagttcctacagtcccttgctcccactcctctcagggccaggccaaagcttggatgctaccctgttgctttgttaccctggggctttgggccaggagtttttgggggaagccaggttccactgccaagggagaggttcaacctgggattacacccaggaaatgccatctgaggtttcagccttgccacttggacccctaaaccaggatctttgcctactgggggattgaggggagtcagggaagctgggctttttggcatggctgacccctcctcaatcactaaggaaattgtaccatttatattcagcccagatgatgaatcttataccgggggaacatgagaacagccccaagccttgggttagttggccacgcccattttggcctttcaccccacccccacccccaactttggctgcctagccgttttacccttccctcctactccaccccaagcactttccccacccttaggcagcgccgcagtgcttttgagggtgacatatctgaaatgtctaatggctcgccccctgcatagctttgagggctccaggaatcaaaggggttgggctcggcggggtgccgggtacatgctcagctgagggtttggagggaagactgagaaggaaaaggggagatatctacagtgcccagagattctcaccgaggcaggtctgggatccgggaaggaaaggagaaaggcaggaatgaagcgggtggggggacagactggggagcagtttgatttacggcaattaattacagcaaggagactctttcggggttttgtttaggatccggtggccagtatttaatattcagccactgaactatgcgctcatttgtaggtacttacggtagttgaaggcccgctccgatgttggagattctccagtgagctcctccagatgcagcaaactgcccggcatgagaagagctgtctaaggacagcctcttcggctctgagccccgccttcctctctcccccgcccgcctgccggcccgccccaacctcctcccctccctgcgccgggctcggggagcccacctacaccaactctgcctggcacctgcagtcctctgacgacggggatttctacgcccctcccagctccccgcctctctccggactccctgcagaggttgctggagccaaattcaggcccctgccccctcgcctgtctctcagagtttcactgggtcactgtattgtgggggggagaaggccagctctcaagaagatttgtagatccttctctccagctccccaatacctttatcgggatctcagatcttcccctgcccattttaacgccccatttatgcataaacatcaccacagtttaagtgcctactgtgtgcccctgggccctgggatccattatttctcatcttcagagcaactctgcaaaataagtgttactcccctcagttttacagatgaggaaacggaaactcagagagggttaagtaacttggacagccttcaaagtccatcttggggtaaaagcccaggctttagagacatacaaatgtatattttagtccacattttacattcaatagttgtgtgacctcaagcaagtgagtaaactctctgagtcccaggttccccaacagtaaagtaaaaaacaaacaaacaaacaaaaaacagcagaacctatttcacaaggcctcaatgggatgatgtaagtaaaactaacagcacaataggcctagcatgtagtaggtgctcaataaatggtagtggttgctgctgctaccactactactactactattaatctgtaagcccttccccaaatgtcttagagtaacatgattttaataatatagagcaacctttcacaaatgttgattatgaaagactttttataatgataatgtatgaataagacactaatcaaagctcctgatatataacatatgatgagattaaagtatagcatccaatgggctcacagactaattgataagaaatatcaacatgatagactaattggctaaaaaatagacaaatttttctttatgtacatttccttttttttaagacagtctcactctgtcgcccaggctggcgtgcagtggtgcgatcttggctcactgcaacctccacctcccaggttcaagcaattctcctgcttcagcctcccgagtagctaggattataggcgcgcaccaccacacccagctagtttttgtattttttagtagagacggggtcccaccatgttggccaagctggtctggaggctcagcctcctaaactgctgggattacaggcgtgagctaccatgcccagccttttatgtacattttctacctgcataaaagatttcaaattatctaatgaaaaacactttaattcaagaacaaactgtgtaaaaataaagtaacagctcttttacagccaaattgattatcatatcttcatgcatcaggtgatatcaattgtggcttccattataaactatagattattgtgtaatgaatagaataggcatatgaataaaaagatgtgtttctgggcaagttatttagcctccaagcctcagttttcttatttgtaaaatggggataataattgcacttactacaatgaagggtttggggtaggattgaatggaaaccttcctgtaagccaccacatagcacctaggacacagcaagcagccattgattcaacacaaatgttaagtactttctttgtgtcagggattgttctagatgctgacagttcagaaaggatgacagtttctcttcttaaggagtttgtagtctaaggataaatcatactagagaagaagtaggaggcagccagagaaggaggagccttgagaatcaaagaggattgcaatagaaaagatcatcaagtaagtcatgatagtatgtgtttggataattgcaagcactttgcttgtactgtgtgcctaaactagggagcagtagcagagaaggaggggagggtcagagttcccaaaacattgagaaggcaacattagacaaacttgatggttgtttggaagacaacagtaatagttattatctgtcagggtgaaaacatccatgccaa

SEQ ID NO: 1563746 - DNA, 4001 bp, Homo sapiens
tatatatatacgtatgtttatatacgtatatatatgtgtatatacatgtatatatatgtgtgtatatatacgtatatatgtgtgtatatatatacgtatatatgtgtgtgtgtgtgtatatatatatatagagagagagagagagtcctccaacaacttaagagagggggcattactaccatccccattttactgatgaacaaactgaggcttagagaggttatataatttgcccaaagtcaaaagatattaaatattagagcccaaattagaatccatgtttaactccaaggcctatggatctaaaacaatgatttaaactcccagaggtacccttcactccctcttcaccctcccttacccctctcacttgatcccttggatatccttcccttccatagaatgctttagatccaatattactctcattcttgtctcctacccctaaaagctcaataccccagtgtcaagcatgtgttagaaaatcaagctgcttgagttaatttacataaggtctaaatgattctttcgttgcccttaacttctaaacagttttgttgattgcctctaagggaaatggaattgtttgaatctcaggaaatacggcaaagatatttgagttcagggaggctttccattctccctgaccaaagtcattatttaccataggccttgcatatacacaaggtagactcttgagctttcatgcctctctccacctccccccacagtaacctttcaccaagggaaggtatgtcccagccacgcaaactcaagctaattctcttccaccaactttctactgggagtctgaagtcctggctgactccagctgttattaaatcttagctcagaagagtggggaagaggcagctcccagaatagagaaaggaactgattttgcttttccagactgaccttggacctcagcctcaaacttgccccagtgctaacactgggtaggatggaggagcaggaagaggaggatatttcgtgttcaaaatatctggactgtagggaacaagtggacagtgagaaatccaaggaagcataggtccattgtacatttttcactttgtatcaaaggattttcagattacccactctgaattttccttatctgtaaagtggaggagtaatatcgacctaacattattgttgtgttgggttagagataatacatgtacagtgccaggcacatagtgaacattacattttaaaaagatgcttattttttcttcttttcaaagggggcatccaactggtgtagggccctaaagatgccctttccatctcagttcctacagtcccttgctcccactcctctcagggccaggccaaagcttggatgctaccctgttgctttgttaccctggggctttgggccaggagtttttgggggaagccaggttccactgccaagggagaggttcaacctgggattacacccaggaaatgccatctgaggtttcagccttgccacttggacccctaaaccaggatctttgcctactgggggattgaggggagtcagggaagctgggctttttggcatggctgacccctcctcaatcactaaggaaattgtaccatttatattcagcccagatgatgaatcttataccgggggaacatgagaacagccccaagccttgggttagttggccacgcccattttggcctttcaccccacccccacccccaactttggctgcctagccgttttacccttccctcctactccaccccaagcactttccccacccttaggcagcgccgcagtgcttttgagggtgacatatctgaaatgtctaatggctcgccccctgcatagctttgagggctccaggaatcaaaggggttgggctcggcggggtgccgggtacatgctcagctgagggtttggagggaagactgagaaggaaaaggggagatatctacagtgcccagagattctcaccgaggcaggtctgggatccgggaaggaaaggagaaaggcaggaatgaagcgggtggggggacagactggggagcagtttgatttacggcaattaattacagcaaggagactctttcggggttttgtttaggatccggtggccagtatttaatattcagccactgaactatgcgctcatttgtaggtacttacggtagttgaaggcccgctccgatgttggagattctccagtgagctcctccagatgcagcaaactgcccggcatgagaagagctgtctaaggacagcctcttcggctctgagccccgccttcctctctcccccgcccgcctgccggcccgccccaacctcctcccctccctgcgccgggctcggggagcccacctacaccaactctgcctggcacctgcagtcctctgacgacggggatttctacgcccctcccagctccccgcctctctccggactccctgcagaggttgctggagccaaattcaggcccctgccccctcgcctgtctctcagagtttcactgggtcactgtattgtgggggggagaaggccagctctcaagaagatttgtagatccttctctccagctccccaatacctttatcgggatctcagatcttcccctgcccattttaacgccccatttatgcataaacatcaccacagtttaagtgcctactgtgtgcccctgggccctgggatccattatttctcatcttcagagcaactctgcaaaataagtgttactcccctcagttttacagatgaggaaacggaaactcagagagggttaagtaacttggacagccttcaaagtccatcttggggtaaaagcccaggctttagagacatacaaatgtatattttagtccacattttacattcaatagttgtgtgacctcaagcaagtgagtaaactctctgagtcccaggttccccaacagtaaagtaaaaaacaaacaaacaaacaaaaaacagcagaacctatttcacaaggcctcaatgggatgatgtaagtaaaactaacagcacaataggcctagcatgtagtaggtgctcaataaatggtagtggttgctgctgctaccactactactactactattaatctgtaagcccttccccaaatgtcttagagtaacatgattttaataatatagagcaacctttcacaaatgttgattatgaaagactttttataatgataatgtatgaataagacactaatcaaagctcctgatatataacatatgatgagattaaagtatagcatccaatgggctcacagactaattgataagaaatatcaacatgatagactaattggctaaaaaatagacaaatttttctttatgtacatttccttttttttaagacagtctcactctgtcgcccaggctggcgtgcagtggtgcgatcttggctcactgcaacctccacctcccaggttcaagcaattctcctgcttcagcctcccgagtagctaggattataggcgcgcaccaccacacccagctagtttttgtattttttagtagagacggggtcccaccatgttggccaagctggtctggaggctcagcctcctaaactgctgggattacaggcgtgagctaccatgcccagccttttatgtacattttctacctgcataaaagatttcaaattatctaatgaaaaacactttaattcaagaacaaactgtgtaaaaataaagtaacagctcttttacagccaaattgattatcatatcttcatgcatcaggtgatatcaattgtggcttccattataaactatagattattgtgtaatgaatagaataggcatatgaataaaaagatgtgtttctgggcaagttatttagcctccaagcctcagttttcttatttgtaaaatggggataataattgcacttactacaatgaagggtttggggtaggattgaatggaaaccttcctgtaagccaccacatagcacctaggacacagcaagcagccattgattcaacacaaatgttaagtactttc

SEQ ID NO: 1563747 - DNA, 4001 bp, Homo sapiens
ggttgcagtgagctgagatcgcgccactgcactccagcctggcgacagagcgagactctgtctcaaaacaaaacaaaacaaaaaggccgggcgcagtggctcacgtctgtaatcccagcactttgggaggctgaagcgggtggatcatgaggtcaggagattgagaccatcctggctaacatggtgaaatcccgtctctactaaataaaaaattagccaggcctggtgtgggcacctgtagtccagctactcaggaggctgaggcaggagaaaggcgtgaactcgggaggcggagcttgcagtgagcagaaatcgcaacactgcattccagcctgggtgacagagtgagactccatctcaaaaaaaaaaaaaaaataacaaaaattagttaggtgtagtggcacccatctgtaatcccagctacttgggaggctgaggcaggaaaatcgcttgaacccaggaggtggaggttgcagtgagctgagatggcaccattgcactccatcctgggtgacggagtgagtgagactccatctcaaaaaaataaaaataaaaagagccatacctgcatcagccacaaaccttaacagccaggactctgaccgttaaacccttagtccaagaagcagactggaggagaaggtaactgaggttgctttctccatccccaccccatgctgtcacaaggcactgcaacagagcaacccaggccacaatgatagcttatgactcctggccttcagctcttattagacacctcattgagagcatccaagcttgctgtgtgagttggagcaagtgtcttccttttcctgaacctcagcatttcgtgtagcaaatgacagcttttgaaacgagggcccagggtccttaggcttttccaagctgattttgtcatttcactgcctccgcctgtggccagcttcgggttgggcaactttgttttgttgaaatcagtagggttcccctttgctctcctctgttctgagagtgacaacctgaggctttcaaagcagaaataggaagtgccagctccagcactgtgggtaggggacaaggggtcctctctctgaagagcctcgtggtttgttttttcctcttcctgctgtgggggagatgggaggtggcgtgctcaggcagcacctggaacagctccggctcccaggcttcttccacgcctgatgcctcactcggtgcgggaggtaggcagggtggcacttgagggcacgtgatcctagaatctgctgttccaggaaagcagcccattctccgttcattgagcagacagcgattgggtacttctgggccacagcagccagtccctgccctcctcatgggacctatgtgctattgcggccagggaaccacggcaagtaagcagaccagcaagagttcaggctgacgtgtgtttcagaagatacacatgggccctgtgtccccagtcccccaaagcgcatagatcccacaaagagggccgggagagcacaaacacagaaggaagagcaaatgcccggagccccgagttgggaacaagctcagcatgacctagaaactgaaagcaggcaagtggctggcagacccacagcctgggcaagcaggacaccctggggcaggctggacccacgtggccttcctctgtcccttcctcctccctggccagcttacctcacacttgcccacacacccagcttccttcctgggggccctgatggcacctcagagttaccaagtgggccacttcctgccttctcaggactcccacccctaccagaaagggagccgaggtacttactgcccccttccagaaagctctggccttgtagactagtgtgcgcctggaacagcatctttccccacctgatgggacctcgatgatgctggagagcttcacagggagtgaggggaagagactgggattgatagtctgcggggtcctcacttctctgggccttagtttccccacctggatcacaagggccatgggcttgatgggcgttcaggacgcatcccaatgatgggcctgtgggagggatgacccagcggcccccgcctcccctttcctcagaacatttctgggctgacttccccattggtctgataagattcttgctgtgtcatgatgatgttggcactcccccaaagccccggtgactcatgagcccccgggtatagcagggaggcccttttgttggtttttcagctgaactaactcagcagcccccaggttctctggccccagtggccaggaaccagctgggcccctgccaaggcccagggctccacccagggagtctgggcaggtccttaaccccagtgacccttggggatgggatggcccacccccgctggccctccagcaggcatcgtgctctaccatgaaaccctcatgccaagacaagggctgcagcgatttcggtttataaaacagacaggtcatggcccaggtccctttgccctggcctagccagatgttggtggctagagatcttcatcatgccctgcttctactaagtcaccttgtgtccttgggcagatccctcccctgctgtggtcctcaggaaagaggagggcgtggggaagatgagaagctcccaactgcttttcactaaggaccccttgaattgcccccacccacatggcacgagtagactcttgaccaagctgtcaggtttcccgatgtcttcccatgtttgttcctccagaaagtcccactagagcatcgcagccagctgggagggcagggctacccctgagtcctgaggagagcagctcagtccggctcagctcagcttagctccctgtcaccatgggagagagcggcctgccttaccccacccctactgtccgtcttacctcacctcgcctctcaggtgacttggagcccagcagacggtcggtcggttgcagggcctgagctgaaacaaggtgagccggttcaatctctagttaatcccaaagggagcagcaggaacaaacggcctggagcgtggggttgctgtgactcagcagaccagtcccctgccaccagtacctttctggagtctgtcccgatgcctcccagtcttccggaatttggtcatgagcaaacatgacctgctttgagtgaggcttagaggtatttgcaggctgtggttctttccgtttatttcagggtccagttagttcccagtaagctgaccctttctgtgtggggccagccgtgagttgatgtgacatgggcaacgttcccctccccagccccactgatggcaggtgctgtgaggagctgagtagaggagctcctaccccagggcgaggggttgtctgctggactttgaagggtgcagcagtgagaggtccgtgtcgctgtagtcctggcaccgagctcacctgaggagcatcagaagtggagcagggcccctgaagagcgcaagcacacaaggcacccacaccatagcagttgccctcctggaagccctgtggtggcttcctaactgcctggctctgggtgagggcgtttgacctggtggcatggcccccattctgtaatggtttgtagaaatggacccatccatggttgcagtgcctgattgcttcgaagagcatgtgttttttttttttttttttcgtgacatggagtcttgctgtcacccaggctggagtttggtggcgcaatcttggctcactgcaacctccgtctcctggattcaagtgattctcctgccttagcctcctgagtagctgggattccaggtgcctgccaccacatccagctaatttttgttttttcttttttttgagatggagtcttgctctttcaccaggctggagtacagtggcgcaatcttggctcactgcaatctccacctgcgaggttcaagcaattcccctgcctcagcctcccgagtagctgggactacaggcgcgcaccaccacatccagctaattttttgtattttagtagaaacggggtctcaccatgttggccaggatggtctcaatctcctgacctcgtgatccac

SEQ ID NO: 1563748 - DNA, 4001 bp, Homo sapiens
gtgagccaagatcgtgccactgcactccattctgggcgacagagtgagactgggtctcaaaaaaagaggccgggcgcggtggctcatgcctgtaatcccagcactttgggaggccgaggcgggcggatgacaaggtcaagagatcaagaccatcctggccaacatgatgaaaccccatctctactaaaaatacaaaaattagctgggcgtggtggtgcacaactgtagtcccagcggctgaggcagaagaatcgcttgaatccaggaggcggaagttgcagtgggtggagatcacaccactgcactccagcctggtgacagagcgagattctgtctcaaaaaaaaaaaaaaaagaaagaaagaaagaaaaagaaataaaataataatgggagaggattgcgagggatataaacaaaattagtcagaagttgataccttcaattgttgaagttggtagctgtgaatgtaagatttactatactggccgagcgcagtggctcacacctgtaatcccagcactttgggagtctgaggcaggcagatcacctgaggtcaggagttcaagaccagactggccaacatatagtgaaaccccgtctctactaaaaatacaaaaattagctgggcgtagtggcgcacgcctgcagtcccagctacctgggaagctgaggcaggagaatcgcttgaacccaggaggaggaggttagagtgagctgagatcatgccactgcactccagcctgggcgacagagcgagactccatctctcaaaaacaaacaaaccaaaaagatttactatactcatttttctactttcgtacatttttgaaatttccaataataaaatgctcaaagcactgtctctgagctggattactgcaattacctcttaccacgccacccttcttttacccttgcccactatggtctgttctccccaccactgctagaacgatcagtgtaagacgtaattccgatcacattcctcctctactgagaaccctaccatggatccccgttgccttctgcgtaaaagccaatctccctacaacggcctacaaggccctgtaccatcgggttccccatcccttcctctccaactgtgctcccctccctcactctgctccagctatagtgacctccgtgctattcctctaatgtgccaggagagcccattcattctcagatcacagaaacagtatgacgataggcagatgttgtcttgcaaaacgagcaaacaggcatatgaaatcagatacctagctgccaaactatatgtgaggcatttccgaagaatttaacgacctcgatagagcgcagtcaagtttggtgaacagaatatgtctctgaactagaggagtcctcacacaaggagtagggtcagaccccgcagtggaggaggagggaggagtagaaacagtccagctcgccgcccaagtaacctgggtcctgaatcggcccgccttggccagtgctccagaagcgcggagcaggaacgggctggggcccaaaaaagaggggggagcctgaacgtccgggggaagtttcggaggcggcggaacgcccacggatggaaccctgtctttggggaaaaggaccacacctgtcagcagagtccgtcagacgtgagaagggtgggagcggcggactgtgaacgctggtagggccccggcgctccgagaaagtcccagtttcgcggtcgcccttccctaccacgcttccggcttccggtgtcatagctgtgggatccggaagtaaaaacacaagccccgcccccgagaactcgggaagccggcgagaagtgtgaggccgcggtagggccgcatcccgctccggagagaagtctgagtccgccaggctctgcaggcccgcggaagctcggtaatgataagcacgccggccactttgcagggcgtcaccgcctacacgccccctcgtctctcggacggcggcgtctagcctcggggcgctcggccgccccgccctctccgggggaggaatcaagaagagactgcccaatagggccggcttgacccgcgaacaggcgagggttcccgggggagtggcgcggcagaaggccccgcccaggagccgagggacagcccagaggaggcgtggccacgctgccggcggaagtggagccctccgcgagcgcgcgaggccgccggggcaggcggggaaaccggacagtaggggcggggccgggccggcgatggggatgcgggagcactacgcggagctgcacccgtgcccgccggaattggggatgcagagcagcggcagcgggtatggcaggcagccggcgggccggcctccagcgcaggtgcccgagaggcaggggctggcctgggatgcgcgcgcacctgccctcgccccgccccgcccgcacgaggggtggtggccgaggccccgccccgcacgcctcgcctgaggcgggtccgctcagcccaggcgcccgcccccgcccccgccgattaaatgggccggcggggctcagcccccggaaacggtcgtacacttcggggctgcgagcgcggagggcgacgacgacgaagcgcaggtaaccggccgggcgggcgccgcgcaggcggaggagcgtactgtcccgcgctgcgccgcgcggcggtaaaatacacgctgtttgttgtgcttgagaaccgagcagaatcgagagggtcttaaccaatccctttataccccgcacctcctctcttgagcccctgagaccccgagagcgaaggggacttgccgaccggggtcacccagcttggcaaggggagggctggagctgaactccagcatctgcaccatctcccatgctccaggtcattgtggagttcccgctacagtcgggaatgagatggtcctgggcacgcagttccatgccccacaaggattttactcggttgtccagaattgatgctgtagtcggaatacaccaatgctttgagtaattttgtaatgtacaccctgaatgaaggctgcctaggagagagtggctggagcccagagccagcagtttctaacccatcaaccactccccaatgcccagccgttcacaaggagtgatttgggcaatcaggtgtcaccctggtgtgagaccccagaggaactctcaagaaaggggctaacttctcaatgctctcctgttcttctgccttgttaacgagcctttcttccaccagacagcgtcatggcagagcaggtggccctgagccggacccaggtgtgcgggatcctgcgggaagagcttttccagggcgatgccttccatcagtcggatacacacatattcatcatcatgggtgcatcggtgagtatctcccaggccccaatcttaaaagccaggaagtgcctgctccatgcctcagcttttccaactaattgttgcagggccccacaggctctgctaagttgagctcctcctcccgctcctgctagtgcgccaggatcatcccggctctacctggtgtgcatatgcacttgcaagacttttttttttttttttttttggagacggagttttgctctggtcgcccaggatggggtgcagtggcgccatcttggctcactgcaacctcggcctcctgggttcaagcgattctcctgcctcagccccccaagtagctgagattacaggcatgcaccaccacacccggctaatttttgtattgttagtagagacggagtttcaccatgttgaccaggctggtctcaaactcctgacctcaagtgatccgcccgcctcggcctcccaaagtgctgggatgacaggcatgagccaccacgcccggctgcaggacgtttctgaaccctgtgcctagccgctgaatgtagcccttaatcctggagttgcaggctctttagggactgtctagatggacttcttggggaaaacagggaatgctattcattctgtagttttttcagacctgttcatgccttaacaaatgagttccaaaggcaggatctgaggcctgatctctgcctcttcactaacac

SEQ ID NO: 1563749 - DNA, 4001 bp, Homo sapiens
aagattaaacattgtatgagtctatttatataagatgtctacaacaggcaaatccacagagacataaagtggattaaagattgctggggagtgccacttagggctgaggggaagataagctgagctaaagggtatggggtttctttgaggggtgacgaaaatgtcctgtgaatatacatacaacaaaccattgaattgtacactttaaatggatgaactgtgtgacatgctaatgatatctcaagctgttattgaaaataatagtggtggccaggcatggtggttcacacctgtaatcccagcactttgggaggtcatggcaagtggatcacttgaggtcaggaattcaagaccagcctggccaacatgacaaaaccctgtatttaccaaaaatacaaaaaaaaaaaaaatagctgggagtgatggtgcatgcctgtaatcccagctatttgggaagctgaggcaggagaatcgctcaaacctgggagatggaggttgcggtgagccaagatcgtgccactgcactccattctgggcgacagagtgagactgggtctcaaaaaaagaggccgggcgcggtggctcatgcctgtaatcccagcactttgggaggccgaggcgggcggatgacaaggtcaagagatcaagaccatcctggccaacatgatgaaaccccatctctactaaaaatacaaaaattagctgggcgtggtggtgcacaactgtagtcccagcggctgaggcagaagaatcgcttgaatccaggaggcggaagttgcagtgggtggagatcacaccactgcactccagcctggtgacagagcgagattctgtctcaaaaaaaaaaaaaaaagaaagaaagaaagaaaaagaaataaaataataatgggagaggattgcgagggatataaacaaaattagtcagaagttgataccttcaattgttgaagttggtagctgtgaatgtaagatttactatactggccgagcgcagtggctcacacctgtaatcccagcactttgggagtctgaggcaggcagatcacctgaggtcaggagttcaagaccagactggccaacatatagtgaaaccccgtctctactaaaaatacaaaaattagctgggcgtagtggcgcacgcctgcagtcccagctacctgggaagctgaggcaggagaatcgcttgaacccaggaggaggaggttagagtgagctgagatcatgccactgcactccagcctgggcgacagagcgagactccatctctcaaaaacaaacaaaccaaaaagatttactatactcatttttctactttcgtacatttttgaaatttccaataataaaatgctcaaagcactgtctctgagctggattactgcaattacctcttaccacgccacccttcttttacccttgcccactatggtctgttctccccaccactgctagaacgatcagtgtaagacgtaattccgatcacattcctcctctactgagaaccctaccatggatccccgttgccttctgcgtaaaagccaatctccctacaacggcctacaaggccctgtaccatcgggttccccatcccttcctctccaactgtgctcccctccctcactctgctccagctatagtgacctccgtgctattcctctaatgtgccaggagagcccattcattctcagatcacagaaacagtatgacgataggcagatgttgtcttgcaaaacgagcaaacaggcatatgaaatcagatacctagctgccaaactatatgtgaggcatttccgaagaatttaacgacctcgatagagcgcagtcaagtttggtgaacagaatatgtctctgaactagaggagtcctcacacaaggagtagggtcagaccccgcagtggaggaggagggaggagtagaaacagtccagctcgccgcccaagtaacctgggtcctgaatcggcccgccttggccagtgctccagaagcgcggagcaggaacgggctggggcccaaaaaagaggggggagcctgaacgtccgggggaagtttcggaggcggcggaacgcccacggatggaaccctgtctttggggaaaaggaccacacctgtcagcagagtccgtcagacgtgagaagggtgggagcggcggactgtgaacgctggtagggccccggcgctccgagaaagtcccagtttcgcggtcgcccttccctaccacgcttccggcttccggtgtcatagctgtgggatccggaagtaaaaacacaagccccgcccccgagaactcgggaagccggcgagaagtgtgaggccgcggtagggccgcatcccgctccggagagaagtctgagtccgccaggctctgcaggcccgcggaagctcggtaatgataagcacgccggccactttgcagggcgtcaccgcctacacgccccctcgtctctcggacggcggcgtctagcctcggggcgctcggccgccccgccctctccgggggaggaatcaagaagagactgcccaatagggccggcttgacccgcgaacaggcgagggttcccgggggagtggcgcggcagaaggccccgcccaggagccgagggacagcccagaggaggcgtggccacgctgccggcggaagtggagccctccgcgagcgcgcgaggccgccggggcaggcggggaaaccggacagtaggggcggggccgggccggcgatggggatgcgggagcactacgcggagctgcacccgtgcccgccggaattggggatgcagagcagcggcagcgggtatggcaggcagccggcgggccggcctccagcgcaggtgcccgagaggcaggggctggcctgggatgcgcgcgcacctgccctcgccccgccccgcccgcacgaggggtggtggccgaggccccgccccgcacgcctcgcctgaggcgggtccgctcagcccaggcgcccgcccccgcccccgccgattaaatgggccggcggggctcagcccccggaaacggtcgtacacttcggggctgcgagcgcggagggcgacgacgacgaagcgcaggtaaccggccgggcgggcgccgcgcaggcggaggagcgtactgtcccgcgctgcgccgcgcggcggtaaaatacacgctgtttgttgtgcttgagaaccgagcagaatcgagagggtcttaaccaatccctttataccccgcacctcctctcttgagcccctgagaccccgagagcgaaggggacttgccgaccggggtcacccagcttggcaaggggagggctggagctgaactccagcatctgcaccatctcccatgctccaggtcattgtggagttcccgctacagtcgggaatgagatggtcctgggcacgcagttccatgccccacaaggattttactcggttgtccagaattgatgctgtagtcggaatacaccaatgctttgagtaattttgtaatgtacaccctgaatgaaggctgcctaggagagagtggctggagcccagagccagcagtttctaacccatcaaccactccccaatgcccagccgttcacaaggagtgatttgggcaatcaggtgtcaccctggtgtgagaccccagaggaactctcaagaaaggggctaacttctcaatgctctcctgttcttctgccttgttaacgagcctttcttccaccagacagcgtcatggcagagcaggtggccctgagccggacccaggtgtgcgggatcctgcgggaagagcttttccagggcgatgccttccatcagtcggatacacacatattcatcatcatgggtgcatcggtgagtatctcccaggccccaatcttaaaagccaggaagtgcctgctccatgcctcagcttttccaactaattgttgcagggccccacaggctctgctaagttgagctcctcctcccgctcctgctagtgcgccaggatcatcccggctctacctggtgtgcatatgcacttgcaagactttttttttt

SEQ ID NO: 1563750 - DNA, 4001 bp, Homo sapiens
agctagtaatctaatcacttttataaacactctgaggattagagctggaggagctcttagaatttatgcagttcaacctcctcatttcacagatgagaaaactaactgcagcacaaaagagaggaaatgaccagcccagagtcccacaggtggtaaatatcagaaccactaaaactcaagtctcactggaaacatctaattttttcccaccatacctcaatgcaattctatcaatacttttaatggggaaagaagtttgttttctaaataagcaagctaacgacaaaccattgtgacaggactgatgaagttgggagttgccagtattctctagatggccagctgttgtttcaggtgtgtgtgggagtgagtctgtaggagggagggtgctggagtggcactgtgaaaatcaggagactaatgagacgggtaactttagacaagttccttcccttctctggactgcaatgtccccatatgattacggaaatcaggtgtacccaactaaactagaggcccttttggggcaagaattttgctatacactctcaggttctaagtcaacctagagggcctgactcagtactaaataaggcagacacctgaataattattgactgacaagcttcaagtctccctcaggtctctactcaaatgccacctttcagcaacatttgttttcttctcgatccaccctttttacaatggcaaaccccttcccacctgctctgtttttctctacttaacaccctcagacatatcatatattttacccccaccccccgatatgtctgagggcaggcacctcatctgttttgctcactgctgcatcctcagcccctaaacactgcctggcagcatgtattttattgactgaatccatagagggcattaaggtttcctaatcaacatttcaacttggatttcaaagcacattggtaaaaatgcaataagcatatataagtgtttgtgtcaatgtgataataaaacctatacagtttggggctttcattgtcaccaaaaacgtccagaaggccattccttccaggagctgctcctaaggaagtcattaactcccaatttttcacaactgccaggttgattaactagaagttaccaaacagggtgagggatatacacaactctctgaagtatctttgcaacttttccataaatctacaattaccctaaaatataaggtttattaaagagagtggggtggggggagcatctgccgggatgctattctggatttcccaaaggatttcttcgacgccagaggaggtcatgagcgtcacgtcctttttcaacaaggactgagatgtttagaggttcccttcaacttccactcgcaagagccacccttagacagtgaggattggcgcggcctcgggcaaagagccccggcgcgttctcagctcgcctggacttcggtcgtggtccccgccggctctggcgcctcatttcctcccgggctcacaggcgacattccgggcgctgacccacggccctctgacgccgtgggcatgtttcgggccccccgcccccgcacgcctggacgccagcctcctgggctcttcccactacaagtcgcagccctcttacttcgctgccgccacctccgccgcacccggagttcgggaaaaccccgcagctcccgggtcccacctcgaaccggccccagtaccgggccccagagatcccgcgcgggaagccgcagccgccgagcgcggggcctcgcgagggcagcccccagcacccaccccagcttcggccctccgcccggcgttgacctccggggcctttcagccgtgaccctcaccgccctcagccctccggccgcccctcgggccccgagggtcgcactcacccgtaggcgcggcgcccccgcccccgcccccgccgccggcgcagagcagcagcgcccacagcccgcagagccgcgccggccactccatgcagcctctcgcctcggagcccggccgggctggagccttggcagtccccgcctccttcgctccctcttccacttcccggctccgccgccctggaggctgggggccggcgcagacgggaagggccgccccgcccaccggcctcaggtaacctgagccggcgagagcggccggaggaggcggggcggggcgccggcggctctggcggctctggcggctcctacggctcccaaggctggacacctggcccacccgcagctcccgcgtccggtctctgaccgaacaaaacttcttccaccacgtcgccgcccactccgggcgctgcctgggcctcctccctccgcgtggcggagccggcgtcgccgctgccagcacacttgcggggcctcggaggtgctaggggctgtgccctgctggacaccaggacagagtcatctgcggaaaagagccttggcctgggagtctggagacctggcttccagcccttgacctctgagcccttgtttgctagcgctgactccagggttagtaataccagccctacttcactgggtggagttggggacactggcagtactgtgctttgtgaaaaggacaaagggcatatttgaaagctggcaatacataatgttgattttaaaaggaacattccaaacatgagggaggataccatacgtgcattttttaaagcacacgacaaactttctacatatttttcaaagggatgggaggtgaatcggaagaatacacattgatacttgggcgcctatgagggtcagtgaggctgggaggaaggaaaacaagagtccttaggcgtttcctgttgctgctgtcaaaaatgaccacaaatttagtgatttaacagttttattttattacagttctggaggtcagaagtgacactgagcttaaatcaaggtgtgggcagagatgtattccttctggatattctaggggagaatctgtgtctttgacttttccagcttctagaggctacccacattccttggcttgttgcggaactactcagacctctgcttcccttgtcgtatctgactctgaccctcttacttccccttttcccttataaatacccttgtgattagattaggtccaccagataattcataataatctccccatctcaaaatccttgatttaatcataactgaaaagtcatttttgctatgtaagttaacatattcacaggtgttggggatcacgatatggaatcatgggagggggacattattctatcaccttctcccaaaaaagaatcatgtctaggtggatgatgagacccataatgaggtgtattttggccgaattaagccaatgcatatacctgaaaacagttacaaaaagtatagcaataaaaatgctgataatatacctagtctagaccccacccaaagggcacagggttgtttaacctattcacaacaaaggttccactcttggaattaaggctctcaaactcaataaatatttatgaaattgttccaggaactgttgaagacactcaccaaaagcaagctctgctaacagaaagctgcagtcagtctgaggggcaatgataagggcaagaacaaggaattatgggatacaaaaagggtaccttttgggagggaaggagcaagggaagcttccaggaggagggcctgcctgtgctgaatctcaggatgttgattcttttggctaacggttcagaataaattccagaatccaggcatggtggcatgcacctgtaatcccagctattctggaggctgaggtggaaggatcacctgagcccaggagttcaaaaccagcctgggtctgtaacagagtgagaccccgttctcaaaaaaaaaaaaaataaatcctggcttgcatgtgttatcgaacaaaataatgtttatgaaaacagtttgtaaagtatcaaggcctgtagaactgagagatagtatcattatttctaaatccctcccacaaataggtcagccactgtgtatcccaaggcctttcctccaccaccacggacatatacacttgttgacatttgct

SEQ ID NO: 1563751 - DNA, 4001 bp, Homo sapiens
tacggcaaatgcatgctttacttaccttccatgtttcactaccaatgtttcggtattttagttcatattccactgtgcattccttaaaatgatccagagacagtgggggttgccattgcaaatagagataacctaagtatccgggatccactatctcaaaatcctgaggagggttaactgaaataaatcaataaaacacttttattttttctgtattttatgacaaatattgctaaatctagatggcttccaaatgtgcaccaattgattaacagataaacaaaatgtgctacatgcatacaatcaaatattattcagccataaaaagacatgaagtactgattcatgctacaacatggatgaaccttgagaacattatactaactgaaagaagccagacacaaaagaccacatattgacatagttccatttctatgaaatttcaaaatagacaaattcatagagagagaaagtagattcgtggttggtaggggctggagggagaaacaatgcagggtgactgcttaatgggtttaggggctgttttacgggtgatgcaactattctggactttgatagtggtgattgttgcacaactttgtgaatatactaaaaaccaacgtatagtaaagagttttactatacatgtatagttttaaagaatatagttttgtataaagagttagttttgtgtaaattatatctcagtaaggctgttaaaaaaatctagattactgctatatagttgttccttctttgagaaatcacatatgcaaaatgtgactttgcctcactaggtattaatttttagagaagcaaaaaattcaatgtggctttatctctgtgctcatgtacgccagaatttggtctaagatgggaacattttattacaaaaatctgtctaacaataacaataacaaataagaacaacaaataataacaaataataactaacatatcactataatataaatatatgtatttaattatattaattataatataatatataatataataatatactataaataattttaattaattaataataaaacattaacattatattaaataatataatataattgaaaaattaaataattctaattatttttaaattttacgttaaatttctgtacctttttaatgtatctaattgtcataaaagctaaggatagtagctaaggatagtaattaaggaactgttccagttagtttagtaccaggcaatgaggtttcagatacttaatctgttaaaaaagactatacaaaaaggtatggagagtgtttttaatttggcatttatcgcacaaaatgtgtgtcaacatcagttaccttatacaagaaagtgactagtaagaacatagctttttttcatgaacttcctgaaatagtttcaataacaattcatctactagttagttatgcacttccataaggcaggtcaaaaagacagttaattttccattaaaatccatttaattttacttttcctaatttaaaaactattccattaaaatccatttaccttttatctcggtgtctgaagatgaagtacagccaaatgttgtgcttatcagaaaggtatataagcatccgatagccaagcaaacgaaagccatttctccgagatttaaaaccttgatattgcctctctatgaaggaaaaatataacattttaactttatcttacatcaaataatcaaactaaacgtgattaaaaatactttggaaagctctctgtgtgcttctctaccaagaactgggaaaactgtgtccacctcagaccatggaaacagaaataatcaagttaggaaccaatataattggaaagaaaggattctagtctcatcctgcttacaagaataaaaacaaagctaagcaaaaacccttgtagctcctcacctccccgccgacaggcacacttctgaccaggttatggcgacttcaaatagccttcatccggaagaccgttagactcacgagagtgttcttactggttcacaatggagttatgatatcatccatctccatagcaaccgtctcccctagcaacacataaaacacagtcaaatactcttttctgaggggaaaaaaagaaaaaagaaaaagaaaaaagtatttgaaagttatttcggccgggcatggtggctcatgcctgtaatcccagcactttcggaggctgaggcgggtggatcacctgaagtcaggagtttgagacagcctggccaacatggtgaaatcctttctctactaaaaatgcacaattagccaggcatggtggcgggcgcctgtaatcccagctattcggaaggccgaggcaggagaatggcttgaacccgggaggcggagattgcagtgagccaagatcccaccattgcactccagcctgggcaatagagcgagactgtctctaaataaataaataaaataaaataaaataaaatagaaagttatttgaccactgagaaagctcagaacctaaaccgaagcctcagagagttcaaaactttgctctgtttcctcataaatatttctttttttagtttaaaaaaagtgtttatttagctctttcgccccctgctggacgattgactttcttctttgctccttttttcttttaattacttcttttaattaaaattttttatttccatctactctcattattgttccactttttcctgtgtttcctttattagtaaatggcatcgccatccttccagttgcccaaaccagaaacctgggagtcttcctcaactcctctcccatctaatctctccattaccactaccacttcctaaatggaggatcttagcagggatctccttattcagtctttcctgcctctgatccattttccacaccatatacagcaagagtgacctttctaaagggcaaatctgaacttttcatctctttcttaaactaaaacagcatttcattgccatagaatacaatttagtcatctttctgttcttggatattggttcttgacggatatgatcaaaatttaaaggattcatgccttcaaatagctactcaattaaaaatactttgcttttcaggaaaaactactactcccaattccatacacttctcttcgaatctatattctggaaccaacaatttcacataaagtaaaggattaaaagtcactcaaaagaaaagaagggactgcccttcttttcttgtgcatagattaattcaataggacagaccctctcttccaccccaccctcttccccctacctgatccatctgtaatattgtaactttggtaagcctcaatggctactttatagaatcttaggatcaaatttttagaaccagtatgtatattacagacaaggctagtcaaattctcttttataaattgggcagtaaaactcagacttgccccacccaagattacacagcaaattagtaacaaagctggaagtagaacagagatctcatgatgcccagtcctgtgcacttccaccccattctgctgggtcccacaggcatgactcaggattatgaacgcttttcctctggaaccccagtgtttaaatcttcctttaattagcaaaccaagctgaatcaacaccatgttattttaaaaattctgcgcctcataaaatcaggagagaatgtcatttctctcactgaggcccaacaaatctctctttctccccaattcctctctctttacttgccagccaatggctgcccactaatgcatctgtaagtactaggtagatttggctaacagaaggttatggatcttccacagagctaccctcagagattaagatgaacacactggttactactgggatcagggcaataggtctgacaaagagaaaaccttccatattacctttaaggactaagggcaatcaggctgcccttacaatgctctcagagagattctaacaaaattctctctcccctatcgatctgtcctttaagatttcgtagcattatgtcatgtacagcataaatgctaagta

SEQ ID NO: 1563752 - DNA, 4001 bp, Homo sapiens
ttactcaatggggcacttctgaaacatcgcagactcattttgactctccacgggtgtggctaaaattggtcctgtccagccctaaagcttatatgatctgatgtccctccgaaactcactatgagaaaactcatgcaaaatttgccatagagatcaaggtttacaggacccttggagctaatctctctctgccctcctcctctgttagctgttacaagccttcaaaagttaacagggtgatggagcctctctctatacaatcatctcatctcactatcgttgactgaaactcgctgatgtaatgaagttacataatcaccgattatgcacgacttccatccatcttcctacatatccacatatcttctcccctcccctttggatcaatctaccaggtgagatttataacatatgtaaatgctccactctctcatcacaggcactgaatatggaactttagcattgcagtacagtgcactgaaccacgtcatcaatattgatttctttatcccatttcccaggcagaatatgcttaaacatccttagtgttctagtctctaactttttaccgaaagggtaaaatagatgtagcagacaggacacatcttcaacttaaggttaggggaagtatgtaattaattgcctgcatttcccaagctggctgcattgcaataaaaggacggtctctgctttcagaccttcgactcccctgcacgtgggtctcagcttcagctatttaggatattgggtaaataattatattattgggcaattgaacttgagaaagaaagcactgtggtgatatttaagataatgttgccttattcttctctatgttagccatcatttttagctttttcttttcttttccttttttcactctgagtgataatccagtagataaaaaagtagcccagggcgcttaataatctccagtaaccacaacctagagaacaattaacgatgattatcaccttaaagtttaagaacttgacaagtgggatgtccctggtcccattgcggctgtgaaatgcagcagaatgctgcactgagttgaaaacatatttcttttaatgcatagagagtagctcgtttcattttaaatggggctcttcactaagtgtttcttttactgctgctaccccttccagaacgcaggggccacaaatattacattcaaacaaagagtgtctacccagaattaattcaagacactcttccatatcaaaataattgggggagagagtgatactttgattttcaattgcactcagaatacgggcacacatacatatacacacacacgcacacacacatacacacacacacacacacacacacacacacacacacacacatatcaacacacccaactgcagttattccattcagtgccaataacggccacatcacagccatcaatgcgatgcagcaatcattcaagtcacccattcccattacaaatgcccaagtttgctcatgccactgatgggtttgcatatataaaatgaccttacccacaacagtcttccaaattattctcctctggatattagtcggtaaggtaattgctggtcatcacaatgcgtattcagaaaaatccacgttttactcctgtgttctttttcttgtttttgctagcaattaatattgtgaacaagattcccattcacaaatgccaagttcaccataaaagcagataattccatacagatcttccctacaagactgtctccagttagttctcaaagtgcccgattgtttgctgaagatacaatccaggtgcagagcaggaaaaaaaaaaacagactaggagaaaaatgaagaggcagatagaaaaggagagactgagagaggagagagcagaaaaagagaggggaaaataagaataattcttaaaaaataaggaaggaaaaaagccgataagtgagaagtctgcgagctctatgacaagaattggagtgttgcttgcaaatcttctgagtacatgcagcctttcaaatcctcctggtccccaagtaaaatttccagatccgggatgcagccataagaaagaatcctatgtatatttcacaagtatcccgcaataacagatccgacggggttttccttgtacagtactgctatgtgaaagcacacaacccctgctgtttgggaaggtgtctcctgggtcctagctctcctcagcagcccccaaaaatgatttttcaaaaaagagtcgggggggggggtgggaaaagcagctttgcgtttgccttgaatgatgctaatcctgagcgaaaaccacaagcaaaacacgaatagcacgagatcttgattaatagccacaatccactcaaaatatcccagggaagaaggagcgaaaacaagaaagagaaactgcaacgcataaatgattccagtgtttctacaagatcggttcatttgattgaatgcattctctggtttgctgcaagtcataaagaggatagtattactgccacccaatggatattttagtactagccaatccacagacagccaccgctttgcgagtttgagttctcagaagaccgaagtggaaggaaggtagcctgggaatcttttggaaaggaccctgggaggcttcaaataacggaaatctgttcttccaggcaaaagcagactggcaaatttggatgcttatacagtcttgccttagccaccttagaattatggttccatttctctaggaagcagaaagatacagagagtgatgcctaagccgacacactcttgataacctccttttcatctcttctctttgaagcagatttattattgcgcgcgaccctcccacccccatcactgtctccccaacgcccccattctccgtatcactttaagatggattacaagagagaaggggtgcgggggctgctccaaacaaacctcaggtgctaagatgataattgtttctaaagggcagttttgcaaaagtgcctctgtctgtattgatatgcaaactgtgagtccttcaagcagtaaccctcctcacagccgcgctttcagtttgggggaggagcaaaatcttccctaagtgagtggggcttgggagaagggtgcctgtggaaggctctctgggagtgcggggtgggggtggggagtgggaggaggagcggaggggagggtattgaagaggatcctcctcccatccaccgcgtaattgagttccctgcaaaagagttcgctgctggtttctgagatgaatttgtgatgaagaaagagggtcaaagtaggtacgggtaaatacattaggttatttgctcaatttaaggtccttgaccatttacattgggatagtataacactcacatgtgattccgtgattctcaaactttgatgtacacaccgtcacctgggtgtcttgttaaaatgcagattcggattcggtacatctggagtgaggcctgagaccctgcgtttctaataagctcgcccgtggcccataataatgttgctgggctgtggaccacatttggagtagcaagacccttaaaaaatgttaatgtttacactgcagcaacagtgtcagtttccggcagctgagtaggctggatgattaaaaggcagcgagccgcttttctagttacttctctccctctccccaccctgcaacctttcccattcaacaccggcagcccatgtacttaaaaaccttaacccattttgtaatgtatcccacaagcttttgtaatggcaggcttaaccggataaaccaaaaatagaataaataggtaaagtagccttggcccttcagaactgttttaatttggggagtaaaacacgcatcaagataaagaaaacactttaaaaattaggtaaaatgtgagctaaacgaatacaaactaagcgcgcaggtgagaataacagcaggcagggagactagacagggaggtaaaactgtatttcgaaaaaaggagcagtacactgaaatttccaacctaagcagagggaaaatgtggttaaagtcggtaggcaag

SEQ ID NO: 1563753 - DNA, 4001 bp, Homo sapiens
ctcagagaagtgtcctttcctccctccctcccttacttccttggggtctgttcccagctatgccgcatgtttaataatctacagcttgattcccctggccaggaaaagaaaggaggattccttcttggaggtctacacattcgattgaaggtagtggtggtgggcaggtcccgcttcctcattcggggacaagatactcctaaatagactccccctaaaaaaaacacctgtgataggctctagagtagctttcaactgagaagtacttttccaatacttctgtgcagtcacaacttttgtgggtggcaaggggaaaatcttgaatacttgtttactaatgtctctaagtccttgggcggcacagatggagaggggatggctgcagggaccaggagaaacccctgaagcagacatttgttataatacacatttcccttgccagggtctccttgccaaagcatttttcttaaacgtctgatggtgacagatcaagctgtttgctccaatgccaggcccagagaggcaaggcgagccactcgcgagtggctatccctactctcccactctagttttccttcacaaggagtctgaagcgcaatttggcgcgggcagatcctcacgcctgagcagcagtggggacctgggaaacccactctaggggtatcggggattcttgcgggaagaggaaagggggcgtctcgggaaccacaggggaagtaccttcaggctctcagtgcaggagcacagagatggccccagatatccagcgatctcccctgcctagtgcttggtgggaatcccaggagcggcagcgtattgctggggaacccctcgctgctccacccaggagccgccttgagcctcttcccagctccagttgctctcccagctgcggcagaaatgtgggcagtcagaagcgcccagttggaaattgccttccaggctgcagagcccgcgcgccagccgcagagagcatgaagatcccgccgcggaaacgcaacgcttgggctcgcgggcacctgaaggacggcgcacgctcctcccaggcgaagagcccctggccttcggagctctattccctaaactttctgggaaggctaaaggaagagaaagccaactggcaaatttccaggcgcggagaccagagctgcaggaaagataaagcctccattggctgcggcctgccccgctgccaactgagagcgcagcgcgttctcccctggcccttgccagtcaactctccagctctgcgagtggacattacctgagtcttgcaaaacggccagcaaaacgtccagcaggtctcagatgcgtagttccatgtccagggcgagacggcgagccgggttccggagagcgcgggctgggacttcccaggcagtcggagtggctgaagggggcgcgaggaagaccgcgtctccccaaacagcggacagtacagccccgcctgttttttccactccctgtcttagccaaagaggatactagtaaacttccccccagccagggaagatttctagagttcagcagagcttctgtggactttggggagagctggaaagggagagttaaggagggtttctaaattactcagctccgtagttagaatggcagatgctgcctctgtctctcagtgactagactctcctaagtcgcctgcctcccagactcttccttttgcgcgacttcgcttcggagcagccttgccccagcaacaccttgcctcggccaagcggtgcactccgggacgcgggcgcctcagcctgtggccctcgccccccttgcgaggtaggcacactccaggagcgaaacaccagctgccctgtcgccctaacggaggtgcaggcggcaggtgcagactctgcctgtccacctctctccctcctgttcgctgctccagtctttcccgggaaccctacagccagtgtgcaaaagcccacaagtctcccttagttccgaagagggaagggcgcctggaaatgagctccaggctcgcctcacatcctgccaccgctgctgccgcctccaaaatatgcctggagtgcgggtgggagggtagtgggagtgaccgagagctgcgtttttgtcgctaacagtttggagcctcctggctgactgattgcaccggggaggaggtgggaattagagagaagcgctctggcgcgtcacgaaaagagctgcttctgctcctcctcctcttccacacccctttagatttgggagcgcggggaggggaggcagattgagaaaggctgccaaccccaagtcccccatcccctggtttaaaaaaaaaaaaaaagcgctctcttacctttctccggagaaggaaagcgtgtcccggcagcgccgtctagcgtccttaccagagtaggccggcgtacaggattggggcgagcgctcaactgagtgcaggtatggaaagccactaaaagttttccagctctcccagtctccagttctagccgctgaacaggtatctagttcagtcaggagttcacctgcttggttccccgcagactggaacttgcttttaaagacgcaaaccacctagtttttctgacaattagagctttccaggaccggagagaactcttcttttccacccctgccacctataagatccttaagtctcagggttctccagccccgccagtcatggggcaggcaggtaatgtactgggacgcagggatgggcttgcagctaggaccctggcctcaatcattctgccatgcgccaggggctcgccaaccatgcatctgatcacctgctctccaacgtattgcaacccaggaacccctctctttaagcgagacaggggagagggactacgacccaggactagcagcgtttctagatcgcagcgttgaagagtcccgttgccacgccaggtatcttcccagagtgtttcgctgggctctcggggcgccgcactgattaacacacctttaccgaattactcatttaacgggtcagctgagcgctgttctccagcatttgctgctgcgctgagctccttttaatttgtctttctctgagctttctccagctattctcccgaggctgttccatcgctctgcattagccacagagagcgaacgagagatggatacagggcccaggagggagaattgagcgtttggtacgtggcacgcagcgcagactcgcgcctttctactccacttatttggccgcttggcctcggtccaccacccactcaactgttaaggccggagcctgtgcatgattaaggttattctccctctctcgcctctcgccaagtttatgcactcttcccctgtggaccatctctttcgacaaatccagcaaaaccccacccccatcctggaaaatttcttcttcaatcggggttaagtcggggatctagagaggtcgggtgtgaaaggaaaggaccttcgggcgggaaccaataccaagctaccctcctggttttcgttgtttatatacatgggagggggaaaatggtctgtatttttaaaacagaagatgtcctgccgtttctgcttctgtttttccttttttctttttttttttttttaacagccaattcttttgaagggagatagccagccaattttccatttctccttgcctacggagctcatgcaaacttccctacgctagccggctggccctgtgcaaccttcactaccacctcccgccaaccccctccgcacctactttactgttagtggtcctcaatgccaactgccaggtgcttccaaccagctgggtacggcaggcagcaacacggggtggccccttggtggaaggacaccacctggtcaagtctttcctttctggttggatccctggcacctccagtctggcctttagcatggcactagcccccggaccctgggccttagctgaccagcagggctgtccatggatgagaccatttgatcaagccacgggacccttcacttacattggggtgttaaggagccagcagtcagagtgaggggagctcattcaggat

SEQ ID NO: 1563754 - DNA, 4001 bp, Homo sapiens
tccctaatgaaaactcactggtgtcaggaatggtggctcacgcctgtaatcccagcactttgggaggccgaggtgggcagatcacctgaggtcaggagttcaagaccagcctgaccaacatggcaaaaccctgtctttactaaaaatacaaaaattagccaggcatggttgtgcatgctcccagctacttgggaggctgaagcaggagaatcacttgaaccagggagacagaggtcgcagtgagcccaagatcgccccactgcactcaagcctgggcaacagagtgaggctctgtctcaaaaaaaaaaaaaaaagaaagaaagaaagaaaagaaaagaaaaaaagaaaactcactggagaaaataggggggaaaggagttggaggagggagggtagggggtgagcagagaagctgggaggcagagaacaggagcttgatattaggtccttctatctgtctggttgaatcctttagccctactttcttggccttagctgctacattcacgtccctagtcactcacagtccagctgtggtcccagtcagtccggtactgcaccaagtgctccaaacagtggttcaagaatctgttgttccagttcagttctagctgggattcactcagtttgtgaagtgttaggttctctggagcccaggggatcactggagatatgtgtgcatatgtggtcattcccctggcctagacaagtcaggatcctgaaggtagtgcccctaatacctcctcccttcccatcatgatcccctacctcctcttttctgcccatgtacccttatgataaaagaacactactctgtagactccaatgtcccacagtatccctggtctcttgaccctttctttccaaattacccagattctgcagttttagcatctgtgtggcctgtctcctgggttcccgtgggtcctggagctgaacaacaaatgtttggtagaggtggatctcctttttttgcaactgacagccagaagtgatttcttcagagaatagatagtggctgcacttctggactttatcattatccgagttcttgtacctagaggagaaaggttggaaggaagaggaacagtggggccaatctgggtactgcagatatccagagcctagcctcatctcccctcaaccgacttatgacttaccccaggagaaaacagtggggtacctgggagacttgctaccctctctcttggtctctgatccaacccacctcttcttcatcccctccccctcgtcccttctcataccaataatgcagagtgaggttggtaggctggggctcagagctgctgttccaagtgcaattcatgtactcgacattgaacacaaaacactgaacctctgggaggggcagagtggaaacactgagggagtcagtgggcatagtggtcaggaagaaatctagattggggagaaaatgaaggcagggagggaaagagaaatgatggtcagaaggaggaggccaagcacggtggctcatgtctgtaatcctggtgctttgaaaggctgaggcaggaggatcactagaggccaggagtttgagaccagcctaggcaacatagtgagaccctgcctcaaaagaaagaaagaaacaaacaaacaagaaagaaagaagaagtagcgtgaggcagggaaccctcccccttgcccttcccactccacttttcaattctgcccacatgattgtaatggccagtggcaggcaccagatctctgtacggccccttcccacagccacccttctcaccagccccctccagtcccagatttcccaccagctgtggtgtcttcattcccattgggcgtcagaattgtcgtgttcagccccactcccagcaggggcagctgcaggaataagagggatgtgaatggtaatgatggcttcaacatggcgcttgctcttcattccctgggtgtagtctgtctgtgtcaggaacctgggtccctcacccactacccctccccacccacacgtttcctctgtcatagcttccggtggaaagaaccttataaaccagggctttacagagggtgtggcaaatatgtgctgtgtgacacgggctaagtcctctaggagattaggtgctgctgtaaggtggtaaacagaaactaaagctggatatacaatagtgtcacagactcaaaaatcctcagcccacctagatcctgggaaggatctgttcactaccactagcaccattctcaaccaccttctcctctaaatcattaccttctataatggaagttctgaacccccacccccgacatcaccgttctatgccatgcctcttccttgacttggtcacccttaaatctctgtcaaagctctactgttttgggaggatggaaaataccgtcttggctcctgtgggcacatatacagctgtctttcctctgatctaatccaaaccagaatacccacccttagctgctgcctgagctgggtccctgttgagactggcgaggaagtgtgacttataatacaaaaatattctagaaatggaggaacaacaatactagcttcaagcttcccatcttcccccaactctgcttctcttcctgccttccccacctcagtcaatggtatcgtcaccctctcagtcacccagacttgaaacctcagaatcagcttcaatttctccccctctctcacccagagaatataacccactctgcttctgtggtgtttctcccaacggtttcctcctttccattaccacagccactctgctaaatcagtctttcattagctctagtcatgattctatctagactccatcaactggcctccctttctaaaggccctctgctctctaatccattcttcatcctgttgccagttttaccttccccgaaaacacagaggtgattggagaagccacttacagaaactatttattcagcaaacatttattacgtttttaatatgtgccaggcactgtgcttatgttctggaaatagaccaacaagacatcctcatatttctagacactcacagaaaagtggggaagacataaacaagtaatacaacatagtgtaacaagtcctatagcataaatgtagagatactacaaagtatgtgagcacagaagaggaagtaactaaatttaccaagatggagagggggatagtttagtgaaggctgtgctgaagaggtgctatttcagtggcatcttaaagaatgagtgtaattttaccagacagaaagtggtgtaggatattaagcaaagaaaaacagcacttgcctgggagtctcaggaaaactggactatatggcccagcttagtatttagtatgtatctttagtatgtattagtttgctagggctgccataagttatccccaaactgagtggcttaaaccaacagaaatttattctctcggctgggtgcagtgactcacgcctgcaatcccagcactttgggaggccaaggcaggtggattgcttgaggagttcgagaccagcctggccaacctggtgaaaccccgtctctactaaaaatacaaaaattagccagacatggtggcaacacctgtaatcccagctactcgggaggctgaaacatgagaatcgcttgaatctaggaggcagaggttgcagtgagccaaaattgcgccactgcactctagcctgtgcaacagagtgagactccatctcaaataaataaataaataaataaataaaaattttttaaaaaggaaaaaaaggcatttattttctcacagttctggagcccagaagtccgaaatcagtgtggccagggttggtcccttctggaggcgctgaggaagaagttgttccatgcctctcttctagcttctggtggctgccgtcgatccttggtgctccttggcttgtagacacatcattccaatctctgcctccatctttgcattacctcttcttcttctctgcatctcctttatccttctcttctcttacagggacacctgtcattggatttatggcccaccctaatcca

SEQ ID NO: 1563755 - DNA, 4001 bp, Homo sapiens
ctctcaggaagcatgatgtcctcagcattcacccacattgccacctgtggcagagcctcgttccttttcatggctgtgtaatattccaccgtgtggctggaccacattatatttctccattcatctatagatgggtatgaggactctctccacctcttggctagtgtgaataaagctgcttattccttttcatggctgtgtaatattccaccgtgtggctggaccacattatatttctccattcatctatagatggggtatgagggctgtctccacctcttggctattgtgaataaagctgcttgttccttttcatggctgtgtaatattccactgtgtggatggacattatatttttccattcatctatagatgggtatgagggctgtctccacctcttggctattgtgaataaagctgcttgttccttttcatggctgtgtaatattccactgtgtggatggacattatatttctcccttcatctatagatgggggtatgagggctgtctccacctcttggctattgtgaataaagctgcttgttccttttcatggctgtataatattccactgtgtgtctggaccacattatatttctccattcatctatagatgggtacgagggctgtctccacctcttggctattgtgaataaagctgcttgttccttttcatggctgtataatattccactgtgtggctggaccacattatatttctccattcatctatagatgggtatgagggctgtctccacctcttggctattgtgaataaagctgcttgttccttttcatggctgtgtaatattccactgtgtggctggaccacattatatttatccattcgtctatagatgggtatgagggctgtctccacctcttggctattgtgaataaagctgcttgttccttttcatggctgtgtaatattccaccgtgtggctggaccacattatatttatccattcgtctatagatgggtatgagggctgtctccacctcttggctattgtgaataaagctgcttgttccttttcatggctgcgtaatattccactgtgtggatggacattatatttttccattcatctatagatgggtacgagggctgtctccacctcttggctactgtgaataaagctgctaggagggacctgaggtttcaccagccatctggaacattctgagtcccgccagcctttgaaaaccactgagaaacactacaagcaggctggggtcccagccccaaaagcggctccccggctggcagtcagctcgccctgggcgtgagctcattgactaactgaaccagcgctttctaataaacagagaactctagccatgtgtaggtgtgtacattttctagcaagcacacagaaaaagcagaaagcactgtcaaattactcctaatgctatcacctttataaacccaaggcatctaacatgctatgatggcttcagcgtccgatccacttacaaaagggtgaatgagatcgcaaacatacttctctggtaccgggtcattctatgtgtggtgtggtgcccacacggacagcaggtctcagcagaaacctgttacatgccaatgccccgtgtctgccagcttggatttgggaacccacagtccaccgcctcccctgcctgccctctttttccctcatcccaccctggaggggggaccttaccttaaatggagatcaaagtactgtgtggaagaaacagccttcgtggttccagttgagaagatctggggtgtcctgatcctaggatgtttctgatatcttcccgtgtgcgctgaaagcagctttccccgaagagaaaccgaaggttgtactccccgattgagctgttttataacctccagctggggccccacccctgaaactcagacccaataaggatctggcagtggggaggggtgggggctgtcagagacccccttctctcccacgggctgggatcctggggtcagcagcttcgtaaccatgaacctgactttccttgaaagaaagactctttctttgaaaattatcatgttcccgttctcatttttttttttttctgcaagtgtttctgtttgctataattagaattcttgctggctatacaggcagggttgggcaacttcctgacatagtaaattcagccttggaggcgtgaacgctggtgtccaggggctcctgcctgtgtttcctccctgtctcgtgggaaacagcacccagacagggaggtggcccccggtctcagatgacagatcttattaaagatatgttagtggccgggtgcggtggctcacgcctgtcatcccagcactttgggaggccgaggcgggcagatcacttgaggtcaagagattgagaccagcctggccaacatggtgaaaccccgtctctattaaaaatacaaaaattagcccagcgtggtggtgagcacctgtaatcccagctactcgggaggctgagacaggagaatcgcttgaacctgggaggcggaggaggttacagtgaaccgagatcgcgccactgcactccagcctgggcgacagagcaagactcggtctcaaaaaaaaaaaaaagatatcttagtggtcaggggtggtggctcacacctgtcatcccagcactttgggaggccgatgagggcggatcacctgaggtcaggagtttgagaccatctggccaacatggtggaagcccgtctctagtaaaaatttaaaaattagccaggcgtggtggcaggtgcctgtaatcccagcttctctggaggctgaggcaggagaatagtttgaacctgggagagaggttacagtgagccaggatggcgccagtgccctccagcctgggtgatagagcaagactccgtctcaaaaaaaaaaaaaaaaagatatcttagtggtcaggtgcggtggttcacacctgtcatcccagcactttgggaggccgaggagggtggatcaccctgaggtcaggagttcgagaccattctgaccaacatggtgaaaccccgtctctagtaaaaagaaaaaagttagccaggcgtggtggtgggtgcctataatcccagcttctccggaggctgaggcaggagaatcatttgaacctgggaggcggaggttacagtgagccaggatggcgccactgcactccagcctgggaaatagaacgagactccgtctcaaaaaaaaaaaaaaaaatcttagtggtcaggcgcggtggctcgcacctgtcatcccagcactttgggaggctgaggcgggtagatcacctgagggcaggagttcaagatcagcctggacaacatggtgaaaccccgtctctagtaaaaatttaaaaattagccaggcgtggtggcaggtgcctgtaatcccagcttctcccaaggctgaggcaggagaatcacttaaacccggcaggcggaggtcacagtgagccgagatcacaccactgcactccagcctggtgacaagagcaaactctgtctcaacagaaaacaaacaaacaaaaacccttagtaaagtccagccctgaatggggcactcaccaacctgtcccgggcttctctttccaacgctgaaatctgttatttctgtttactcagcacgcgcactcccagacagcccttcccttccctctgaatgtatcaactcttctctggttctcggcacccttcccaaattccaccccaacctcagcccttccccagagcctccaccttgcagcccggctcctgtttttttttttttttttctttgagacggagtctcgctttgcttgctctgtcatccaggctggagtgcaatggtgcgatctcggctccctgcaacctctgccccaggttcaagcgattctcctgcctcggcctcccaagtagctgggattacgggcacctgccaccacgcccggctaatttttaaatttttactagagacggggtttcaccatgttggccagatggtctcgaactcctgacctcaggtgatccaccctcgttggcctc

SEQ ID NO: 1563756 - DNA, 4001 bp, Homo sapiens
cacagtgggaatccccaatgctgttgggcacagagtatgtaaggtgctgacaggggtagggatgggcaggaggcaggagggatggggtctgaaaggccagctggaggcaagtacagagacaacagacacctcatagagaaggtgcagggaaggcagggtgggagagagatggcaccaagaagcatttcccacacactttcagagaagaggatgaggggcagtgctgcatccgtgaggtaaatgcctgtgggaacgctgggccacagctcaggaagaagtcagggctggacttggcactgcagaggtgttgggtggacaagggcacatacccagggcagaggggagtaggcaagggtgggtgggagaagtacagagaggcgtggaggagacccctgctgctctgcttcccactgtcccctctgccatcttccctccccatcacaggcctggtccttcatgaggcctttccccagtcccctagtaggcctccttagctggacggaacccctgagcctgagcacaggcaactctccttctgcacagccctgaactgacagggcccaagggttgagcagtggccatgggccagggctggagtgaggatattggcacagtcccctgggagtctggaggtgagacgggaaaatgatgtccgtgctcttcctgctgtcttggtgaagaggtacccacgtcgcctgctctgcccaaaacacccctcccacagccttgctgccccactgcagttgaaggtcatcactgtgcgttgtccctacatgaggctcctggaggcaagaccctgtttgatcatgttgcatcccctgcacccaactcaaccgtttgataaatgttttccaacccccgccccacctgcagaggctgcccttgcttctggacggtgttcatgttgtgggtacccaggagcggggctctgggatgctacttgaagacacgctgagaggatacccactcttgatactgtctcaaactctgtctcaaaaaaaaattaataataattaaaacgcctgccctgcctgtcagctgtagcgtgacagctctgggaagagggtgagcccagaacagcataaatcacaggaagagaaaatgggggcagggaggggagaggaggatccaagcagggcccacatcctccagctcatcacaagaacaggctatccagaccccaggaaactgagagggtgatgttctttccaaaacaaaccctctcctccccttcctctgcttggctgggttgaccctccctctggaatcccaccctcacctgctgccccacacacagctccagtggggcatacccatcctcctggctcctcttctgccctaaaacacccaaatgcctcggggttggtagaagctttcccagccctgggcctagacctcagctccaccccatggccatcacaactgaggcccaagtatgcccattctcaccccacaaaggcacccccacaaaggtcagttcaatcactgaggaagcagagttccttccataattagaaattctgcctgacaaactcagtgccacactggccacagcagaacccatgacccctacaggactggaaattagtttgtaatccttgaggtcagggctgcaaattttgccatctctaagagatacacaaggccaggacaccagaggaggtaaagctagggtggcgctctcaaatgccacagtggctccctgggccccgagttggagggccacatgtccctctctgccttctgaatttcatgctgacttgagaggttgggaagcccaaagcacagactcaccttcccagatgcatctgcccagtcccatcacaagtctgaggcatccccaacctggaggtgatttgtcacccaactatctctgggtgcacagcaaagaccctcagcctgattcaggagataactgcagcagttggtgacgtgagctttgcacgacaggttcacacaggccgcccacatctgaaaccacaagcgcattacagagctgctctcccgagcagagctgagaagtgtctgtcaccactaatcttctaagtcagggaactgtgagacatgacaaccttacagtccccatgacattgagaactgccagacatggacttcagtgatttgtctactgactggcaagtgagtgtccactgtgttcttcccaagaaacaccactgagattcattaaactgaccccaggaggcaagaacctgtgcaggtgcagagcagtgcccttgtccccttctacactttgccaaaaccagaggtgcaggttctccttccaccagctaaagcaacctgtgagcatcaggggtggggagagtattaaatataaaattaatgcagactcagttgaagaaaaacaatacagaagaaaaattctttaacagggtcccctttcacctcccccaagaagtagccactgtgagtagttaggcacaagtccatgcagacacttttgctttttggggattttgtttgtttgtttgttttcttttcttttttgagatggagtcttgctctgtcgccaggctggagtgcagtggcgtgatctcggctcactgcagcctccacctcctggtttcaagcgattcccctgcctcagcctcctgagtagctgggactacaggcgtgtgccatcacacccggctaatttttgtattttagtagagatggggtttcaccatgttggccaggatggtctcgatctcctgaccttgtgatcctcctgcctaggcctcccaaagtgctgggattacaggcgagagccacctcgcacccggtcttttttttttttttttttgaccgagtcttactctgtcacccaggctggagtgcagtggtgcgatctaggctcactgcaacctcggcctcccgggttcagatgattctcctgcctcagctcctgagtagctgggattacagccacctgccaccaagcccagctaatttctttgtatttttagtagagatggggtttcaccgtgttgactgggctggtcttgaactcctaacctcaagtgatccgcccacctaagcctccctaagtgctgggattacaggtgtgagccaccacgcccagccagacacttcttaagctgaaacaaatacctatttcttaaagactcctgctgtgctgccactttgcagccttcttgttcccctatggtgttgcaccatctttctaggtcagcatataaaacctacctcatacctttaatggtagtatgcaccatggtttaataatccctgcaatgtctaggcccagtgcctcacacctgtaatccaagaactttgggaagcagagaccggaggatctcttgaggatcacaggaggtcaagattagtctgggcaacagagtgacaccctgcctctaaaagaaaaacaataataatcataatttctgcaatgaacatttggattgttgcctgtatatgctattttatttatttttattttcatttctttagacacagagtcttgctctgtcgcccaggctgggctggagtgcagtgacatgatcatagctcgctgcagcctcagactcctgggttcaagcatatatgctattttaagtgaatttcgtgaataattctgggcatggatcttcaaacaacagagtgagtcctactgtaggataaattgctaggggtagaattgtggggtcttagggttagcattttaaaatattgatagatgctgagatatggccctacataaaaagtgttgcacagacttttgctctcaccaacaatgtaagaatgcctgtaaccttcaccaacagtaaacattatcagtctttttcatctttgccaatctgataggctaagatatttcaatgtggttctaatttgtacttccttgagtattagtcaagataagcatcttttcatgtatttattacttgtgtgttctttggggttgaattttaatcagcttggctccagtcttacctgctacaagcatatactgttctactcactggagccatccctgcact

SEQ ID NO: 1563757 - DNA, 4001 bp, Homo sapiens
caaatctgagctggaggggtacttcaagatcatccaaggcagaccttgccatttaaaaagatacgggggaactgatggcctaagagagaaagagactcagtcaaggtcacaaagccaatctgcagcagagctggaaggggaactcaggtctcccaactcccagctcagtgttccttcgaatacggcagaaaagaaataagggagcctttagggcagccttgggagtctgcacgcccttgactctctcagcctgatacatgtaacccaatcagctcaccatggtatctacacagaaaaagtggacccagcccatgtcccaccaacccaagagatagtgccaaggtgtcccaaatagacacacagaccccagtgcaggaactggaaccgatccagcagaggggcaatctagacttcccttcccggtagggctctttaaatgggtgttgtttttcttgaagggtggagagggggtggactttgaggaactagccaagggcttggcctccatctttgctcccccatctttgctccccccggccagaatgtgctgcagttcccttcagagggatgtctcagcctccagcagccattctggtccccacctgcctctttggtaagggatggagctgaggcggccagaggagaaaagatcaggcaaaaagaaaaaggaaaaaaaaaaaaaggcgggggtggggggctttctctcccctggggctctgagtagacaccctcgccgaccataaaaattccaaccagcatacccaaaataaataaataaatgaaaacctatcttctggcaaggatgcagctaggggttgaagaagtggaggcgggggaggcggcgatgactgctctagtccctcgctggccgcggtaccgggaaagaagagacgcctgcactcatctggccaacccagcctggggtggccagggaaggggtgtcggctggatgagggggacctggcttctcctggcgggttgggacaggagaggaagacacggaaccagacactggcttcttactctatcagctggacaagttggagagggatctagagggaagagccgggggtacaaacacacattccttactttctctggagggtcgtggccgggctggtgctggtactggtgctgtggcctccgccggcgccgggactggagctcctggatgcgccacggctcagctggccccgctcccgcggtggccgcggccccacgcccaccgccgccgaatagcccgcttccttctcgcggcccgggtgcgccggcccggcctcccgcccgccacgctcgcgacccagggctgggttctcgtggtgcaggtggcactgggccacgtcacgctcgcgggctgtgtaaccggtagtgtcctggagcgggtaggaggcgtcccgctccttgtcccgatacacagcctcccgattctggtaggcgccttcccggttcgggtagcccacgtcccgggccgcctggtggaactggctctcccgcagctcgcggtggtggaactgggtctcgcgcaggttctggtactggctctcgcggcccgggctatcccgcgcgccgtgggggtcccggtgcagctccccgcggtgcagctggctctcctctcgcaggtcgcggttctcctgggtgagctggtccagctggccctccagctcctcgatgcgccgccgctgggtttccagcagctgctgctggctctcgatgatgttgttcagctccagcaggtactccacggcccgatttgggctctcggatcccgggccgcccgggggccccgaccccgcctccatcctggcggcccaggggcaggggaacgggcaggagagccctgtccccgctctctcacggcgccaccctcccccgggcccagccgggggagggggccggcgggacgcgagggcgcgcaccgggcttgagggcccgggggccctagggggcccgggagacagcgctggggccggcggcacggggagcaggagctgaggctgccgccgccaccaccaccaccacagccactgctcgggaggacgcggcccacggcgctccgcccgctgcggagtcactgcgcagcgcggccgcgcgggaccgccccggccgccggcccgccccccgcccctgcccccacccggctcgcccggcccgcccccgcgcgccccacctgcggctgccacccgcacccgcagctggactggccccaaggcaccggcgcccggccagggccagcccccatgacagcccgcaagagatctctccattccacccgtccctgggtcctcacttaacggagcctaaagaagccctccttcccagagtccgcccgtccctcgggttcgccaggttggggatcttcatccaaagccatcccgggaggaacccccatcccaggcagtccccaggtcccgacaacccgtggactccccatgccctaggtctgccaatcccaagcagtgtcagattccccttcctagccagcccctgtgtcttctacctcaggcgacctccctccagcccccatcatgggcagtcgtccctgagtctcccatcctggccagtcccttgactgtctgcagctgccctcatcccaggcatcccttgggactcccaaaggatgcgcacacacacactcatgtacaacatcgcaggcatctcccactccagccagcccttacactctccattcaaaccagtgcccagatctcctaccccagccaaccccagaatcccccatctcagccagtccccgggtcctctaaccaaggcagtccaggatctctcaactcaacaagccctgggactccacatcacagccagtcttgggatcaaggctccattcattcaaccaaccctcatttcctgctctcttttagaaatgctctccccattcactccatcatccccatccactgaaactgtacccatccttcaagacttaactcaaatgccaccttactgaagccaaccctgatttcctcagccagaagtgcaagttgctgctctctctctctctctctctcccctcttgacctcctgctgcactccctatcttgtggaatttgtggaacaagtggaacttgctttacagcacattcgtctgtgttcttgttttatgtcctctgccagacggagctccttaaagacagaaacgtgtcttaatttatctttgtgagcaggttgggttagaggagaaaacatgagttttacagtcagacaaaactggatttaaattccatcttctctcttaatttcaatttccctatcaataacagctacctgacagggtggtcttggataaaagcatgcaaaaaacaccttgcacagaaaagacaacccacagaatgagagaaagtatttgcaaatcatgtatctgataagggacttgtacgtagaatatataaagaactcttacagcaacaaaaagacaactatttttttttaatgggcaaggaatttgaataaacatttctccaaagaagatatacaaatggtcaataagcacatgaaaagatgctcaacatcattaaccatcagggaaatgcaaatcaaaaccacaatgagctctcagtgctacccatcaggcgtttcctgcattctcccataacctaaagggaaacttccacaatgtctggagcccttaatgtcctgcagatgaaggaagagatatcctcaaattccttgcagcagaaccccacttgaatggcaccaaccttgacttccaaatggaacagtacattacagaaggaaaagtggtggcatctacatcataaatctgaaaaggacctggaagaagattctgccattgttgccattgaaaaccagactgatgctagtattatatcttccaggaatactggccagtgggctgtgctaaagtttgctgtttccactggggccactcttattgctgggcacttcactcctggaactttcactaatcagatccaggcagccttccaggagccacgtctgctggtggttactgatcccagggctga

SEQ ID NO: 1563758 - DNA, 4001 bp, Homo sapiens
tgagtaggacagcaatactggtgtagagtatgagacgctgtggacctgagagacagcaagagacagagagagacagagagagagacagggagggagggaagtggcagggtgggcgatgggggcaagaaggtgagagtgagtgcgggaggggaaaagggaaggctgggaggaatggaggatgggaaatggaagaggaggcgtgggaggcagggagggaggaaaggaaggaagataagggagaaaggaaaagaggaagggagagagggaggaagatggagagagaggaaggaaggaaggagggagggagggagggagggaggaaggaaggaaggaaggaaggaaggaagaaaaaaagaaaaaaaccacaaagtcaagaaagagaggacggcactcgaaccacatacagaacacaacgacaacagggggcagtagagacgaaagagccgggctgggcctcctgtgttccaggtgactccgtggggacctcagccacagagacgctgggacaccacagtagggaagggggaagggagccctcctcacaccagacgccacaggggtagggaggacgggaggggaaggggggatgaaagagaagggggaaagatgcatgggggctccccttagagaagatccctcacaggaagggaggaagggatggaggaaggagaagctctgggcccaaagaagggggagaacccaggtgggtgggtaaggggaacactgaaggaagagagggagagagatagagagaaaccgaaagagacagaaaaggagaaagacagagaaagaggaagacagagaaagggcgagacagaagacacagagagaagccagagagaggcagagagcgccagagcagaggagggtgagggcggaggaggctgacaaggtctcagtggtcttggtgacaggatgggactcagggctgagtgggtgaggcagaggatggggtggttccaggtaggagtcttttgctttgaaggccagtgctttaccccccaccccaaggcggggcccacactccacccctgatgctgtgcccccaccacccctagtgcagggtccaaagacccctccacctcctgcctcctgcgattaaagtccggagaatggccaaggggaggaggaggtacagcagggcagggaggctgagggcctggtccctgccctacccagtgcagcgcagatgccagaggtatgccagtcagctggagccagagcaagctgggagtggagccgaccccttccaggtcagccagcccctgtcccccacaagcccacagaggcagactgtggtcagggcctggccattcaaaagcccatgtaaaagccaggagacatggctgcgggccaggccagctgcgaatttgaggatgtccaaatctcagaaccttacagggaatctttgaatctgagactcttcttatcgaaggctctggattaatcatcatcagggcaactgcttctcaggtgccagtctccagcccaagtccttgactcattatctcttttgaatctgagactcagagactcttaggctgctggaatgttggtgttagaatctcagaggccacgagcctggagccctgcagtgcctcgcacacaaggctagtagagcagggtaggagccaagctcacccctcacaggccacaggctgtgctgctcagggttccagggtccttccagagctgggcacctggatgcccatgggatctcccacttgaactggctccctcccccaggccaaaggcctctcagagtccaagaagggagccaggaaccaggaagccaggaggctgctgaatcagtagcccagggactgggtccaggcctgggcaggaagggagggggccaggctgcggggcccaggttcctacctgctgctcctcccggggggctccatgggtctggacctgtcccaagggcaggccccctggcctagccggtgtctccaccgtgtcaccaccccctcctccccagcccttccctagaaggaggaaccaagaaggcggggccaggccagctgggctgcgggccagattgcaactggaaactttgctccttcccctactcctccaggagggctgggaactcctcctccgaggaagcggcctggagagctcacagtccctcctctgggccaaaccccaggctgggctccctcagtgcacctctgctagaatctccccacgcaccccatcaagtttgtatcgctggctctattctcctgaacagaaaattgagatggagagaggtgaagtaatactgctagtaagtggcagaaccccaagatcaagacccggtttggctattcccaaacctggaatctgccccttcagccatattgctaccttgtgagtacagaaacctttccatagaagcttttcacaaatacccttattttcagcacagttaaagagactatgtttaggagttgttctgggactctgcatattaagtgcaattcaaatcacccatgttggggtatcaagatggggccccggccaatattctttctcactgcaataagctctcactcttctatgttgttttctagactggctgagagaaatgcttcctgaagagaagagggaaaatcaaaagaaatgccaagaggctgttcttccaagtaaactgcccagcctgactttatggatgggcaaattgaggcctggagaggaaaagggtcttactaaagttcatgcagcaggtcagagtagactccaggtgccctggctccctgcctgcctattacagcaacatctctgtcctccacatgggcgggactggagaaaggagagagttttttggctttgaaggatgtagggctcctgagaataccacaggtccagctcaaagtgctcctgtcctttcacggtcccagagcccaggcccctggctgttctgagcagaaggcggccctgggaggggccagggggccagtgatctagaagaaatagaagctgacaggcaacaggccagccttcctgcctccctgctggggcagctggttcctctcaagaaagccaaagctactgagagagagaggccctccggaacaccacaaggttggcatctgtgggtccttagtgaccttctctccctctgcccacccctcaaagccctggtcctcaaggctctggccttagcatctgccttttttttttttttaactctccttgaggaactctcctagctcctgcagcagcttcaccttgtgcccatttgtagttattgccctaagagctgaaccctcttgacctggcaggagccgagagacattaagtgtagtgctgggccgggtgcagtggctcacgcctgtaatcccagcactttgggaggctgggagcagtggggtgggtgggggacggtggatcacctgagctcaggagtttgataccagcctgggcaacatggcaaaaccctgtctttactaaaaatacaaaaattagccaggcatggtggtgcacacctgtagtcccagctacttgggaggctgaggtgggaggatcgcttaagccccagaggcggaggttgcagtgagctgagatcatgccgctgcactccagcctgggtgacagagcaagaccctgtacaaaagaaaaagaaagaaagaaagtgtagtggtagctttaagggatgatgctgtgtgactttgggtaaggccctttccctctctggtgagacaaagaacctacactttggtgcctggtaaagctgggtacaagtccttgccctatcactttttagctgggtaagccctctgaagctcagtttgctcatctatggaagaggagtggaaattcctacctcacagttcttgtagggatttggtaggtagacaaagtgtgcacatggtaaatagtctcagcctgaacctgagagagtctgtcccttctcccagagaggcagaggagacccatgggaagcctgtttgtttcagggatagtgaggaagatttctaagaaaatatccctgaacctgggaccacttttgg

SEQ ID NO: 1563759 - DNA, 4001 bp, Homo sapiens
ctgctggcaggacccactcacacaggctgaaagccctaggccccgcgcccggctccagccaggtgtcaggagtgctttgggtcctgggaagcgtgccgggccaggtgagcctacctggcagtggagacggtcctccagggagccgttgggcaggaagccgtacaccaggcagtagaagccgttctgagcacagtagccagcaaagtccacaatgtttgggtgacgaaacctgtttgaaaaaggggagcactttccatcaggccagactgggtgggcagccctggctggggcctcagctcgcccgggcctgccaggcctcaggtgcccaagggagccaggtcctgtggtgtgcggtctgaagccccacgggacctggtgtggctccccctctggcctcacctggacagctgctccacctcggtcaggaagctctgcttcactgcagtccactccaggtcagcgttctgcagcccccagggtgcggtgggggaaggggcagggaagacgggcagcgtgaggctctcgaagcgaaggccttcgggccaccagtgccacctacccgaggcccagaaccaccaaggggccagggaccctacgccagaatgagggctgaaggagttgtgtggggaagcgagggggaaaggctggagaagtggtgagggttatctgatggccttccagggtccctgccagggtgcgacactcacctccttcagcctcttcacagcatacaccgtgttcctcatcaccgcccggtacacgcacccaaagccaccctccccgatcttgagctcctccgagaagttgtgggtgccccgggaaatctcacagaggggccagcaaaacggaaaggggcgggctccctgcaggagggacactgagctctctgggcctggctgtgggaagagagcctggatcaggtggggtccctgtctcttcccttctgcccaaggctccaggctctccccaccacagctgcctcccagctgacccagcttggctgactggggctctgcgctacatcaaaggctgaattccttcctccttgtctcgaatcttccctggggggcaggggacacctaccttggtagaagaaggggctggagatggcggtggaggccacagggaagcagggcttgggaccaggccgagctcaggccctgaatgggtctgggagcctggaaaagcttcataaagacaccagtgagaggcaggcagagaccagcagcagggtctacagccgtggccgtggtcaaggtgggctcttctttgggtccaccgagcctaacaaccgggccctcttacctggggagaggaaggtggaggctgaggatggcaacttccgggggctccaggcctcggcctcggcgggtgcagggatgctgctgggcctcggggcagtggtgcctggggacggaagcggggcgggagggtgccctgggacgccaaggaaggaaaggaaggttgaggcccgggtgggggagccccgtggggcccgccggcctcccagccgtggggtgcccggagtcccgcgctcacaggctgtgatgatgtcccgcgcacggagcagctgcaggtgcgtgaggatgtgcacgaggtcggccacacgggcgttgcggttgatccagggccacaggacgctggccgtgcgctgcccggagcgctcgcacagccgcagctcggtctggtcgcgcacgatcagggcggctgcggggcggggggcgtcaggcgtcggcgccaggagcccgcgcgcctcccgccccccggcagcccgccgccacccaccgaactggcaccagtcggcgggctccagggcgtccatcactttgtagaagcggcacatgacccagggcggcacctcgtacaagaagtgctgggcgccgggggctgcgggctcccccgggcccggccccccggccatggctgccgccgccgggccgggacctgccggggcctctcagggccgcggcgggcgcgggcctgggccggccgggtccgcggacactgactcacttccccttcgagccggcctcgtgcgacgcccggcggggcggaaggggcggtgcccgggcccgccgccatcttgcgcgccgcggccgcgcgctgggtcacacgggggcgccccgcgccggggagggcccgggtcccggcgggttccgcgagcggcgatcggcctcccgggctcgcccgggcggggctctggaggacgaacggcggctcccggcgttggggacagagggcagggcggaggcccgggctgctcggaaaggggccggggccgggccttccgaaagctcctgggcggccctgccggaaccctgctctccactgcggcctgcagggctgttaccaggagccctgcctgcccgccccacgtctagccccctgcacacggcagcagccttgagccattcagtctccttaggtgtcctgaaatatgccgagaacgctgcccgccacagccgtgagtgtatgcgttgctgctgccccagccctcatttggcaagggtgagctcaggcagctgtggtgaaggcttcctgagcccgccggcagagctcctgccaccccgtacctgtcccctcctgggcatcgtccttgattacttgtctggaccgccacccccggtccccgccctgagatggggaagaccccacaagcagcaacgcagacttactcttttgtttctccagctggatgtctcctccagcgacagttccccttgccctcttgatcctgacagcgaaggggttccccacccctagccctacagacttaggacttttcctagaaacgagaagtgcccaaggcccacagctggcccctgttggagtctctttcctgaagccaccaccactgtggccactcccaaggaagatgccaaccataccatgaaacccatggcttctcacgggacagactttactgagatgtaccaactcaagtatctgaaatgactgcacacccatgctaacctccacgggggcacttggtcctacttacacacaaaggcccatcagctcacggaacagggctggcatacgagatgctcaatgcatacaagttgacttttcaaccctgggatctacctttgaaggccaggccttccgagggtaccttctagcatgtgcatgtgaagctggactcctttgagcagttgtctcctccagccccttaccaacctggtgaggctgctcctgagagccaaggaagccagtaacaagggggccccctttgggcaaacccctcagcctgcccttgcctggtcagagaaccacgttagcagtcaacagagggcacgtgagggtcctggccagaatgagacacaggaggagccacagcctgcgggggtgggggtgtccaaaagcaccacagcacatccagacctagggggtgcccctaccatacgggtctggagcagggaggttgtgctgcaggctgactcatgccaggcccttcccgtcacacgctggagcagtgtgcctggagagcactggcttggaagaagctgaggggccagcgaggccagcatatggaggaggcttcccttggccgctcgtggcaggcctgaaggcagctacctgtgtccagggacagccagatccaatgaggaaacgcagcaccatgctgtcatgtgagctggagggggacttctgtcttataatgaaagcccagaccttgagtcactttcacagagagatttatcgagaatgctaacagcacaggatacagtacttcccaacaaaaggtgcaaacgcgtcacttagaaaggcatgctgagtattctttgctttcacatgtattaaaaaacttacaaaaataaaataaaactgcgtgctgcccatcttttccaatagtaaaagaaccttatgaaaaaatcacttgatttttacaacaaaagacacaaacggacatttttatgtaaatttataaggcaaactctttatataataaataggttacagggattcagtggggggggggtgtttttgaaacgtataca

SEQ ID NO: 1563760 - DNA, 4001 bp, Homo sapiens
taaagtctgaatcttcccccagacttcccttttccaccagttcctccagctggtgggggtggaggaggaggtggtggaggtggtggcatttgctgttgcttgctttgagttaatttgccaaaataggatcttttcttcagagattttccacgttcaccatcaccatcggatcctttcccacttcctgagcctttgccccccccagagttcttgccaccacctgagccatggccatctccaggtccctggccaccacctgagccatgcccacctccaggtctctggccaccacctgaaccgtgcccacctgcggtgccctggccatctctagagcactggtttcctcctgagccctggccatttgagccctgaccacctcgggatccctgtccctcgcctgaacactggtttcctcccgagctatggctactggagccttggccatttgagccctggccacctcctgagccccggccatttcctgagccccaattgttcataggcatgtagtcacctccgcttccttcctgatcttctttgccctggggattgccttcctccccaaagttgccagagccagaaccagacacttcagaagacaggcgagctccattgttcggggcttctgcagggtgccggggacgtgctgggctgggtgctaagcggcgaaaaaagctggccggcactgaaaccgctctccttgacctgcgccctctgggcaggtgcagtcttcctcgcctggagtgggccacaggctcgctgggtgttacgaagcgcctggtgaaaagcatctcgtcttccccgtcgccgatggccctgaggtggcaaaactgctcaaagcgggaccttctgagccagcctcccggctcgagcggcaccaagcccaggtgcctcctagcggacagcagggttaacaggtgggcgccgatgctgatgctgtagctgcggcagcgggctctgtattcgtctgcacacaaggctctcatcttctccaaaaacagctcatgcatgttttgggcaaccacacagtcatcgacctgcatccagagctctcccggaccgatgacagtggacctgcctacttccaagaagaaatactgctccgagtgtccacagcgacggatgctcaggagctggacgaccacgctggccacttcggtgttcagcctcacaaacacgacctcctcgtcggttagacacagccggaacacgccgctcagctcttttctgtgccccagccccctgggtttgactattacctgccacacatctttatagaagggtggctccgccgccgctgccgccgccagcgcggccggctctccgtccggctgcgcgccgagcgtgccgcagcggcggcgcttgctctcgaggatgaggcggctgagcagcaagtaccagctttcctgctccgactcgttctcggccaccatcgcgaagtattcgtcttgggtgaaaagagcaatgaggtgtcggtaccttgcatctgctcgctggctcacggaaaagcactggtatagggtgatcacgcgccgcggtggaatgagcggggggatcgcggcgccagaggcggccgccgctgctgcagccgccgcggcgcggacactgtgccggaacttcctggcattttcgtagtattccagccgagctggggcgtcagcagtctcgagtttgagcacgaagtagcgcctgtgcccatgcttctgtttccgcaggtagccgcgtttgcagacttcctccccgacgggcaggtcctcctcttcggactcggagtctgaccgggagccagtggccgtggagagccacatggctcccggacaagacgacccggtcccaatgagtgcggtcggggttcccgaggaaagaagcggggtggtcaccactgctgctagagctgccgctgccgccgctgctgcacctcttagtcttcttgtcgcttggtcgcgagtgaaggagcaactcgccatggtgatgcacgatggttttaaggtgagcgaggaggagggggaattcaggaaagggagggttgggggaagaggctgtctaccctcgtctgcccgccccagccccctcctgccttggcccgcgcccccgcccactccactctgagcgcacgacagcgggcaaaacaacacgtgaccacagcctcacgcggcggccgctgcggatcctgctaccggcgcaatggaggggcgcgagcggccaccagtagaggtgagcaagggaggagacggcgggctcgggaggcggagccacctccggctgtgccaaatcctcccggtcaatctccaggcctgtgggccaagggaggaccgagaggaggaggcgggctctctggccaagctgattctaacagggagtccaggaaggcatgagggggcgggagaaggcctggaggggcggaggagaaagcggccggctatcagggtcgggagagggcgccacagtcggggccccattggtgggaggtggtgggagggggcgtagcgcaagcagtgcctgcctgcggcgccagggtgcagagcgggcacagtcgcgggacagtttgtttgtttatttgggaagcgggagccaggtgaaactgttgcaaggctctgattggttgggataggagccaatgggagggtccggcaagaaggcagccccgaaatcattagtttggcgggagggaggggtgagaggggagaggggagagggggcgtggctggggtcccaaagtggcttcgctgtcggcttgtggcgctctcaggcggtaaacaaccttacgcaaatagctgttaatggtggtggtaaactcgtgcaaatcccagagccgtggtgacccgggatggagtcgggtgccctggtactccctgtcaatcacataaattctctgttcctgtcacagtctggttcattctttccagccgcacaaggcggcggatcgagcttcttgggagaaagtgtcggcaccccctgaaaacgggttgacgaccagggcgctcagaactgcttcccaccgctctgcaggcactcccgagcccgctgcacccctgacagaagcccgcgactctgaggcacacgaataacagcgatgcattcaaaatgaacatgatctttattaatcagaatgcacttctagcccacgaaacacaggttccctaaatacagtgtttctgcctatttgattaacgatgactatgaaagcacaaatttgggggcctgcaatgtatacagccatattggaaaaaattggactcgattcttactgaaataaccagtgttgggctgtgaaggtatttttctgtgggaaatgctttggaaggtgcctttaaaagaatctcaaaatattgctttcctttccttgagcgagaccgaaaaactttagaaaaagaaaagctcatacctagaacaaaggaccacgctgaatgcatattctagagcacatttcacatccctcgcgtcaacaagaagaagaagaggagctttgatgcatttcagtctacaagttgacatcacaaaagtaagaactactgcctccctcatttctggaaaaactgccggagtgtaagtgcaacctcctcaagtctctctctctctctccctctccttctccctttccctctccctctccctctctcccccaccaccccagttattacttgactaggattttagactcttaatggtggagatgggtcgtgaattatcaaaggagtgaccaggtttgcaaagaggaatggagggagaggaggagagaaatacagcatttctctctgaaagaatggaatgtcagttcacccttgctctagggttgatatggcaaagggtactatttataaaatccaacagtaaactaggcaatatgtatatcataaaaataaaccatatttctgccctcttaagaatttgctctgttagaaacagaacacacgtatttgaataaatggctcctttttgatgctataatttaagagaaaaagaaattggtttgggttgtcccccagatattacaaatattc

SEQ ID NO: 1563761 - DNA, 4001 bp, Homo sapiens
cacccccaatattatcttatgaccaaatattaggagaaacctgtctcatagcctcatagcccacccagtcccctccctcacccctcatggaatcggggtgctcctgggtggtaggtacatggagtagcatcactctcagggccttggtaaacctaagaaggataaagtagaaccaggtcattctaaggtatatcctactcagcctatctatacccagtcatccctcagccatatgcttgagcccctcaaaactctcactcacagcatcacatcctgggttctggcagctggaaccagtccggatcagactgtcaagtcctgggcaagggaaacagagtcaggaacttatccatccccccactcaattgccacttccactaaattccagtctatgaagttgatcctactaaagacccacctacctgccccaggttcctggtctaattccttctgttccaatgccatttccagggcttgggatatatttagcggcagcagcttcagaggcaactctgacctaggggttaagggtggtgatttagttctgacccattagctatgattgctagctccaacactcccaccgatggtaatggaattaaagaagcctggtgaaagtgaggcagagttggagaggttgggtagcaaccccattgccaattttcatctctgtggacatcccaaatacctgaaccctagagaaatccccagcacttctcttacccatctactcagttgctctaaacctaaccacttttctctgcagaactgagtcatatcctcttcctctttatctaatcgtggacctaatatgacttccttctgttgctcttattattcccacaaaatttgggaagtctcctggctgccaataatacaatacatccttttcttgatatgagatttatcttaaagttcttttctagaaagagaagtcattctcaacaatcccttttgtgttatacactaaggatgtatttgtgaggggctatctactctgttgattcaggtatctatcccatcatcccacaccaccttagaggaaagggcgttatttccagacacaaatttcccctaaggcacaggatatacaccatccaaaccctgacatctggccctcctcacatccctggtccctagttcccagtcctcaatgacccattaatcactcctaggaagctacatgaaaataagaaaagtccaggggcctcctcctctttacttgggcctctcccggcgcaaggtctctgctgactttggaatcacattcagaggtttttgctcctgaagtgaactgcttgtagcagggccttcaggttgaggggcctcaggaagcttctcagcacagtgtggtcccatagtacagccctagtatagataaggagataggattagggatagaatccttctattgggggcagaatccaagtacataaataatttaccttgatgtttaagaactcagagaaatctacagttcgctttcggcagcaggaccaaccctgataacaagagacccagatcagcttagcttcctgggtattatctcttctgggaaatgctcttgctaacccccctcacctactcctcaccttaagtgcatcatggaagattgggaccccagggtgatggcaacaggaatctgtggacatcagtagaagttatcaaggaagggaagataactataccaagtatcatttttcacctcttccccgggtttctatttatggtttcttcccatataatgtgaagaaaaaaaaaaaagccagcaaaggctgtaagatcactcagaccaattaaactagggcaggtagtttctttccccgctcctcaaacacactgccccccagctgaccagtccccaacacccacacagagcccctggccaggtcaggattctttactcaccaggaaggttggtattagggtcaaagtgctgcccacagcctttgttacgacagagtagagacatggaagcgttggttgaatgattactgaaagggtatttcaaggagtctggctgccgaatggggaacacctcttagtctggaggcttttagctgcctggaagggccagctgtttctatctttagttcaggaggcgtacacctcctaacatgggcaagggaacttcaattcgtctttccagccaataggaaagagctcgggggcattttagctctgaggctcaggaaaaaaggatcaggcagagtagggctttgaacttgggtgaggtcagctcaccactactgagacagttttagattcaccacagcaattccaagccttggacacagcagcagctgctaagaaacaaataccaattttgagaccccccccgcgcccccagctcgatgaggattaagcccattttcttcctctttcagaggggcagctttcctccatcattacttccatgtagtatcaatagcgctaatccttgccaacccctccagccatttgatgcacctcatccccacctcctccccatgtttgtctagatcaatactgtaatccaaaggtcataaaggattacctttatagagtctactgctcatctcctaagataactcccctccctcctttccccttcaaaaacaccacagaaaattaaaaggcttaaaatgtattttaataggttgatgctgcattactgctccatttttcagaaaaactccaaatatatgagacaaatcaaacacagtacaccaatgaaaaaaaaaatgcacagcatgactacctaagataggcgagtctaagagctactgtcagaccttcagtatacagtaaccctgttcccaagattgtactaggcctatcaagaaaagctgtgaacagcaacatcatagacacaaaagggtcattcctgggtgtcctcacccaagaaaaagatggaggcaagttaacacaagatttttttttaaagatacactaaaatgaaaatctctaagagaaaatgtcttctttaggacatgaaggggtaatatatggggtataacagaaccgtatgtacgctgcctgtgacctttgtggacgtttgcctgaattctcacctgggagtgaatggagcaatggggctaaggtcattgggggatgtttggtttttgtggtgtatgtggcagtttctctggggctgggggagtgtaaggataagaagcaagtgaggttgggcacggtggctcacccctgtaatcccagcattttgggaggccgaggtgggtagatcacgaggtcaggagttcaagatcaacctggacaagcttgaacccgggaggcagagattgcagtgagccgagatcatgccactacactccagcctgggcgacagagtaagactccgtctcgggggcggggcaagcaaatgaaacaagatggacaaaaaaaaaaaaaaccggaatgatcaagattaatgggctctaactggatccactttgccatggtttccccaggccctcaacagtcacattagagacttcaggaatgcaccacacagaactgattaaacaatataccacacagaattgacttgtttaataccacccctcccttgccctctgcctccagcatactccctagagtagtacaggcagggtagatctaactattggaaggaatccctaacacttttccagggtagaattctggctagtccaaaaagggtccttcttttaagggttttgagaaactagacactgcaacttattagtatcggcgacgtttgtttggggcaaattcagctccaggagctgcacggttgaatgcaggaggagttccaccaattgccccaattccttccattgtagcagcctgaccaaagcgttcagttgttggtggggtcttaaagagaaaaagagagcaacactgtaacagagccattgttggaagcttcccacccatctgtagtccctccactggaggctatttccattcaactattcaaggctcctgatggtaggtaggagtgggtgactaagtctgtttagaactctagtggataaccc

SEQ ID NO: 1563762 - DNA, 4001 bp, Homo sapiens
tctgttggactcagcacagtgtaagtcacacactcagcaccaggaaatgtttgtttaaaaagcaataaagctaatattatcaactacttaatatgtgcctggagctaattttagcatatgtttccatgtatattagttcatttaatccttgaaagtgagttctggccgggtgtggtggctcatgcctgtaatcccagcactttgggaggccgaggtgggcagatcacgaggtcagagattgagaccatcctggctaacacggtgaaaccccgtctctactaaaagtacaaaaaattagccgggtgtggtggcatgcgcctgtagtcccagctacttgggaggctgaagtaggagaatcgcttgaacctgggaggtggatgttgcagtgagctgagattgtgccactgcactccagcctgggcaacagagcgagactccatgtcaaaaaaaaaaaaaagaaagaaagaaaaaaagaaagtgggttctaattttatccccattttgtagatatgtaaaatgagactcccagaaatgaagtaacttgccctgggtcccaaactggcagagccaggattcagactcaagaagtctgatctcagagtgcattgtcttaatcactatgctctgctgacagaataagcacaagaacgaacaaatatatgcacaaatgaatgaagtggtgactttggaagcagacttacatagtgaaattggagataaaggcaagatgaggcagatccaggtcaaagatggcttcatgggcttcagcatgtggattaaacaggacagaggtgaccaaggtgtgggcatagcgagacaccaccgtggagcgcatagaatagcttgtcattaacaactgagagagaagacaggaggaggtgttttaggtagactatgtcctcagcctagatgggctagtctttgggaacccaagattcctacacaggcctcaaagtatacaggtggataaactaaggcctagagagggaaaacaacctctgtcatccatttggtggatctgcctgattacttcagcaagctttatcaagtctcagaacccaagactcacagaagattagagatcaagggacctctctggacaagcacttctctaactttgatgtgcacatgaatctcctggaaagcttgttaaaatgaagattctgattcagcaagactagggtgaaggctgagattttatctttctaaaaagctcccatggaatgatgctgctgctagtccacagatttcactttgagtagcaaggctttagaatatagcagagcatccgccattcattgaatcctactctgtccaaggcactgtgataaatactgatttttttcttctttaggatctcaggtgtaaagagttgcacttataagcacaatcatgcactgcaagcatggtaagtatctggcatccatgatgagggcacacagcaagtacaatatctatcttcttcctctcctttcttgaggcaatggtccctctatctacccacacgtgatgcagagctagttccttcccagtgtggggcagtgggaaatgaggatgatttgagatcagacggttctgccacttcctaactgtgtcttaaccttggaacctctgttttctcttctctataatggggataataatatagcccagctcacagagatgctgtgaggactaaatgaaataataattctgggacccctggtgcagcacctgacatgtgctcagcaaatagtacctcttttctctggctctagtttctcagtcataggactgaagaaacacactgaataaccttcccaaatttcccccaagaagctaattttatcacaaatccccaagcttttttccctcatcccagaactgacctttgtgcttgatgaagcggggacagggggtccctggtatgtcagttcaagaagaatggtcagcaaaaagctgacacagatgaggtacctccacccagacatgatgccacctctggcctggatctgttgttcacatccagaagatctgagcccgatctccaaacccttgctcttttaaacctccaggtatcccttctcttgagagggagggaccatcctgaagggtggggaaggctctgaatgtggcattgaggctcacacaagccaggattgtccaagagctggggctggcatcttgcctggagaagggccagttctacgcttccttttttcccctcatccagctgtaagatgaatggaaactaaacataccagagtgctgggtctgtctgtttgctgtgttggctcagggtggggtttttctttcctataaacatccacaggagcccagtaactggggccagagaaaggtcacttagcactgatcatcttaaaaaggtagtggcgatgagagagggattggcaaggcaagcccccaatactggtcttccctggtattattgactttagcctagtgccgggagggacttactcaggatcctataacaatttaggggtcccatagacataataagacttacaatctctagaatagccagaggccaagacaggctggggcaggactgagaaagaatataacacagtggtttcaaaatacaggctccagacccagaccacatgggtttgaatctcagttctgccacttactgactgtataatactgagcaagttaattaacctctctgtagcctcagtttcttcatctataaaataagaatagtaatagcacctacttcataaagttcttatgaagattaagtgagtttgtacttttagaatgcttggcacatggtaagtgatcagtaaatagctgctaggaggagggcaggatgaggcatgacagagatcaaaagtctggaaagctccctgtcctctgagacctgagtggagggagaagggaggagctgaggtgctctggactcaggatctgcaggtcctgtggagggtgggggtgaggaatggggctgagaaaaaggaaagtacttgaaggtctgcacaaggactatcagcctcagtcagaatcctgccgaccctggccctccggcctctacccatccacacagggagcatagacagctccagtacttactctcaggggcaaaatctctgatgacattttacaaactgccccaggaacactcagatttgtcctagggcatttggcatcccaacaaagtcttctcattctggcatctgtgggtcccaaaacctgtcagttgccacctcgcacaagtccgcaccaagtttcctctcaggatttcctcacgagggagagtcctagctagagaacagctctgcttatacagcaacagagaaaactcccatcggctacccagtccttttctcttaaatatgaatgagtagccaaggagcctcaagcaaattaaggaagcctgtagcatgaaagcaaaatactaaaagaaacaaatagaacaactgaccctagagcaatttgaggatctgggaaacaaaagagaacttcaggggaaaaattgatactattctgaataagattcaagaagatataacatgcataaaacaagaactagatgccataaaacaggaacaatcagagaaaacagagattccttagaaattaaaaatatgttactgaaataatacattttccaggaccaggaaatgaggaaatcttccagaatgtagggcaaaaaagccaaggcaacagaaaatgtgagagaaaatttaagagagatggattaatctagcaaattagacattcaaataataggagttctagatagagaaaacaaaacaatgaaggaaactttattgaaaacatattaggccagatgtggtggctcacatctgtaatcccagcactttggggggttgaggcgggaggatcgcttgaggccaggagtttgagatcagcctggctaacatagtgagaccctgactctacaaaaaaaagtaaaaagaaatagccagtcgtgatggctctcatctgtaaatcccagctacttgggaagcagaggcgggaggattgcttga

SEQ ID NO: 1563763 - DNA, 4001 bp, Homo sapiens
aagtgcaaatgctcagttttgcttattcctcatcgcacccacaatcctggcagaagtattgcttgcatattaactgaatctatctacaagtcatgaaatgcttggcggtgaagaaaaaaaaaaaaaggattactgtgtggctatatttaactactggcctctaattagacctcccaaaaaatctgaccatgtttaacctacaaactaagcaggagaacaattacatatttgacctctgtcatttaatcaaaacctcaacaatgcaagagggtgttacttttgagctctaaaatgtataacacacaaaagctagttttactgcaggatttaatattgaaagtttccataataaaaagctggataagcacattaacatttcaaattgtgtgtacaatcaacttttactacatggattctcatttaactcaaaggactttttatatctccactttgaacacagaagttaaaactatatagagaacaagacaagtcaggacagatctgcaagcgccaacactttccagatttcatagaacacgaagacaatactattgccctttaaaattgagattatactgaggagtagtatacgaaccctgaaaacatagtaggtgtttaaaagaagtagaaataggactaaataaataatggataacattttggggaagagcttccccagttcctgtcaaagctagtagtttaaattacaacactggacctgcttcagatctctaaatagagggaaggggatgttgttcaacaagaaaaaaatttaaaaataattgaaaagtatcctcaaatttatttttacaagagaagagtgttttctttaggaaataccactctaaaaatatacaaggctcttgcagtaaaagggcacagtgaacacccaacactggcattaagatccacctcaattttgacagcttctttatctaatgtttaaagccacctatgaccagagagaaacggaaaatattcgcgcgctcaagcagaccacttgccccaacccatactgcttggagttaaaagtgccctttgctgctcaccccacctccacgaacactcagagatcatagaaagatttagtcttagaacttcatccacaccaaaaggaaagaaagaaatgttaaatctcccggtcttgctcacccccctgtgtcccctctgtccctggggagactatgcgcgcccctggaggtggggactgggcgacatgcccctccttgatccccaggtccctacacgttacccaagagacaatgacaaggagtcccagggcatctcctcaaactctctctgacctccctccaggacagctggtgtgagctggaacagacagaacatggcacgacacgcgggaatgcagagtgacagagggtgcggtaagcagaaggtgccgcaaggagacagaaccgaggcgaccgggtaaaccccagagacagcgtaagaggagcaagaggggccctcccagggaagctacattttctcctctgctaccagccttctttctttcgcccacccctcccccatcccgccctgggacagctaccttgccggtcagtatctgagttctgaccgtgcggctcaggagggcctccacgtcttgccgcgcctcctccttttgcacggcggtaggggtattgaaggcgattttcaccatagtgaatcttcgggctgcgcggtaaggcgctgctggaatcagcgtcctgggctgcagactgcaagaggagatcctgttagcccaaacagcacttactttatcttcagtctaacactactgcaagccgaggtctgggatacttatgacgcagtcccaaactggggggagaccgtgggcgggcccagggaggtgcctaaagggaggagcgagagggggcccaaaaggggcccaagtgcctgagttgggggtttgcgaggtggcgcggatttgccactgggggaagagcaggggaagtggagtccgtggccggctcaggctaaacgtgcctcacctgcacctcaggcatactcccacccactctctgcaacttcagataagagcaagacaggaaggaagcctgctgtgtcgtgtctttctgcctctgtccaggccacaatagcccctgactatgactgttttctcaaacttggacctgactccccgcagggcctgggactgtagcttggcagtaactcaaacttccttagttctggacccacccaggcccccaaagcgccattctacaaaggttctgttccttgataataatatcttccttttaaaggacacctagaatcctgtttatagttacccagttgattctttcaacaaattgttattttttttatttgcttgcttgtgttttgaaattttaatatctcaacctaaggcgatgctagatcagaaagatagggctcctgcctccccaacaccccattttgtagataagacatgatgagacagagaagggtggaaagcttacaataaattcctgaaataatctagatttttcactcttccaggtcagggaaaccagtgtaaagtctcaacccagagactgtttctgttcagccaccagctgtgaaacctgcagggggaaaaaaaaaacgtgtgtgtgtgtgtgtgtgtgtgtgtgtgtgtgtataagtacttatgtgttcaggaaggtggaggtggaggtggaggatacaaaatttagccagatgctaataccgatctaatggaggaaaaaacaataacttcaaaggggttgagttagaaattattcttggaacatttacatgtgcagccagtataatcaagctgtttcttcacagtcagtttttccaggttagtgatactgatagagaaccttaccaagtacaatgcaggctttggaggttgctgactggggtagcactggtacacagtttataaatagtcccgctgcagaagacaggagaaaggtctgttgtgtgaagacagtagcacttaccaaaacaacagcatcaaacaaaacaaaacaaagaaacagcttttgctacagaatttaccatctactcatctacctaagaaacggacttaaatatgttgagtcgccaccccttcatccgaaaaattccaacttggcgtttttcccactgatgtttccttgactcagaagcctgtctcctgtttccactgtgggacctttgtgaagacagcattcattttcttggataggccacagatgggaaggtggatggaggggaacagcggggagcctgtgccttacttagggccagaatcttaaaaagcaggatgtttgagtttgcttagaaatattggcatcctatgttctttcacttattattgctcaagattgaccattataatttaatatttatcaggcaacctttagtgtaagctgaggaactctcaccttcctagaatgtttctctttacagttgccttccgcttgcaatcacctttgtgacatctccactatggtctgtgctagtctggcccggtgatccacactcatggttgctcttgcacatttacttagtaagtgcaaggttctgggcgggattgtgatgtattatcttagtatatctttcctgaaatggggtcgggcagaaggagagggattcttttcattttttcagatgaatagatcaaaattatgataacgatcaagggagtatgtgatcaatttctgggtacataatattgagcaagtcacttcgtcttctcagatgtcagtttcttcatttgtgtcctgttgctgtgaggattatttggtataatgcaagaggaaataccttttaaattattatgaaaaggatagggagtgaaatgttttgttatcctgggattgttattttattctgtaacatacgcatgtttcaagcttataagaattattcttcttattatttacccttcaaccattcttaacattctagaactgcttaagatcccacagtacctgaatataggtcttactggaaaaggttaaacttctaagaatagtcacataaattgacatctaacttct

SEQ ID NO: 1563764 - DNA, 4001 bp, Homo sapiens
aataaaaacacaatgctttgttcagaccgactcctctctcagccctactctttccccctcccagcctaggctgacaagaagtggctaaagggaaagtatttaacaggagaactggtctgggaaagtggattgtgggttgcttaaactaagcaaagacgttgtgcaaccagtttttacctaaattatttttcattacttcccaagtttagagagcagcagttcactttatcagactgaacacagggaatgaggtcgcctttccctccaggccaccactggaatcaccttcaacacggttttgacttcttacacaatcagacggcgggaggggggaatctcatcctcagcttcatagataaacgcacctcacggcacacacacacaaacaactcgcgcacatctgaggccacggatttccttgcaactcaaagtcggagaagcggccaaacaagtttcttgccaaatccctagtagccacatatgtcccagggccgcacagcgataaaaactttgaaacatgcctccacataccaccattgtggtcactcactccagatcccgccaccccctcctcacaaataacaaactcaggctgccctgtgcaatttaaagctagactccaccgaagcactggctctgctgtgaaaagcgggagaaaaagattgaaggctattaaaaaaaacaacaaacaaacaaaaaacaaaacaaaacaaaacaaaaaaacaaactacggcccccggggcggagggaataaaacgaactcgaaagctggagaaaagttaactttgccgtgcccagcggtgggaaaatttccccggaagactagcaaagccctcacgattttcccacccccggaccgcccgacgctcggcggccacggacccgcagttcgaacaatgccgccagtgggagggaaagttcgccagcccgccgggcgcccgcgctcccgctcccgccgggtgggcacccgggcttcccggggtgcctcgccgcacccagcaccacccgttctcccctctccaggcactcggttctttccgccccccaacagctaaacagccagggcgcgccctcgctccctggagcatccgacccctggcggccgacagagcaggtcctcccgccacgggtctggccccgtcagccccgaagccaggcaaagggcaggaacggaggagggggcgccaggagggggcaccggaggaaagagccgcaacagttatggcgctcaattcctgcccggtgtagccgggagctgcagccgagctcgcgcgtccgcccccgccccccgcccgggccaccaggcactacccgggcgggcagaggggccaccaggcactttacctcagcccacacacgctctcggccccaaggcgccggggacgccggaggcgaccacgatgtggaaccggagcgacccggagcgcggcgaggccgggccgggactgtgcgctccgcgccgcccgcttccactcccggaggccgccgctcccgccgcccagccggtgcgacgcccccaacctcgcccgcgccgggtccggcctccgcggcgcctaccttcgcgcagctggctcgcggctcctgcccggctccacgccgcggcccggcaatgtgccgggtgagtccggtcggagtggtaaccgcccccctaaccgctcgctttcttctcttccctccctcgcacctgccccttaatcccctcctcgcccccgccccccgccggggccgccccccgcgcctcagctcccgccctcggccctcgtccgcccggcccgtcaggcctcagcgctgggcaggcggttgggcggcggcggcggctgaggcggcgcggagcactattgtattcctgacactgtgcgctcccacgctccgcctcttccctttccttcctcccccaacctctcctcccacccaccgccggccgcgctcgccctaccggagcggctcccagccgtctgcccgccgcgcgttcttctggcgggctgggcgccgtcgccacccgccgcctcgacgccccgcccactcgccgctcccgcacccgcggcgccgcgttccaggtgggctcccctcccgtccagctgggtgcgccactgcccgagacgccccagccccgccgagcgctagagaggacgaggtgcagatgcctcggctgtgttgaaatacaaactaagcttttcatggccccttccaactctgaagttccaaagtgggactctcatacatcaactcggtggccgctattgatttatgtcgcttgtgcttgaattacctgtaataataaagccaaggtggctattaacataattcatttattcagttgccagcacaggtggtttgtgatgttgtgtggctttttcgatgtgtccactggttaggctatcgcccacagttatttgatcgaatgccaatccaggtgttgctctggaggtattttgctgatgtaattaaagctcctaatcagttgacttaaagttagggagataatcctggataatctaggtgggcctgacggaatcagttggaaagcctttcaatcagggctgagggtgctgagtacgtcagagaaagagaatttcccctatggatgacacctttggcctatgtccattggttccagcctgctcctgatcttcccttcctgactgtatgccctacagattttggatttacttggccaccataatcgtctaagacaatagcttcgaagaaatgaatgaacagggagtatatatacgtatattcccaccacgcattcttctggcaggctgggcaccgtgggtgtatgtgtgtgtgtgtgtatatatatatgtatgtgtgtgtgtatgtatatatatatgtgtgtgtgtatatatatatgtgtgtgtgtgtatatatatatatatatatataatttcctactggttctgatcctttggttgaatcctaatatagatgtttaagcaacaaacctttttggcttacctctctgggtttggaaatgtgctatatgcaactatgatgaactcattctctttcttttttcttttccttttttttttgagtcagggtctcactctgtcgccaggctggaatgcagtggctcgatctcggctcactgcaacctctgggctccctgtcacccaggctagaatgcagtggtgagatctcttggctcactgcaacctcttggctcccttcaacctccacctccggggctgaagtgattctcccacctcagcctcccaagtagctgggactacaggcacatgccaccatggcccaacttatttatttatttatttatttggtagagacagtttcaccatgttgctcaggctggtcttgaattcctaagctcaagctatctgcctgcctgggcctcccaaagtgctaggattacaggcatgagctactgtcctgggctattttcgtttacatttctaggatgaacaataatgtaggctcttttgtattttgtctgttttccatgttaaagatctagttatattccataatatggaaatgcgtgagttctaaaatattcgtagtccttcagacttatctcactttattatacttatttaaaaataattatagattcatcagaagttgtaaaaaaaaatgtacagagtggtcccatgtaccctttgcccagtttcccccaatggtaatagataactataatacaatatagatattaacattaatacagtccacagaccttatccagatttcatcaattttcatgcactgatttctgagtctgtgtatatagttctgtgcaattttaacacatttaaatttgtgtaatcaccacaatcaactttttctccaccacaaagattcctcctgctacactttgtagtcacagtcaccgctttctcctcctctaatttctggcaacccctaacacgttctccatctctataaatttgtcatttcaagagtattacataaatggaatcataccttttgaaatcagcttttcttcactcagcatgattttcttgagatgtacccaa

SEQ ID NO: 1563765 - DNA, 4001 bp, Homo sapiens
ctcttaggttaaacaaaaaagaaaaaaaatctatttttacgtatccgaagagtaatcacatgatgctacaaaagcatgagaaccacactactcaaagggtacgaaggccgggacccatactcccattgtctacagatgttttggaagtattaaactaaataaaaacacaatgctttgttcagaccgactcctctctcagccctactctttccccctcccagcctaggctgacaagaagtggctaaagggaaagtatttaacaggagaactggtctgggaaagtggattgtgggttgcttaaactaagcaaagacgttgtgcaaccagtttttacctaaattatttttcattacttcccaagtttagagagcagcagttcactttatcagactgaacacagggaatgaggtcgcctttccctccaggccaccactggaatcaccttcaacacggttttgacttcttacacaatcagacggcgggaggggggaatctcatcctcagcttcatagataaacgcacctcacggcacacacacacaaacaactcgcgcacatctgaggccacggatttccttgcaactcaaagtcggagaagcggccaaacaagtttcttgccaaatccctagtagccacatatgtcccagggccgcacagcgataaaaactttgaaacatgcctccacataccaccattgtggtcactcactccagatcccgccaccccctcctcacaaataacaaactcaggctgccctgtgcaatttaaagctagactccaccgaagcactggctctgctgtgaaaagcgggagaaaaagattgaaggctattaaaaaaaacaacaaacaaacaaaaaacaaaacaaaacaaaacaaaaaaacaaactacggcccccggggcggagggaataaaacgaactcgaaagctggagaaaagttaactttgccgtgcccagcggtgggaaaatttccccggaagactagcaaagccctcacgattttcccacccccggaccgcccgacgctcggcggccacggacccgcagttcgaacaatgccgccagtgggagggaaagttcgccagcccgccgggcgcccgcgctcccgctcccgccgggtgggcacccgggcttcccggggtgcctcgccgcacccagcaccacccgttctcccctctccaggcactcggttctttccgccccccaacagctaaacagccagggcgcgccctcgctccctggagcatccgacccctggcggccgacagagcaggtcctcccgccacgggtctggccccgtcagccccgaagccaggcaaagggcaggaacggaggagggggcgccaggagggggcaccggaggaaagagccgcaacagttatggcgctcaattcctgcccggtgtagccgggagctgcagccgagctcgcgcgtccgcccccgccccccgcccgggccaccaggcactacccgggcgggcagaggggccaccaggcactttacctcagcccacacacgctctcggccccaaggcgccggggacgccggaggcgaccacgatgtggaaccggagcgacccggagcgcggcgaggccgggccgggactgtgcgctccgcgccgcccgcttccactcccggaggccgccgctcccgccgcccagccggtgcgacgcccccaacctcgcccgcgccgggtccggcctccgcggcgcctaccttcgcgcagctggctcgcggctcctgcccggctccacgccgcggcccggcaatgtgccgggtgagtccggtcggagtggtaaccgcccccctaaccgctcgctttcttctcttccctccctcgcacctgccccttaatcccctcctcgcccccgccccccgccggggccgccccccgcgcctcagctcccgccctcggccctcgtccgcccggcccgtcaggcctcagcgctgggcaggcggttgggcggcggcggcggctgaggcggcgcggagcactattgtattcctgacactgtgcgctcccacgctccgcctcttccctttccttcctcccccaacctctcctcccacccaccgccggccgcgctcgccctaccggagcggctcccagccgtctgcccgccgcgcgttcttctggcgggctgggcgccgtcgccacccgccgcctcgacgccccgcccactcgccgctcccgcacccgcggcgccgcgttccaggtgggctcccctcccgtccagctgggtgcgccactgcccgagacgccccagccccgccgagcgctagagaggacgaggtgcagatgcctcggctgtgttgaaatacaaactaagcttttcatggccccttccaactctgaagttccaaagtgggactctcatacatcaactcggtggccgctattgatttatgtcgcttgtgcttgaattacctgtaataataaagccaaggtggctattaacataattcatttattcagttgccagcacaggtggtttgtgatgttgtgtggctttttcgatgtgtccactggttaggctatcgcccacagttatttgatcgaatgccaatccaggtgttgctctggaggtattttgctgatgtaattaaagctcctaatcagttgacttaaagttagggagataatcctggataatctaggtgggcctgacggaatcagttggaaagcctttcaatcagggctgagggtgctgagtacgtcagagaaagagaatttcccctatggatgacacctttggcctatgtccattggttccagcctgctcctgatcttcccttcctgactgtatgccctacagattttggatttacttggccaccataatcgtctaagacaatagcttcgaagaaatgaatgaacagggagtatatatacgtatattcccaccacgcattcttctggcaggctgggcaccgtgggtgtatgtgtgtgtgtgtgtatatatatatgtatgtgtgtgtgtatgtatatatatatgtgtgtgtgtatatatatatgtgtgtgtgtgtatatatatatatatatatataatttcctactggttctgatcctttggttgaatcctaatatagatgtttaagcaacaaacctttttggcttacctctctgggtttggaaatgtgctatatgcaactatgatgaactcattctctttcttttttcttttccttttttttttgagtcagggtctcactctgtcgccaggctggaatgcagtggctcgatctcggctcactgcaacctctgggctccctgtcacccaggctagaatgcagtggtgagatctcttggctcactgcaacctcttggctcccttcaacctccacctccggggctgaagtgattctcccacctcagcctcccaagtagctgggactacaggcacatgccaccatggcccaacttatttatttatttatttatttggtagagacagtttcaccatgttgctcaggctggtcttgaattcctaagctcaagctatctgcctgcctgggcctcccaaagtgctaggattacaggcatgagctactgtcctgggctattttcgtttacatttctaggatgaacaataatgtaggctcttttgtattttgtctgttttccatgttaaagatctagttatattccataatatggaaatgcgtgagttctaaaatattcgtagtccttcagacttatctcactttattatacttatttaaaaataattatagattcatcagaagttgtaaaaaaaaatgtacagagtggtcccatgtaccctttgcccagtttcccccaatggtaatagataactataatacaatatagatattaacattaatacagtccacagaccttatccagatttcatcaattttcatgcactgatttctgagtctgtgtatatagttctgtgcaattttaacacatttaaatttgtgtaatcaccacaatcaactttttctccaccacaaagattcctcctgctacactttgtag

SEQ ID NO: 1563766 - DNA, 4001 bp, Homo sapiens
cgttttgttttgttttctgttgtttcaaacaatagtgtggcatcttaggagagtgactttcagggtaggactcggagggctggaaaccaggtgcctggggatcggccctctcctggctctgtccaggatgtctgggtaatttcaccacaggaggtgagcactgggtcttccattccctgaagacgcagaaggactacagagcgtgcccatttctctgacacccacgagacgctgcttctacgacttagaacaaactcaactgcacactcgcgaacgcgccagcttcaccagccggttcaagatcatccccgagggtaaggggaatcacttccacattccacccttattaatatggcctcctctggcagcttaattcccagggcctctagggggacccccccccccaccccttgacccagctctggcaggaggggcgcccagtttaagagccaagggtttggcttccagttcccgcccagccaggggaacccctccccccagcccccatttctccttttggtccctccagagtttccctgaagcgagaaattgggaacttggaacaggtgggcacctagggatagaggcgagaagaagaaggagagaaggatgagagaagagaaaaataagcggaggatttcagagctcgcacgctcgacagggctggtacaggcagcagctgcactcgctcgcgctgagtccggaacctgctctcgtgcgcccacccgcacccggagcctcgcgcaagtcccgcgggggtccgcgccacagggcagagtcccggcaacccgctggagccaagcgcgcggctcccggagcctcccacacaagcgcgcgcgcacacacacatactccccaccctcaggctgaaagaacctacgttcggggtttgggggacggttcccccgggactcgttgaggagtatccgaatacggccccgccaaatcccctgtccccggcacttcttccctgacgctctacgctagtccagggcaagaccttgaatctttggggttccgaattgaggcgcgcacagccactcgcacccccaacacgcgcatacacgcaccctggaacacgacttggcacaagtaccctggctggggctccaagggtgggcagcgagctctgagccctcagagagtgaaaaccatctttcaaaagagacaaagtgtcggcccgcgggcacctgcggggctggggctcgaggtgaggtccccaggcgcagccggacgcgcctcccagactccctcccagtgccccggagcgcctgggactttgcgggagtcgccgcccgcccggagtctcgcgcactccaattcccgggaaaccgccacatccacacacccactcccagcatccacgactctccctccccagggaaatcgcctttggtttcctgctgggaaggagggagttggggcaagatgtctcgggcttctttttcttttcaggagccgggaagaggctggaaaggagagttccagcaccccgactgtaagatccacgcccaggggaagccaggatcagccggcggcgctggccgagaactttgcgagcccaggctgggaggcgcgcgccccggtgcgcccacgccgcggccgcagccccagaaagaacccgggcgggggcctccccgtacctggaagtgctggaagaaggcggagatgcgagtgatctgcaggctcaggcacctggaggcgcagcgagcgcgctggacgctcccggcagacagcgactcgtccagccgccgcgcagcagccgcgccggggccggccgccaggcagccgctggaggccgccagccagaggcagagggtcaggaccgcgccgggcaccccgggcaccatggctgcgggtcgagggcgagggcgagggcgccgggcgcgggccgaggctccctgctccgcgccggggctgcactgctgaggaccaggcagacgccgcgactgagccggaaagttcaatccttcaactccggccggaccctcctcgccgacctccctcccagctcgccctcgaggggtggggtgagggggacaggaggccgcaccattggctggaaggcgtgtgagtgacaggggggccgggcgcagggcccatgggccggtctcgtcagctgcgagcccgggcgctccgggggagggcgacgccgagcggctttccacgccgcgcaggtctcgaggggcccagctcccacgcaggcgcctctcccgttcgcaccaaccgcttcctgcccctcccaccttccccctccgtccaggtaaacgtcggtgtgagcaggtccaggcctgccaggaggggtgctcccttcagcaggagggaagaggcctcaggacccccaggggcgtcccacctgcctggggattgaccccgcgcccctaagtggcttgctttctccccgacctcccctgggtccaggcttttcccacgctttcacatattcgaatttcctttgcccaggtagtggaaagaagtgaagaaaacaaatggcagtaagacagacggggaggggagcgtggacatttgccctacagtgtcccggagacaaattcctccttctctccctcttgcatttcttccgtccttcccgcatccctccctccctccctcccgcactgttttccctggagacagtctcagtgcatagctaaccacctttaggtccacacgccttgtttcctcaggtgtctgtttttctagtaagccttgcacgccccaaagtgagtgatttattctaaatagacttgcgtcttaatctctttctttccccacgatttgcccgagcctcttgactcaggctttttagctttggaatggctgctccgtcctctcctgtcgtttttgtctagtgttctctcagcacacaaattctccctccccagccaggatcctgccacagaaagacaggaggcattgataagacacaacttgtaacaaagctctacactcccctgagccccatcaggaagtgacagtccccttgcaggtaggagagcccagagaaaaaagacccaggcacactcctattcgaatggacaacaactgactgctgttcctttgctctgacatctccaccctctcctacccaattgcactttcaccttcgaaaacgggatctctataagcacccagctaagcacagtcagggtatctagatgcactcgctctactcaaagctacatcagaaggctggaatcctctttgcacaaagcctatatagttgttttgcaatttcccacccttttccctattcttatacacaggttccactctgcaattttgagatctgcctgttaacaaattgcaatgacagccatctgcagctatcctattatgagtgcttttcaaatacatcatcttacatgtgtatttcttcacatagcttaaatcagaaaggccagtcaaattaattggccttggtgtgtttctcagcgaattagaaaatcagggtcatcttgttcaaaaggttctataggcaaagccagtttcatggacatgcaagctgtacaatggtacagtcgcactcttagaaggcctgttctgccatcaccatcctgaaactcttcacaatgacagtggcctgttaggaactgggccgcggcaggccagggaacattactgcctgagctgtgcctcaggtgagaaatcagtggcagcattagattctgataggagcttcagtcctatagtgaactatgcatgcgagatgtctaggtagcgcactccttatgagaatctaatgtcgatctgagatggagcagtttcatccccaagccatcacttgctacccccaggtccatggaaaaattgtcttccatgaaaccagtccctggtgccaaaaaggttggggccactctttacttgggctggaaacctagtaattttggcataagcttacacgacttcaatgatttgttttaaaattgctcagaattgcaaatggaaatattttttaagtatgttaaacataatattaacgaagagtaaagaagctaact

SEQ ID NO: 1563767 - DNA, 4001 bp, Homo sapiens
tctccttctttcggtcccgatactcttcaaggcagcagtcaccgactagctcgggaaccaggccgtagaaagccagctcttcgtcgaaggcctggatgcactcctgccgtgggcaatgcagccgccccgttcggtagaagttcagcacatggcggaacatgtcagggtcgcgatcgaagaagtactcgcctgagtcagcatcgtagaagaattccttctccgagctgcccagcaaggtgtctgggtagcggtccagcgtattcttccaagtctcaaagcgccgtccgctcacgttcaccaccagaacctcatctcctcgagatgccttcacccccggtgccgggggcaggggttgctgggccaggggcagccagcccactgctgctgcccgagcaaaaggcagccacgtggccaggcctgccgccatcgtgccactccccaagcccagggagacttagtgagggtggcgtttaggagaatgtggctgtctccaggatggtgggggcttggagacaccttgagccacccaaacaaggaaactgggggtgtctagagaggccaagaggaaccaggaggaagaactaaagagatgggaaggagtctgggggacatttacagaacctaggaggggcctgggcaatgttctgagggactgagaagggccttggggacatggagaagagcagaaaaggggtgtggggatggggccaagaaggagctgagggagggtttagagagactgagatgattctaaaggagtcagcctgtgcctgagaggtgtctgggggcgtctagaggggccaagaaacacgtggggaattctctgcactctcaagagtctcagggaaggcagaagagcctggaattcctttgcagtggtggagaggagactggggcatccagaggggtagaaatgggaccagaggtgcttgaaagagactgagagtgcctggaagtgggggttctagaggggctgagacaggtgaggagggttgtccacaccctcaagacttctaggggaagcataagagggttagacccccctcatggatctggaaagggagctggtgcatcttgaggggtggctgtggatccaggaggttgtaaagaggctgaaaggtgtcttgggactgcctagagttgccaagaatagcccgggggggtgtctatactctacaggagttctggggaagaaaggagaggccagagcctcctagtagggctggagaggggaaggggttatctaaaggggtagacagggggctgggttattttttgagaggctgagagttatctgggggaggtgggtatctagacgggccaacaaagcctggtcgacactctcaggagttctacagggaggaaaaaggggcctggggaattccaagggccgggactcaaatgttaggaagttgggcacaatcccagagcacccaggggatctatgaagactaaataagaggaagggggttaaccccaaaatgggattaagaggggggtggggtgttgaaagggagttgggtgtgtctccagggaggggggctcctgggctttgcaggaagctggcaggagacgccgggagaaggctgggtcccaccgttgggggcaggtctggggaaaccacaccccgaggggctggcggtgtgtactgggcagtggcagtagcagcagcggcagcaggaggaagagaagcaaccacagccaggcataggagagaaggtggcataggcagggggagggtgcggggtccctggaaggaggcctgggaagggcaaggtccagtgggacccctggggactatcccaggatgggttagggcgtgggggctggaccagggaaggatgaggacagcgctagtggtggtccccctccccctctctctcggggcgtcctcacctgtgtccccgctgcaggagcagcaacagcggtggggctgggggtaccaaacacccgagctcctggccccctctgcagagctgcctgagttctcctcctcctctggctctctctccccgcccctctgagcttgccgggagatggagaggcagggaggggcctcgtggctccctgagccccctcccctaggacagccagagagggaccctggggagactccgcctcctacaaagctggttgggcctcagtcgcgtcatctggaaaatgggggtggcagggaacttcgccaattctctccacctccttcctggactcccctctcttcctgcccagctcctacccgctctgcccccaggggcccccacccccactcgcctgaatcagcagcacttagcagatccgatcgatgggaaggcgtctgttaatggccccagagcggagtgccacagggaatgatgcagcgctgtcccctccctgccccccagactgtggaaaggcaggagagccaggagtcgggggtaattgctggggagtgtttctctagatggccaagcttccgaagccgcccccttgaggggcgcagcatgggttacagccccagctctaagacttcggctgtgggattggagcacgggacttcctgtttttagatatgaaatgagggtaaagggaatgtagagggggacaatccaggtcccacccccctaccatctcaggcaggccccactccgagggggtagtctctcttatctgtccatatccagtggcctcaaatcacacctcctccgctagagggctctgcttctggatggcaggagcactgattatggaatgcctctggctggctatgggtgggttcaaaccccagctttgccactgacttgctgcatccttgagcaagtgacttgcattgtttcctcagttgtcagatggagagacttatcccaacttgatagcgtcatttggagcattacatgatgtgaaaggtgatagcactggacacagctcacaccagggatgcttaatcttaattaaaggagtgtgatgacaggggcactgtaatgcagggccaggcctagcctttcacccaagatttacccacccgtgtaaacttccaattgcccatttggcacactcctgatttgtccatttctacatccattcctccacctacccatccacccattctcccacccacacaatcaattcctctatccatccctccacccacccgtccacttagtcgttaatctacccacccactcattcatccatttgtaagttcaccccatttggctgtttgccaatctatctgtatgtatccatcctctgcccatctcttcccacccggaacacatgcagggtgacatcctctgcccatctctgtccatacatagctccacttgtcatttcttctcccactctttacccttcccattcattagctcatctacccatccatccattcccccaaccattggtccatttactcctaacctgtccataaacccatccatccacctgtctacctaaatcatccacccatttgtccatagacctattatccatctgtccatttacatctctactatccatcctctatccacctaccaatctatctacccatttattcatctaaccacctatccatccatccatttatttcccaatctatccatcatcagtccatgcaaccgttcacttatacatccatcggtccatccaaccacttatccatcctcccatctgtctactcatctatacccacaatcccatacatgtctacccatgtacatatctgcaggtatttcagctccactcagtttgaggggctggtcagcagtaaatggagacaggctggatgagggtggggaaaagagagtaacgttgcagccagagacctctctccctattccaatggtgtaaacctccccgcccccagcatattcctcctggttgaaaagaacgagacgagacagtcagtgggtgggcccgtctggccagatggtattttggctgcatagcctttacacacacacacacacacgtgttgctagaacgctgaacatggaccacacacccacccagcatccccaatcccaaat

SEQ ID NO: 1563768 - DNA, 4001 bp, Homo sapiens
acatctgtaatcccagctactcaggaggctacttgggaggctgaggcaggagaatcgcttgaacccaggaggcagaggcttcagtaagccttgattgtgccactgtactccagcctgggtgacacagtgagactctgtctcaaaaaaagtaaaataaaaacaattattaaggtggcttctaaaaattaggtttgataatagctaaaagggatgggccttaaaggttttttaaagtgcatcctgaaagactgcattgtgatctttgaaagtgcttcagaaataagaaaaaaggagggataagtaataaagtaggtataacttttgaaacacttgaaaaaacaacccatttagccatataaacattttcttcacccataatcacacatatcaaattggaactggttacatagatataaatatcacaaccacccaacccccaaatccaaacatcatttccaaaagcaaaagaaaaaggattccttctccatatggtactgggtcttaaggctggaatctctgagagaagagtcttgcgttattgtttaaacaacctttattacctgcctctgacattccccagggttacagagcagggggcatctgagcctcaagttccacggatgaagcagacactgcaataacaactgaatcaatagaggagaggcatttggaagtactggggtgatacacccagtaatggtaatcctcagcagaagatggcatagctaccaaaaatcaggcgttaccactgggatgaaaactggggaggcaagaaaatcatacggttggagtcatagatcatttccctccccgttgagcactcctcccccttccgtcccccattaagttcattctatcccacagactggtcctagtgtcctgctagctccctgctgaaagagagagggagggaaaagatgtctgaggtctcttcatttcctttgtctctgtccctaaggcaactggaagctggagctgctgcagtcggcctggcaagcccgttggctctgcagagtgagcagtccctggcagcccctggagcagctgccagttagacggcccagagttctgatagaatgcattgcttcagttcagtgccaagtgttggacgtgttggattcagttcccagagggctggagcgtgctgtcagggctgtctgaagacaagagagcagaggcagtttagtgcagttggatgtgcggggtaggggtggaggcgcaggggtgaagagggagaaactggcccgaatgggtaaggtggtgcttctccttccagggccttccagacaaggtctcctggcctctcaccattatctgggcctcagatgaggcgaaccctggaagggagttgggggtggaaggtgggaggcgcgcccagggatgagcgagatgaggagggcgcgaaccagcaatctggggctgtggttttagacccgctcagcgccctgggcgagggcaggcagcccctcggaggcaagctggcggcggccctcggcctgggagcccgcggcagcctcggcgtcggcggtcagggcgcctcccggggcccattcgtgctcggcgcaagcctgggacggctcgtccttggcctcgacgagcttacgggagcgggtgtaggccaggatgaggcctccggccaagcaggcgtagaagatcatgatgagcaggatgtagagataggcgtcgtcgcccttggcgctggtcacctcgcggcccacgaaagggtcaggcacgacccccatgcccatgctgggacgagggccagcgcccaagccgctggcattaccccggtggtgcagctcgagcaacaggcggctcagaagggttcgcagccgctggctctcgctgcagttcatggctttcggggagtgacacggcggctccaggacgctgctgacctttccccctgggcgaggggaagcgagctagcgagcgggccggccggcgggcagggctcagcagcggaaacagcggtagcacccagctctccggcgagcgcgcagtggctgggggcgccgacggcggggcctccttattccctcactcccgcccctcctccccttccccaccacgccccctccggcccgcggccgcctcttcccaggctctggctgtctcgctgctccagggaaaggggacagctggtggggggaggagaaggggacaagagtgggggcgaggctgggagacgggcggagggggcgggggctcggaatgcgcgaggccccaggcagcagacgctggcagggcagcttgctggggccaagcctggaccctgggctgcggaagagaattccttccaagttctggccacctgccctgcaggccaggctttggcccagatacagcatttggccccctaaggcagctctgccttggggcgctcaagggagagggcagacgcctttccgcagcagagaccccttgtccacattttatggaagttactcccatatacagggacccaggcctatctttctagtcctcattcctttccttttccccccgccccccttttcacccccctcccaccttgtcggaggagagcatcttattcagaagatgctcaggctgaatttggtgactgagtgctcaggcacctgctagaaggccaaggcagagtagaactccctggttatccaaaatggtttctggtgatataagtgatattacaccttcttggaagcacccctgctctgatgtcctatgacactttttgaaaagtcaacacatcttagcacatgaatgtactattcataatgggagcctgtttcccatgggtaagtaagccatcttcccagaagtgaaaccaagttcttccaataagagtagcatgcacattttaaaaggccctttgactacactctgtggatatctcgggatctgaaaagtgccagttctagagaatatgctcaccctactcccagttaggccagcaaacagctgtgtgcctctctagacttggtaacaggtctaggccctaatggcttttagggcagccatttttttctcaaaggctgtctttttttaggggaaaacaaggcaccaagacaaagatcaggccagatatgttaaattggaaacagactgagcttcacaaaggaaaagggttggtttgtagatggtggggtagaaaaaatgaggtagtgctggctaggtctggttgtccatagttgccaaatgagagcagaaagcaagaaaagtgtatgaccttaggcacaccttgaaaataatgctgcctgttcaagaccgttcagtccagggaccattcaatctataggtgccatgggttaaaaaaggaaggttttccgatgcctcttccccaaccgttcttcagcccaccatccacccaggggctgtagccttctgtgtgttcaggtgaggttggcaccaaactgtatccagggtctcaaacagagccttgcttcacagcctctaaacaggcctcagagacattccacatgaccctgacactggctcccttctaatcaccttgcctcaatattctcacctcagagggcctcaggaaagaattgttaaagcaacttggcaggatgaatgccagaggacacagccagagaattttcaaagcactgctaacctagtgatatgactgttgagctaaaaagacttctcttatctgttaaaacaggagtccccaacctcccaggctgctggaccttggcctgttaggaaccagccgcacagaaagaggtgagcagagggcaagtgagcattatcgcctgagctacacctcctgtcagatcagcagtggcattagagtctcagaagagctcaaaccgtattgtgaactgcgcatgccatggatctacaattgcatgctctttatgagaatctaatgcctgatgatctgaagtgaaacagtttcatcctgaaactatccacccctccccagtgtccatgaaaaaaattgtcttccacaaaaccagtctctggtgccaaaaaggttgaggactgctgtgttaacatatacctagaaa

SEQ ID NO: 1563769 - DNA, 4001 bp, Homo sapiens
tctatctgaaaccatcctagatctgtggctgagcaccagaaagcaccaagttggataaggaggcctgtggtgccctcctcaggtgggaatgaagcttcctattccatttcagccaggagacacccactcaaaaacacccttttccagcaaagctcaatttctgcccttggaatcccaactgatcactgaacattatcatcacttttccaccatatcagcaaggcagcagcttgccctagcccttgggagacttctagcctgaagccaggcctaggaggaaagctatggcctttgttgctgacccctggcaatcatgttccaaaagggacagaattccatggctccattctgttctgcgggcccaagagtgccctatcctctgggatctcctacatcctggaccagaggagagtagaaatcttctgagaaggactcacaccccaccaccaagctgaccggtccaaacatctccataggaagtcaagtctgcgggatgatgtgcagaaaaggccttgacattgccttcaacgaggaaaagaagaggacaattccctgaacccacctcaagggagacagagcaatccctgtgagactgatttcctgactggtccagcaggccaggatattatcatagatgaattggcctggcaaggtatgagtaaatatgagtcaacctacataggaataaaccaatgaccacatcaaacaccctcacagtcacaataattaccacttatctagtgcgtactacatacagacgctacctagtttaattcaatcctctaaataaccatttctgggatccatttcacgggctcagagagattacttctactttcccaaggtcacacagctgctcagcttcaaagtggagttttgaactcaagtctgtctcccttcaggactgcgatctttctattaatactatactatgctgcctgccttaaaggaagtgatgacaacagattggagaaacgtcttatttttacagcctcgacctaggtggcccgggctaagagatgtgcggggtgcctctctgtgaactccctccggcccactaggaatccctgtcttaaacccggagtgattctgaagggccggggtgggggtggatctctgactccaggtcacctgtgggcctcacaccacgagaggacccctggcccaacaccctttttccgatccgcgccgcaaccacaacggtcccagccaccccctctccccacctcgagctgccctccgccccagacttcgccgctggctatcctactgcttcattccgtctcgccgccggcgaaaaccggccccggggcttaccgcgggtgggcggatcttgcaaatgcccgatttctctgcgatgggcctgattttcgcgatgtagccaagagggtctcggaactcggcccagctaggctcgaacaccgggcactccggtggcggtaggaaatcgtcggaccccggctccatggtgggcccgaggtctgggccagggatcgggaggcttggaccgcccttaaggactcatggcgccgccgctgtttgaagccgaggcaatgctcggaggctaggccctaagcggggcagccgccgcccgccgagggcctaagggggcgtgtggccgtcgtgctctgagagtctcaggctgactctactgctaccgcctcttcgtcccgctccgtttcttccaaactgtgtggttgcctccccactaccgcagccttcgccaccacagttacctcccaaacgccgcggccttcagcgccgccgccgccatcttggtttgtcagcgtctcccctccccacaccacaacaaaccggatccttccgcggggtgtccttccgagcctcgtatacgttgcgtcacaccaagccctaggaaaccttcatatagtggagaccgagctaaataggctggtatgggtttctatttggaaggggttactcaaaagtaccaccccggactgagagaaaatagttcattgcaacggcggaggaacaagattgtaattagtttgccggatcgtctttccggatggaccggcggtgcacgtttaaaggccagtgatgcgcatgcgcgttatggagaccggaagaggagctggtgtccgtgggtggtggagtcaaaccggcactcccccgcagacctcaaccaggtcgctagccccgcaccagtgttctctgtcccttctccctggtcttaacggtatgggccgcggaaggcggctctgggagcctgattgcaaaggaccccttatgctggcccgcgggatggggggagatgtactaggctccagctctagacactgacacctctggggctttgaaataaggaaggcaggaagctgctcactccccggggattatggatttttaggattctgagtcccaagtaaaggaaggaaatctttatttcatccaaggttacaggtagagagatggggtttcgattcttaccccccaaaagtcactgggagtcagcattttaatgaacgctttcaactgttctgtattcacttttaccatgtacacatttgtggcatatactcctacaaaataagcctgtgtgtatgtatactttaactattggatgtttagcaacggcgtatttatccagtgtcaactgtgtaaaacacctgtttgcccatttgtgagcctacagtgcacttaccaaacatccgtgtacttttattgtatttattgtgtatagcccctgtgcatttggtaccaactgtatgtacatttagtcctatcgtgtgcatgttccttgagcagtttctgaataggttcattgcaactacagtactttgaatgagtatcatcaaaccagtactttgtacatatacatcaggcatctactgattggaggatcatctgtgtcattcatcagctgtggacctactgcatatagtttgaacacctactgtgcaaatatttgagtacttgcgtacatgctgattaagtaattttgttttcccccatcagactatgaattccttaagggcagggaccatgtggccttatacatccttagcacttggcatgttaagcagtaaatgaatgttgagtaaacaaaagaaaaatgaataaatgtccttagtatatattgactgaaaaatatgaatactttttgcaaacatttcctgtttaacatattaaacatccactgtaagctcgaggcagatagggagtgtcataccttcgtgcagttaactgttcctaatcagatactgtgccaattaggtccatcctgcctacttcaggactgagctaaggacatcctggctgagggaacagggcacacaggtaggaaggagctcatgccctgggctcaaaagagtcatgccttgcagtcccaccagctctgccattttctagtttgtaaccttgaacaagtcccaacttctgtaactgaaatggggataatacataccttgcagaattgttgtgtacttggcacatagcaggccctcagtatctggtagctgttatttttatttctgagagtcaacaaccaatatgccaaaactcattaagaatctcctttgtgtcagacactgtgctagtgcttttgtatttttttttttatcacctgaatccttatattaccttgaatgttcaagatctttatccccacttggctcgtgtggagacttgtcccaagtgacacagatattaagtgacatctttctagttttctaggtgtcaggggaaacctcagcccctctccaccagaaacacaggtggatgatccaactgaacagctgtctggacaggaagcaggaaaactaggcaaagtgatgctaatcacagtaatatcactagcctctcacatggataagcatctaattgcctacatggctagttcataccaattatttcccttaatctttgcaacagtcttcagaaagatgtaggtgaatttacccagtctgtagatgaggaaccaagttccagaaagattaaacaacttgcccaatgatacacaggaagttgctgactct

SEQ ID NO: 1563770 - DNA, 4001 bp, Homo sapiens
agctatgatttcagctagaaaagaaaatgtctaacggatacaacacccatagcacacactccaactttcacggtcccaattacgaagaaagtattcaaataccattgcaatcagattttggtcaggaaatataaactgatgcatacagattgagactccagcctttgttcaatagcttacagatggataactaaatgtgctacaggttgataagcatttaccaggcttatgcatgctgcttccaagcttatgaaaggtataagaattctatatgcaaataatcttgggtaattttttttaaacaccactgagctacacactccgaaggaaaggcttattcacggctactatttatttccatgtttacctctacaccctccccctaaccccccccttcactttctcctcccaccctgtcccgccatcttgggccgataggagcagccattacttaactaaatgacagtgccaacaactttccacacaaataaaaaaagactacaccccgaatcctccccagcctcccctgtcagacacacaggaaatgaggctccaggaagagaacacgtttacaaataactacggtatttctatgccaaaaagacccaaaaagtaaacaagtcacctaacttcaggtaacacacactgcaatcgagatacatgtcaacagcccaatgcaaactcttcaccgacctaaactccgtgaaacttcccccttctgggagcggggacacaagaaagcctaaaacatttggttagcagtaggcatcacgaacagcctgcttgaaggaaaagaatttttttaaacccgtagaggcaagttaagtccgaaatttgggaaaatctgaacacactcacgatcccttgaccctaaacaggcacctcgaagatcatcggcctaccctcaaaaagctgtaaaatagcaggcagttgtgtcgacccagttgagcccggccccaaagcgatcccgtctctgttcctccagctacaagaggaaaagagcgatttcgcaagggagcaagcagggtacccgggggtggggggagagcagaggcaggaaatagtttccggaagcccctcgaccatcgtccgtggccacaatgagcacagacccggccgcggggcccggggcgagcgcggcgccggccagggagacggtgtccgcgctccgactcgcagctgccttaccttgcccagtagggccttcgtcctggcgccatcttcatgaaatctcacgaacccaaagaggcggctgtggagacagacacagtttactcgttaacgctcagggaacgccaccgacccgtccctgcccgagcccgaggccccagcggaggcggcgcgaagagcgccaaaccgaggtgcccgccccgccgccgccagagacaagccgcgctcggtcctcccgggagagcggctactgcccgtccggagccgaccgggcgagtgacggcggcccgtacctgtccagtccgccgagcgcctccctctcctcggctgtcaggctgggggacgcctcctcgctctcgccgctcgcttttcccgccgccattttcttttcctcatcaccgaaagcggcggcggcagcggcggcggtagcgagcgacactccgcaggatttcatggaaacgcagcgaattcacaactccaacgccgacaccccccctcggaccggggcccgcagtgacgcccccaatctgcgcgcgggaccagcacaccaactttatcgccgcctcctcctccgccgcgggcggcggcgacgaaaaatcccaacgcggcggcggtgaaggcggcggcggcggcggcaggggctgcggagcccccgggtcggcagcggcggctttcggctgtagggtcacatcgcggggttgggcagggggcagccacaggcggggacggcgggaacggccggagcgcgcggggctggggagcactgaggggattcgttggagacacaaacttccccggcaccagcacaaagttgttgtaattgtgtcacacagcgaaccccacgccgccgccgtgaccccccctccccgcccggctggcgccaccaatcggcgcggcccgcacgcctcacgtgacctttgttgactcacgtcagccgtggctccacttaacttgctagctgcccgagccccgcccaccgaggccgccaccgagatgggagcgggacgcaggccaattctagccggtggttggctgctgggcgcgtctgtcgggggaagggttgtcaccgagagggagcttcctgttaggttgtgctggttaaatacactggggcagagaatggagggtccgggccgtgtcacctcgggaaccgcggcgggctctggagggggaggggagtggtggggaagggcgaggtccggcaccgcccgcggcgggcgcgagcggcgggcgaagacgccaaggacggcatttgcctgcccgcgagctctgggatgtgcccagaccgcggctccggccgtcccgcgcgcgctccaggggtcccgggaccccacagggcctggtacaggtcgcgtagccgggaggcggcgcacggccctcgacctctgccctccgaagaaggctcagacttttggcactgctggaaataatggcctccgcgaggagggcgctcggggagcggctgccggtcccgtgccccgcggtccgggtgccgccctaggccagacctgcgctggcagccccgatcacctcacccgcgccgaaagtgaagggggaagggctcccctgacccccgcccatacgccccaggccggagggaatgaagagtcgcccgcggggcctggcttgccgaccatggctccccaccgccaaaggtctgtctgttggcggcactttggggccagattttcgtgctgtgtttaccctgtgtcttatcagtagttcattacagtcttacaagaaaaagcaatgagaaattgtgaagcgggatctgcagaatgttgggttctattgccatgatttcagtggagccttcttacaaaagtaggggctgcttgtggacagacctgagagaagacataattaaatcatcacagctggtggcccaagaaatcctttctatcccccaaaacctgcaggtttgtaacccctagacaacagtaacattttgttgttctgtctctcaggtgcaggggaaaggctttagtctgacttttaatctttactataggtgaaaaaaaaataggcctttcgactactcttctcaaaaggcaaatttatttactaagctgtatgtcttataacagggataggaaaaaattgatagacatataaggacaagattctgtttataaacggagttttttatattttcaataggttttccacctgtaaccaataaaaattatatatttaaacttggatttcaaaatatgacgaagacaattcagtgctgacccagtaattcctaccagtattcagcgggaagctatgggaatcccaactgattttgcacacagttttaaattgttcccctgagactagtaactagacgaacaaactgtagttttgtatagattatagttcatgtttaattacttcctctgaaacacctttccctttatgatactccattttgcttgaatgagtgtgtacaaagggccaaatcttttctacggctaaattaatacattgttaactttgtcacaaatggtgacatttaaagccaaggaaattttgaccccagtaactcgctcgcacactctctcatacacacacacacacacacacacatacacacacacttgcacaagcacagatagacattttgctggtatttgactatctccctgaagttagcagttcctgactcaggtccttttcaaggattataaggctactcaatcccggccgggctctgtggctcacgcctgcaaagggaggccgaggcgggcggatcacgaggtcaggagttggagagcagcctggccaatgtggtgaaaccccacctctactaaaaatacaaaaaacaaaattagtcgagcatgtgg

SEQ ID NO: 1563771 - DNA, 4001 bp, Homo sapiens
tctcctgtaaactgctgtccttctatctctatgaaaatagtaacagaacttaataactagttatcttgaacaagatctatatctacagtaactagtttggaatttaaaaacccaaactgggtttttaaactagagactcatttgattagagcaaagtgccaatgaggctcttggcatggagtcaaggcccacaagaatatggatggctgctctgaacatacccatttccaccactggccagacatttcaaacatctccacgatgagaaatgtatatatttatacataaaatctagactgcaattgtatgtgggagaggagactgtgaaccaatcctgtgtttctgcccaaatttgaatttcaaggcctattgggcttccttgagaaagtgcaaccctgctgatttggccaagttgtgatcctatgaaacctccttgtgttggggggaggtgggggtgttagggggatggagggtgcgagagtgcccaaggtttacgggggagcagtgagtgtttgagccagcaccatttccctcccagtcttcctctcccacaacacctggagcctaggaaaaagctcaaagaagaggacccgacagttcctccatgtgctcgcttccaagtgctcctactctcatttacattctctcctactgagcttatgtccccatcctctacctcttgcaaactgctgtttactggcctggtcaccccctaagaaggcaagctccttaagtgcatcttcgttcagtcaacaagattctttcaacaaatacttgtgccagacactgtgcttgcttggctccaggaggggaaaggaaaagtttctcccagagggagaaactagctttgtgccgaattgtcagggccaaatgaacccatgcaacgctcagtgattggagacttgcaatgagtgaggtgggtttctggctgtgattccaagttggaatagttaagggaaaagaagagtgttcactccatgattgaaaattggcaataatcatgtacactcacatacccactaattaaccatatgactaaatctattttggttaatatcttcttccttttggaattgcttgcaatacgtaaacatatgcacatacaacatccaaaaacaacactgtggacacataataagaatatactgcttgaatataataccccatcaagtaactgggagactgcatattgtacagcttggaataagtttagaaaattaagacaactcggaaaatttaaggtgattcttctctactcatccatgtttccctctctctttccatccctctctcggccttcctctcgtctctcttccacttcttggccccagtcccccatctcccttatctccctacaagatcatttattgtcagtcatgctagctgcttgctggctgcttactagtgccaaaacatcatgttctgatataattgaaccacattatttgacggaattattgctgtcagttatttgaatggtgttactaatcaatgaaatgagccttgtaaaatccaggtttgtgtggtgctttactttgagatgatgttggctaggtttcttgacacatagagaagctatagctttgtccagtctctctccctggtctgtctgttatataaacatcacccttgtgcagctctcccttctcagacttgagtcatttcttacaaactctgtcaaagtcaaggctgtaggagtgccacaaagtacccctgcaccaagtggtagggaatcgcggtgtgcagggcaggaagccccgggaataactaggtatttccaggtcagtcactgcagctgggccaagctcccccttggtgcttccctccttcttgcctttgtaagtcaaccaaagacaactgcaacagccttgggaatacgctcgacttccaatcctggcccctcggtccctggggcccaggtgagccaggtaggggtgccggccaggaaggagagaagcgtgaaaggcagagaagcctcgaggcgtccagccggccctcatttccccgcgtagagttgacctgtctctgtgtcccccgacctgccgagtcccagaagctgggttgaggactctcccgctgctgagctttcccactcacacgcacacgcacacctgcgcgagctctcccaggagggcaccgcccccaaccagcggggtgcacaggggaatgatgttgcaagttcgagcccagaggtgtctcgctgtcccccgcccacccccgggtcattcctcgccgcccgtttttgcggcgagagcaccatttgggcggttaggagcccctgcaaggccggctggcgttctgccaccctccactctgtggtgtctagggggagtaggtcggctgcgcccgccacttactctgaaatcttgaggcaagcatgaaagctagccatggtgctgctgagggagccgctggccggttacgtgccttgcctgctggggtgcatgggagcccgcgctgtgggcatgcccttagaggctgccacgtgggggcagctcggcacttcaagcgcccacccgcacgcagccccagacccacaggccgaagcaataaccagccagataaagtttcttctccaaggcctctcgctgtcttctgatctcagtccaaaaagggctgggcttgttccttacatggttaggaactgttaactccccttttccctctgtctccatcttcccgccacaacagcatccttagagcaaaataccagatgctctttcttagcctctctgtatccctgcagagctgagcgtgagaagtaatttggagatgaaaccctaaggaaagagtagaggcttttatccgagcaggaaaggacactcaagggctttgggaaggcgatgtaaataaatcgctttctggcattttagatggtgtgggatggagggagaggggagcagaggggagaagagagaggtcagggaagaaagaaaatttaagtagcaaggctgcaagcattcccatctagatgtgaacactgtttttgaggtgttctaagctgttcttgttcagtcttaaggaaaactatttactccctaagccagtctggggccatgaaccaaaaaagcaagaatttccttaaatttgtgaaatcttttctgccctcgagatgaaagtccctaccaaaggttgtgtgtacacggggaaccccaattataacatggcttacattacatggattcagagatgttgcagatcagattgtgtccacagaaaaccaaaagaactggagacagagacaacgagcaaaagtgtgacctaatgttgactgcctggaagacccagtagggcacctttcccaatctcagtcccataaagaggtgtgtgtccctaccttggcctctgagatgcacagatctgaaatattttgattttttaaaagtgcctagtgggagtgcgacacgcaaaacaaatgcagatgcaggcttttggctttttaaaatgacttttgaggaatcaagagtttcaaaagattgtgatttctcctgtgcatgtattcatgaggggcattaaacactgtctagctgggcctaatctgacaggctttccaaattgggtttgtccaaataagaataagaagaaagaagaaatttagctggggtcccttcagggggtcttcgcaagtctggtagcggaggcctgtttttcctttcagtctgaaataggcaacaccctgcttctggaatttcactgggtgggtaggctggggtctctggacagggcagtacatgtgaccctctcttattaactttggggaaaaggaacataactgagcaagaactagatttatgttgcagatgctaaagtctgacctgtggctagaatttctagctagaattcctttctaagtcaaatttgtggttagttctccattattcatatgtggctttgcttacccacttagtacatttcctgtaattgtgtttttaatcaaagaataacttctggaatacctacaccggttgtaatgtcagcaggctgttaagaaagaccaattt

SEQ ID NO: 1563772 - DNA, 4001 bp, Homo sapiens
atgtaaaatgacagttacttaggacttttttgttcccttctaaaaatattttttcaataagtgtaaattctcctcagccataagaacgtcactgctgtaaataaaacgtttggtcatatgttacctcatgtgtaaaagatgtaagggagattcacccctccaaaacacaaatggtcgtaaggagttcagagaagaccattacagcaccttttctcaccaagcaaaatattccaggaactcctccaccaaaaacaaccaaggatatattcaaatcccgggattaaagtgctttagacatttttaaaaacagccctgccagccctacaacacaaatcatgtcttttcagataacagtctagaaaatgcaacattagaaaaaggccacatatctaaatgtagtgctgtgcacagcattcaacaatatgctgggagccaagatccagaagcaaaatatgagacccacttattccaaaatgcaaccagaagcttgataaaaatcaagagtgctgttgtcgaaatggggatgccaatttttttttaacttcgaaaaagacagaaaaccttgcgcgggtgattcggtccctcacgaatcagacagacagaagcagtcatgctgaaatcgctgaattcctcagcggaacggcgccaactcagcagcgcggtttccacactttcccggagcgggactccgctccccgcgccggctcacggccttcccgccctacagggtgtacaagacgcgagccgacgtgtgctgcggggcgcggcagagagaagcgccagaagccacacagaaaagcgtcaattcgaccgccaccgagagcgcgaaggggccacaagccaatttccgcaaaggagatgagctgggcgaggctcggtctggcctccaacttaaacctgtccgcagcctcggccgagtggcgcgtgtcctgggggcgctctgtggtcgccacggccgcccggcttcgcacctttgcggctttggtccgagcgcccggcctcggccgccgcgtgggttttcccgctctcgccgaagcgtgccatgcccatgccccattccctggccaggctctaccctgcaccagtccgaaaggaggcggcactctgccgagctgcgtgcgtgtaagcgcggcggctccggtccgctcgcttcccctccccccgcaacccccttcctacggcgcaagcacagaggcctttcctagattgcagtgcctgtcagggcgagccgggatctctcgccctagcggcctcgctccctcatacacagacacacacattcgcatacagacgtcctccgttccgttttcccttccttctcgtctagctcgacttaccccagttcattccaccccctgcggccgccaccccgagccagccggggagccggcgagaaggccaggaagctgtatggcagcgctcctactcacctcacaggccgactcccgaggcgcacgtcgctggcgggctcaggcagcaggcgctgtagctagcgcggtcgcagtcaaggctgggctgtcgccgtcgccgcagctgttcgagctgccttagccgccaccgccgctgctactgctgccgccgccgccgccgcctctgcctcagctccatacgctgggcccgccaggtggacgcgcctctctcctcgctcgctccctcaggctccgccgccgccgcgctagatggagtcagagctgtcgggctctggccctgaaactcagagcctccgcggctgcccggctgctccaagggtccgtgcttcgcttacactgtcgctcgccccggctggagctacctagcgagcgggctgcgcgctcggcgcctggagcccgctctgtgcggtggctgcggccgtccgcgagagggagagaggagggcggctgctactgtcgctatagctgttaaagctattgctaaatgctgctactgccgctaatgctactgctgtggcggcggtggtggcggcggcggctgctgctgctgctgctgatgctactggttttccttcccaggttcttcccctgcctcgtcccccctcctcccccttcctcctcctcctcctactcctcctcctccttctcttcctcctccctcttctcctccctctgccgcttttctcagagcctctgcaggcactgcctggtcccctcttctcccggagctgtctctgcccattcagaaaggtgcccagagtggggccgcctctgctgccaccatcgctgttgcccctgccattgtttcctccaacacggctgttcttgctggacgccttcccccctctacccttcttccccaccacagctctccctttccctcccgctctccttaccctctctatggtcccttccttatgtgcccccccaactctgtccgtctgtccttccctcccctcgggcgcccgggagcgcgcactgcgcggccacctgtcataaagggcgcgcaccccccttccccattcccaccccgccccccactcgcgttcctgctgcccttccagtccactacgccagtggtgcgttcttcccctggcagacacgcaaccggacaccactctcccatgccttttagggcagttgtgtgtgcggagaggggcactctgaagtttggggaagaatatttgaatggtttcatccaccaagcatctaaccattcaacctttacctactcttaacttaagggcctgggcccccaggaaggtgggtcctttttgaagggttggatgaaggcagacaattggggagtgacgtttggggaataaaggaaagaagggaagctgaatatggccaggaaggaaaacagatctgcctgatggctgtcattgaaaaatctcttaggtggtcattttccttcagacgtcctgggaactcaacaggaaacagcaaaacgattggagagcaactcaggagggaccatttagtacttctggagtcctgggtgcaaggttgaggcctgagcctcgggagatttgtcaccactaggagccaaggcaagagatgaaaaggttggtactagaacagaaggggtaaaagtagctactttgtgtgcacttgctccaacatcattgccaaagcacagcttctccagtcaggcagggcctcatttcagatttctttgctgccacagctacagcgtcattttgctacgagggctcaggctttgagatctgatgtgtgcaacttctcaccatcacctgtcacacaatccctccccagaaacagtgcagaggcgggggtatattttcttttccctggcaaagtacaggagataaatgttccagatatcccattgacaataaggtctgggtcactttaccaagtttgaggcgctctaccatgggtctttcattcctggacaataaactgtctgtatggcttttacaactccccatctctgtgcctttgtttctgtcatcccacttgcttgaaacactcttgttatttctccctctcattttatatctatgaaactcatccataaataatagctcatcctgaaataattatacttattgggtccttactatgtgccagacactgtgctaagcaatttacatgaattatttaatcttcacaacaaacacaattttactatctccattttacaaatgagaaaatcgagtcacaaggaagttaggtatatgtgtcctgaggatagggatgatatgttatttatcttgcatttgtgagacactgtgcaaatatatttgcatctttcaggcactggaataaataagaagacaaaatttggcctctgttctcaaaagcaaaaacaaacaaacaaaaaaggttaaacatgtaaaatgccacccatctattggctggatctcaatatccagaatgaattgctctttttccgttgtcggaaagcacattgttttcacctgtattaactacatatgctattcttcctttataaagttagttgcttatttgttaccagttataatttttgtcaatgccctccagccaaaaactaccagaaacacaactgtagttgaacaattt

SEQ ID NO: 1563773 - DNA, 4001 bp, Homo sapiens
atatcttaaaattttgaaacaaaaatttcagtgttccttgagccatatcattaaacaaaaaaacgtgaaaaaatatgtgaatagctgttgcctagaagaaggcttctaaaggaatgaactaacatcactgggtagaaattaccaggaagcaaatttcatctcattataaagatctttataacataattagacttgtccaaaacccaaatctcaactggactacctgtgagtcagtgagttccctgtcaaaaaaattttagacactggcagttcacctaacagatattgttagaacgcatttttctttggatgaaaaacaaactagatgatatacaaatgtctctttcaactttaaggcactagcatgccatgattctacttcttttaaacgaacctctgttttgaatcttgaataaccactgtattagaataataattagacatctctcaggcactgctcccttctttagaaccctgctatggtcctcaacagcattaaagacttagcttccccagtaaagattattaactggtgatagtattcagaggctttaggcactccccttctccacctaaaagaagtatactcattattcaagacccatctcaaagttttcccactctgtgaaattcaccccaaattccccaagcagagttagagccatccttttgtttttcataccactttgtatgagagcagagctactacttccataggactgactctgttgtatatttttaacttgaaaaatttttcttctaaaagataggtacaaaaaatttaaaaatttttatatattcaaaattatttatgtagtcatctatctccattcctatcccctggactttgaactccttcagggcctcgaagctatattatttatcacctgaatccctcaacaagctttgcagtgcctgggcctcaagtaggttggcacacttatcaccatcagcaaccaccacagagtttataatctaatgaagttccaggataaacaaacatatacaagtcaaagatgaacagaaccacataaagcaaatacagaataaaactagcttcaagggtacagagacgttgacaaatgttattaggctaagggcttcttgaaggcaggaatcatgattcatcgattcctgtatttgcagtgcccaagcacagtgcttggcacatagtatatgctcaaggaatatatatgttacgttcgaggaatcaaatcgccttacctttaaatacaccttttatgagtggcgctactgctgtattgaagacttcttcctgttcagtagagggatcaaatacaaaatcgtaggtgaaggatttatctgtaccaaccaccacctagagaaggcacgggacaaggcgtaaggttaaaaatgaaaggcaagaccacacccctcgttaccatttggccccagctgttcagacacaggctctggactctgctacgcacctgaggctctccgggcacgaaggaaaggcacatctggcagccctcgctaatctctttggggaccagagggcgacaacgcagcgccactcttacgggaattcccttcacctcttccttcatgatcctatctcagcaccgtctctgcgagggggaaaaagaaggctcgctgatgaatgttagtaggtcagcaggggtgggagggcgtcctccccggttccgaccctcctcagcgggaacactgacttgggagattcacgctccatgacttggccagggctggaccgcccgtcagccctgcactctaaagagagtgcacgggcttctgaaaggcaaagaaaaaactccaacggggacggcgacaaagaaccaaagccctagggtactgggtaaaaacaggttctgagctaaggtgtgcccccgtaactcaccaaactaaatgtcccttccccgttctccctgggcctcccgccgccctgtcccagccggagctttaaccgccaagtttcaaatccgtcccggagacgccaaccaattgcagtgcggactgcccgagggcggagcgcgcacgtcggcgcgcgcaggccggcgcggtgggaaggggagggtcagctcgttgcaccctggcccggcctcttttcgaccctgcggagcatccgcttccggttcccagactgaattgtcagtgagcggagtctgaggtcgctgtggactgcccactggtgaggtggtgcggcgtttatgcggctgagagtgcgggtctcaggcagaatgtggggcggggacgtgggaggtggctggtcaggtgaaggaagggtcgatctaaggaccctaccattactaatcacatctaggaaatgtggggcggtgccttgccccgagtccctgcggatagttaacactcccttgggcttcgaaagtagatctttttagactcgaccctgatttcctcttctccaggtttgagacggtaacatctgttttgcaggattgtgaaaaatgaggtcctctttctagagtacctgacaggttgcttggcatccagaagatgtttagctaagttaagagttttcttctgtcttccttctctcctccaaccttaacacctagatatgggctgggcctgtagactgactgccttggaatgggttggagctgctgtctgaaacttgctgggctgctctcccttttgaaccactttttgtctgttctgattcactcttccagggccttgcccgagatggacagccggattccttatgatgactacccggtggttttcttgcctgcctatgagaatcctccagcatggattcctcctcatgaggtgggaaccatctgtattcctgagtaggagatttttttccccgtgggcatgagatgatgcatgaaaggtaggatagcagggttagaaggcgaaacggagagtgaatcttagcacttgtagccagaggacccagaagctggattctgagcaacaggacccattgggaacttctttatggaagcctcctgctagggtctgttcacaccggttaattctggaaatttggagccttcatttccatactgttaagaggttcagcgcggtggctcatgcctgtaatcccagcactttgggaggccgaaacaggcggatcacctgaggttgggagttcgagaccagcctgaccaacatggagaaaccgcgtctctactaaaaatacaaaattagccgggcgtggtggcacatgcctgtaatcccagctactagggaggctgaggcgggagaattgcttgaacctgggaggcagaggttgcggtgagctgagattgagccattgcactccagcctgggcaacaagagcaaaactccatctcaaaaaaaaaaaaaaaaggtgaagaaatggggagctactgggctgccccagtgctatccatctactcatttagtctgtgttatctgttctacttaaattaagtctatgacctttccttttcctgacttcagggtaattcattagtgtttcagatgaaggtaggtgtgaagtaagactggtaaaatttctggggttgctgtgtcttgcagagggtacaccacccggactacaacaatgagttgacccagtttctgccccgaaccatcacactgaagaagcctcctggagctcaggtgaacttatgaaaccttatttcaggctagattcatccataccacaaattggcagtgttggggggatggattggaaagcaggtgcagatgtgaggaaactttccttcttgtggacagaaaagctgagataacacttctgcaacttctgactttcctctcagggacacacaagctgagctattgtacgatgatgctactagttgttcttgtgtttgtggtctccattgagcccccattctgtgctcttgtcttacagttgggatttaacatccgaggaggaaaggcctcccagctaggcatcttcatctccaaggtatttatgcccagtaggcaatatggatcgttacttccctttgttaaattaacagattgcagaaccctaatgtcccaagggctgagag

SEQ ID NO: 1563774 - DNA, 4001 bp, Homo sapiens
taagatacaagtggcagcctctgccacatacacaagatatttcatccacccgagtatctactgagatagaattattaatctgcattctatggaagagaaaagcaaggcccagggtgatgcagctaataagtggtgatactagggtttcaaagcagattaccccaaaccatggcaatctccatcagtttcaaatccaaatttaaagattattctttttgctcaattattaccacactgggtgacaggtgcttaataaatgcgtttcttcacgatgaatataataccaaaagaaataagacatggtgcctttggccacctgtttggatgtgatttattttttcccaaattcttagggttaaaaaaaaaagcccacaaaaagacagctccgccaagtggctaaacaaatggattcacttcagcaatcacagcaactcggcccagtcagtcttccacctacacagacgaaccaactgccttggccacgtcttaaagggccggagcagagcctaggctctggcttccttctccaaccaagctcagcccctccttaaagagctggcacgcccaaagcagctcctcccccgcagctgcttccaggcctcactctgtgcctccaatagcctaactttgcaccttaaaccactgtcccctcctccttcttttcagaagcttctctaggtacccgctatggcttcagggggttacctgggagctttggccttgtgaatcctgttctctctggttgtgactttggctgtgtggggttaagtcaaagacaatccttaccgcttaaggagtattgggagtgccgagccaggggagactagactagacaaatccatccattcttgccccctttcacttcttccaccaagctctctcctctccttcttggcctttctttgcccagccctttagcaaagtcattttcccttgagtttcatttgattccacatagtgttcttaaccttccgctcccgcccccactgctgaaaccccaagtggggtgtgtggggggagcagggggactgggagggggatagaatctagacgaaagaggtgggagtgggtgggtattagtcccagagtcacttaccgaccatgtcactagctgaggactcctgaagtgtccagaactcatgccgtcctccgggaggctcatactcctgagctgatcgcaagagagctgttcccctcacacccgccccattctgacatagcgcagggcgacgcgttctcgtcttctcgttcttgggcccccactcccctatttctccgggctggaaaatgaggagggggtcgaaaggggagggagtcgattcagacccagctgggccactctcggaacaagggaaacaaagctctcaagcatccaacccaaaaatcaggggccggcagagtagacttcctaaaaagaatcctcccccctgcagcttttccttggacaaaaataaagtgggttcgctgggccgaagtggccagagcttaaggtcctccgttccccttttacctctaccaattcagttccggccaagcccgctctccacccatcctctgaactccacacaccctttaaaaggagagggccgggggtgggggctatgaaaaccaacccaacccccaaagcgctacttgaacataaagttgaggcggagaagaaatccttcaagacaggaacccacgaggagataccacaagaggatcccttcaccgccgccgttgccgccgcacaccccagcgccttcctaaaaagaaagaagggaggaaaaaaatgccgacgattggtagaatcatagagaagaacaccagccccagggcaggggcttcagcgaaaaatggcagcaactcgtgcgggtcctctggggcggggtttcttggaggcacctagctgccccacggggtacctcgcgccccacgcgagtcagaacctaaagtgctctctgggcaacctgagtgggtagagtgattccgtctttctctggccctgctaggcccaaaggagaggtgtgactatcgtgaggactccacctagggtggagttccttaaaaaggacaggcggccgctagaggagagtgcaaagtgggaggaggtggagaagggtggggctgagaaggaggagggaggaaggagggggtggggcggggccctgggccgacagagctggcctcgcctccggcggccgcctccctcagcctccagcagcggcaggtataattccaatcaatttcacttccttatctgtcccaaaattaaggcttgcaagcacactgcttgattacctatttactccggttatgctaattctccaggggagggtggtgaaacgggtactgggattggggctgggggctgtctaagagggaaaggagaaaacaaaaaagctgacaactggaagcgatatttatcctcctacctctccatggtaacacgaacaaggacagcgaggtcacagtgtcttctcagggaggaagctaaaaggaacggagattggagcttggtgcattttctagcaagagataagccaaggaggtgagggcgaaggagtaggtggggaagaagaaggagttgaagatgatctgtgaatacagcgtggcccagcagggagacttaagaaaggctttctcagtctcccagataccagacctctaagaatagagttctcaaccccctgagaccgcctctcagccaggcattggcgaagatccccgtaaagctgaatccacaggataggagccatgtttccaggatttctttacgcttgcctgaaagtctctctctagctcattttaatgggaggccaggaagtcacaagcaaccacagcccattttcagtgcctcttccctaccacaattcttttaaagaggaggaaaaagaagagagacaagaaacaaagcagagggaggaagagcaaagagacaggagaaataataatatctgccatgtattcagcacctaatatgggcaagtccctgagccaggtgcttttacattcaacatttccccatttagtcccaataacaaccctgggaactaggtactgttatattctctgtgccctttatttaaaaaaataaggaaacggaaggcctcagcccagtactttcgaacacataggtctacttacttagttgatatttctgcctgaatgtcttctgtgcatctcatctaccttcctttccccaaaacactctgttcttcctcctgtagttcaccaactacctgaatggcaccaccatacatccaaggcagcaccctggaactcatcctttaacctgctgtgatctggcctttgtctgcctctcaagcagcagagattttgctgttctcctgggctttacctggattacaaatccctgggaattccaagctgtttccaatctctatgccttgggttgctttactttctctgactgaaatagactaagctctctgtccacctttttttttcttgcatgtccttccaatgaatctgtccactttcttgaaaggactaactcaaggtcatctcccctccttacttaatttcttcaggcaaaactgaccattgcttcctctgtgcccttctctacctcggggcacatatttgttggtataattgcctccccctactaaactataaagtccttgagctgaagcaccaggcgatctcatttctgtaacttggatgccaagttatattattattaacaataataatagttattgagcattaactatgtactaaactctgttgtaagcctcttatgtatattaactcattgaatccttctgacaatcctatgggtagacattgctatccccattttacagatgtggaaacttagtgacaggttaaataaatacacatgcatatgtatttgtttcataaaagaatgtccctgtagtaggggtttcataaataactctctatctcactatatctcttcaccacgacctgcacccctgccaagcttacaaggtaagatatattgagatggaatcatacagagaagtgtacaa

SEQ ID NO: 1563775 - DNA, 4001 bp, Homo sapiens
cccgagtatctactgagatagaattattaatctgcattctatggaagagaaaagcaaggcccagggtgatgcagctaataagtggtgatactagggtttcaaagcagattaccccaaaccatggcaatctccatcagtttcaaatccaaatttaaagattattctttttgctcaattattaccacactgggtgacaggtgcttaataaatgcgtttcttcacgatgaatataataccaaaagaaataagacatggtgcctttggccacctgtttggatgtgatttattttttcccaaattcttagggttaaaaaaaaaagcccacaaaaagacagctccgccaagtggctaaacaaatggattcacttcagcaatcacagcaactcggcccagtcagtcttccacctacacagacgaaccaactgccttggccacgtcttaaagggccggagcagagcctaggctctggcttccttctccaaccaagctcagcccctccttaaagagctggcacgcccaaagcagctcctcccccgcagctgcttccaggcctcactctgtgcctccaatagcctaactttgcaccttaaaccactgtcccctcctccttcttttcagaagcttctctaggtacccgctatggcttcagggggttacctgggagctttggccttgtgaatcctgttctctctggttgtgactttggctgtgtggggttaagtcaaagacaatccttaccgcttaaggagtattgggagtgccgagccaggggagactagactagacaaatccatccattcttgccccctttcacttcttccaccaagctctctcctctccttcttggcctttctttgcccagccctttagcaaagtcattttcccttgagtttcatttgattccacatagtgttcttaaccttccgctcccgcccccactgctgaaaccccaagtggggtgtgtggggggagcagggggactgggagggggatagaatctagacgaaagaggtgggagtgggtgggtattagtcccagagtcacttaccgaccatgtcactagctgaggactcctgaagtgtccagaactcatgccgtcctccgggaggctcatactcctgagctgatcgcaagagagctgttcccctcacacccgccccattctgacatagcgcagggcgacgcgttctcgtcttctcgttcttgggcccccactcccctatttctccgggctggaaaatgaggagggggtcgaaaggggagggagtcgattcagacccagctgggccactctcggaacaagggaaacaaagctctcaagcatccaacccaaaaatcaggggccggcagagtagacttcctaaaaagaatcctcccccctgcagcttttccttggacaaaaataaagtgggttcgctgggccgaagtggccagagcttaaggtcctccgttccccttttacctctaccaattcagttccggccaagcccgctctccacccatcctctgaactccacacaccctttaaaaggagagggccgggggtgggggctatgaaaaccaacccaacccccaaagcgctacttgaacataaagttgaggcggagaagaaatccttcaagacaggaacccacgaggagataccacaagaggatcccttcaccgccgccgttgccgccgcacaccccagcgccttcctaaaaagaaagaagggaggaaaaaaatgccgacgattggtagaatcatagagaagaacaccagccccagggcaggggcttcagcgaaaaatggcagcaactcgtgcgggtcctctggggcggggtttcttggaggcacctagctgccccacggggtacctcgcgccccacgcgagtcagaacctaaagtgctctctgggcaacctgagtgggtagagtgattccgtctttctctggccctgctaggcccaaaggagaggtgtgactatcgtgaggactccacctagggtggagttccttaaaaaggacaggcggccgctagaggagagtgcaaagtgggaggaggtggagaagggtggggctgagaaggaggagggaggaaggagggggtggggcggggccctgggccgacagagctggcctcgcctccggcggccgcctccctcagcctccagcagcggcaggtataattccaatcaatttcacttccttatctgtcccaaaattaaggcttgcaagcacactgcttgattacctatttactccggttatgctaattctccaggggagggtggtgaaacgggtactgggattggggctgggggctgtctaagagggaaaggagaaaacaaaaaagctgacaactggaagcgatatttatcctcctacctctccatggtaacacgaacaaggacagcgaggtcacagtgtcttctcagggaggaagctaaaaggaacggagattggagcttggtgcattttctagcaagagataagccaaggaggtgagggcgaaggagtaggtggggaagaagaaggagttgaagatgatctgtgaatacagcgtggcccagcagggagacttaagaaaggctttctcagtctcccagataccagacctctaagaatagagttctcaaccccctgagaccgcctctcagccaggcattggcgaagatccccgtaaagctgaatccacaggataggagccatgtttccaggatttctttacgcttgcctgaaagtctctctctagctcattttaatgggaggccaggaagtcacaagcaaccacagcccattttcagtgcctcttccctaccacaattcttttaaagaggaggaaaaagaagagagacaagaaacaaagcagagggaggaagagcaaagagacaggagaaataataatatctgccatgtattcagcacctaatatgggcaagtccctgagccaggtgcttttacattcaacatttccccatttagtcccaataacaaccctgggaactaggtactgttatattctctgtgccctttatttaaaaaaataaggaaacggaaggcctcagcccagtactttcgaacacataggtctacttacttagttgatatttctgcctgaatgtcttctgtgcatctcatctaccttcctttccccaaaacactctgttcttcctcctgtagttcaccaactacctgaatggcaccaccatacatccaaggcagcaccctggaactcatcctttaacctgctgtgatctggcctttgtctgcctctcaagcagcagagattttgctgttctcctgggctttacctggattacaaatccctgggaattccaagctgtttccaatctctatgccttgggttgctttactttctctgactgaaatagactaagctctctgtccacctttttttttcttgcatgtccttccaatgaatctgtccactttcttgaaaggactaactcaaggtcatctcccctccttacttaatttcttcaggcaaaactgaccattgcttcctctgtgcccttctctacctcggggcacatatttgttggtataattgcctccccctactaaactataaagtccttgagctgaagcaccaggcgatctcatttctgtaacttggatgccaagttatattattattaacaataataatagttattgagcattaactatgtactaaactctgttgtaagcctcttatgtatattaactcattgaatccttctgacaatcctatgggtagacattgctatccccattttacagatgtggaaacttagtgacaggttaaataaatacacatgcatatgtatttgtttcataaaagaatgtccctgtagtaggggtttcataaataactctctatctcactatatctcttcaccacgacctgcacccctgccaagcttacaaggtaagatatattgagatggaatcatacagagaagtgtacaactctctatgccttcatttaaaaaatttactttattccttggaggcttt

SEQ ID NO: 1563776 - DNA, 4001 bp, Homo sapiens
tcatgaaaaccaattcgcactgaaaaaaaaaaaaaggtgaggaaaaatgtagacccctggacataccctgaagttgattttttgaatatatccttgaaatcggcttgttttaatgacaattgcctccgtctcctgaaagtggagtgcaaaaagaaacctggttaattgtagttttattatatttagttcaaatttttcaaagcataccctgacagcattttagctgtaaattaataaaccatatttataaatcctgaacagttaaaaccacacataacaattttaaactatgtaaattaacttttaaaaacccttaactagaaagccataagatcctatttgtttttagaagctttcttaatgtctcagaaagtctggaataaagatgggcattaagcataacaatgattggcagttgatctaaaagactaaactagccaaatttggacacaaggagacacttttccagtaaatatatactcgccccttggaataatttgccattttgtagctttttaagcctaaaggtcaattctttgctgatatacttctttgccataaaaacctgaaagcaaatgacacatattacaagctttcagagaacagatggctaatgttcttctaggttcatttactaccaattctttttattttcatactgcttgtaattaataaaaacacataaatagatatactgtctcctaaccagaagatttggtttttgttaagttctgtcatacatctagctcttttgggctaatacaaaaagcaacattggatagacatacttctggtactgcctcaggaatccagttttaaaaatagagaccactacagaagcactacagtataggctgttgacagtcaactctcttaaaaaattaaagtatgctggcaaatgtttgatgagctctaatataaaatttcatttatttccatttatttcatttatgttgttatcagcatatagaaagtaagcattagccttatctcactttttttcaaaataaactgtcttggttttttctgggtcatctcacaagcactactgcattattaaatccataactatatcaaagtcatagtttaataatatctttagaaagaccttgacaaagaccttatccaaaatgtgatactaaatctaataacttcctatgaaaaaagtaggtggaaaatattttttcttttttggaatgataaattcaaaacagcatctccttaatgacagtactatttgaaagtatacttttaaaatgctatacacataaacattattgttgaatgataaaaagctataataggtcaaattcatatctgtcatgttttacaattaagccctaccaaaaaataacaattatattatttctttgctttaaaatgcatcaaaatgtctttaaatacagcttattttatatccctattaatattattccttttctttgtgcatttaaaaaaatctggtatgccaccttctggcaactgagtgaaattatgtatttctacataagtcactattctttattttaactttttaaatatatgtatatatagatatttcttacctgcattacatttaagctatataaataaatctataacacagtctgaagtaaaataaaattcccttagaaatcttattcaaaatcaagctttgtacatgcttcctatgatttttgcatggttaccaatatgtctcctgaattctacaatacatctaaaattgatttttgtatatcgcttcacagccacatatggaaataacaggcttgctattttaatgagtaagtaacagcagtaaataaaggaaaagaaaggtctcttaccaataagcccatttttctcttaaggtttgaactctcatcatttgtcatgttcttgtggatccctctctcatcaaattctctggagttttaaagttaagagctgtgatgcacagctaggctctgctacatagtagcgcaccccagtgcatctgcctggtacaacacttcagttgtagctcccaaaagcagaaacaggctttatatatttaaaaaaaaaaaaaaaaacctatgtactgcataccttcccttgataggaaattgtagtcagtgtagttgaactatttatatttcatatctaaactgctggccagatatgaaaatgagaagcacatatatcttgaacttagttctggtaaactgaacaggaacaaagtgttcatctttggagcaaaggtggagtgagacaaatactaacaccaggaaatccaacttagaaaaaaaaacatgcttacctgaaagtaaccttatttttttaagggtcactatcctgctatttgttgtattatctttattttttattatctttaattcttccctctctcttgcccatagttgccagtcattaagtcctatctttttttctttatcaatctcccaggaatctagcccctactgttttttttaaacaaatgagctacttcaaaaatacatataactcatctccctgcattgcccgtcttcaatttgtcaatcccattccatctagatcgctttttaaaaataaaactacacatgatgtaaagtaaatgatcaatgaataattttacagtaagtatgtatttattgaattggctacatgttaggtactatgttgggtggtgtggatgtaaaggtgaaccagacacaatccctggccctcaggaagctcataagctgagtgagggaagcaggcatgtattctgacaatacaaaatatggtgtagaagctttagtaatataagcctagcattctacagcagcagaggaataacaaaaattccgttgcaactgaggctgaagaatgaagcatacatcaagtgaactctagaagaaatagcctgtgcaaagaaagaaacatgtgaaggaatacaacatgttgcagggatcagcaaattcttcgatatgactgaaaagagttcaatattactgaaaagtgggtacatagtgttgagtggagtagattttaaggtatgcagaaaccacatcacagaagaccatgcacgccagaaaacaggtttggattttatcctgtgggctatgagaaacaatctgttgaatgagtagatcaatcaaataattaatcaagtaactaagcctagcactaagaactcagtacataccggccaacctactcttccagtttactgtagtaaatcataacaccaacttccagttctctatgtcaaaagctttctttgttctttctcgcctttgctccagaggtccctcttgcatgaaatctcttccaaactccactttcctgaactcaacccattcttccagatccagctcaaattccatttgcttctgtgatatcttacatggtaatttgagtctatggttttaaaaatattctttcattacagggaccagaaaccacgcattcttgctaatgtttagcactcaatgttgaagaaatctttttgatcctttgcccacaaaataaaagaggatggtgagaaaatcacactaaggcaaaggtcagagcctcagagtaagtaagcaggtccctgaaagcccacctcccagacttcatagtgcacgctaatcttagtaacttccttcaccactctgagcctgaaaaggaacaaacatgaattgtgaagagagatggacctgtgttgggcagcaactctaaagtactatgcaacattgctggctgtatacctcacagccctggttcaaaaattccagggaatcgatgagaaagggataccgacagaagagctgaatgatggagctgtgacctttggaaaaatagagctgtaagtggagagaaattgtgattgtgctttactactcatagtaaaccaagataattcacccaaagatccatataataaacaaaaggaattcatgaagatctcagaaagagatgagtgggtgagtgtaggtgcttgggtatagaaggtttagaatctccaagggtgagctttaataggaggaaatctaagtgtaagaaagaggtgtttcaaa

SEQ ID NO: 1563777 - DNA, 4001 bp, Homo sapiens
taaactaaggcaggagaagttttccacatttttcctactgataaatattttaaaaataacactcaaatttaaaacattcttttcaaaagcttttctcgtactaatattttctttaaaaaaagattcggttttcctccaccaaaaaggatcatgaacaatactttaaaagaacattttattatatctcctggattttgcctttaaagcaacactgcaaatttaaaaagattttcaaaaattttgaaaacttctagaaagacttcccagtgcacttcagtacgtatttacttaaaatacatttttaaaacagacatttgtagaatactttttcaatccccataatataactgctcatagagatataatttgcacaaattcaaacttacacttcagaacttgaatgataaaactgagaaagatgtactatcaaacatattaatattcatacacaactaaagtataaaagtctcaattaaaagactcattttctgatcaatgttaactctgtttttaattcatgaaaaaatagtaaagaggcattaccatatttaacacaccaccatcaatcatcaatttttaatgccattacacaaaagaagtcatcctaagtgttttagatattcaaaaattcaaacaaatccaacatatgttaaatattaaagttaattcttttgcaattccttaggtatgcctttgtactttcacactggtaattagattaccattaaacactttaaataaacataaactttagaaaaacaaaacaatgatgaagtgtgggcatgccaacatctttaaatgtaagcaagcttgaggtttttaatcctgtaggtttttggatgttgctgtttgggggctcccccgcccccattttgccacaaggtagattcatgaatgaaatcccactttaatatcctattttctctcacttacatgtatgctggagaaagtggagttgacctggatgttttaagcacaggaactgggaatttccagatagcaggagagctcgttttccatttcaatggcatgttgtcaccacggtactacaataacagtaaagagcgtttccataacagactaccaactaagacttccattccacactgtactgacacagcagtggctgccgcggagaacaagcaaaggattctgccagtgcccttaaaccgatgcttccaatctgtaaaatagggctgtaaggtacctccttaaattcttctgtcccctaaagcaatatgatgattcaatcattccaactcaacaatagtgccagaaaagcgttgactgcagtatatttttttaggactgcactgtgcataccatacaatgcagctttatttaataaaagcagccaggctttttttttttaagcttgcaataccattgttctaccttaacagggatactgcagcactgtactatattctgcacctattaacctgatttctgaccaatagtagcaagaaaaaacatagatgggtttcatatgaaaatgaaacaacaacatacctactcagaatacacttgtcatcctctgaacaatcttcttttgagctgcaacaatacaaatgggatataaacctcagcatagccttaggctaccgctaatagagatcagtgactaaattcagcagcctgctttcctcctgtgcaagctctggccacacaaatcaagaatgccattatgggaaaagcccgtttcaaaaattccagtccctctgctttccagctaggagaaggcaaaatgtaagaagaatataaactgcttcagaactctgcaggttcttctagtagcttctgattcaagttgctctcctttccctattcttatttccaagctgagatgagcaaaatctcacacatttacaacatgctgtagtaacacaaatatcactctctcttctgcagcagcgaagtacagagtagcatgctcttaatagcagtcctcagagggacgctatcaacaatctaattcaatactgccctccccttctctcccctttcccctcttgttcaccaccccccccactcctcccctccctcccccgcagacagctcacaaattgcctagaggaaagaccaacactgctggccaagcaggtgtccagcagggaccactccaaagctcaacagcgggtccggtaacctatagggattagcgattgtcaaggaggttcaaaaattgaagctgctgtcaaaggcagcttgaggtatttcatgaaagcaatggcaaataaagggctcatctatattgtttcaaaatactgccagaaaatagcgttgtaaatgccctgaaagtgacttttaagcttctgtttaaagcaccaaaacaaactcacaaattttctacacaattctaaaaagtgaatataggttaaatgagtattatgctgaactgtttatttacaggctgaagaattttacttctgatataggcaattcacaatcatagtacccttctgcttctacctaaaaacagaattatccatttccatcaatgcaagcttagtaaaggcagatcatgattgacatgaaagcaactacctatttttaaaaaatcactgcaggaacaaagctcatatttactttcaagtctgtatccaaacaataaactcatgcttccaacttaaatagttagcgttcgaatattctttccaaattattcctagtttttaaagattgagatttagtcccctaagaggctttttcatctgtattttagaaacacacatgaatgtttctacagtaaggaactattttcaaaaattccaaaataccaaatttagtatataagaaatacagcatgaaatcaactaacataatcacaaatgccttccttttaagatacagaccaatatcaaggcaaaaagacaaactactattttcctgtgaagcacaaaacatatatgtacatgcagtatgtacatatacacatacatacatatatggaaagagaaagcttattttgaaagattgacaagtaatatatgaactttgtaaatattaaaattatgtcagccatcattaccttacatacaatttttattcaacctatcatacaaaagaaacagcccccaaaaacccagtcaagcattttaaagggttaaattacatatccaactccttttagtacttgcacacaaaacagactcacagaaattgtcaaatgagtcagagaaaggaatatttatcaatgcgctagtggccaaaatatatttaaaagttttttttaacctgccattaatacacataaattatagtcaatattttacattagaaggctttctgcaataatccttaatggttatatagcaaaaaggcctcaggtataatcagcaggggcaacttgtttgaaatccaaagaaggagaaatacatacacacacacacacacacacacacagccacacacatgtatgaacacatcaagtttgaaatgtcttattccacagtgagtttcaaacaaattttcaaaacccgaagcatttgcaaacatttaaaaatataaaacataaagcagctatatattatgtagtaaggaggtgatgttttagaaaagagactcaatcattttccagcttatgaatctttttgtttgtttgcttttttgagatggagtctccctctgtcacctaggctggagtgcggtggcacaatccaggctcactgcaacctctgcctttcaggttgcagcaattctcctgcctcagcctcttgagtagctgggattacatgcacctgccaccatgcctggctaatttttgtattttcagtagagacaaggtttcaccatactggtcaggctggtctcgaactcttgacctcaggtgatccacccgacttggcctcccaaagtgctgggattaaaggcgtgagccaccgtgcctggtctacttcaccttctgagaatgaagatccaaaaacctgtgtaaaaaacatggtagtgaagtgtttccaggagtttatctgtctatgaagacttctcaaacattgatgagt

SEQ ID NO: 1563778 - DNA, 4001 bp, Homo sapiens
tcagtatgggagctaacaccacaactacatggggagaaagcgatatcgctaagagtgagtagtcttttttgtaactacgtggttttaaaatatgctgcttttagagggtttatacaaacatgaaatctactgttaagaaactgtggcttcaaaaaaaagaaagcaggtgccctccagagacagttttaaatcccagcgtctcttagtctccattcaatgtgcttagttaccagcctatgctaacttgagcgactttatcccaaaccactaaagtcctctgactacattaaaacgattaacatcctagtttacaattagagaaatggagccaggcatcacaattcccaccaatcctctctctcaggcctgctcagcagccagggaagaatcagatttaggaccatgtacgaagattgcgtaccaacatatatacatacattttaagtggctattgttcttggactaagttaatgaaacctagaaagaaactttaaagttccctagttgatatttactaaggctatttagtgaaggaatgatctcatcactttcagtaaactgtagcctagactataagcctccaagaaaatcattagtcaactgtaattaaacaaacaaacaaacaaaaaagtcaaaatattcagagctgaagacattcagagctaagttaaaagcttcgaggaagaagaggagtgtgctcctgacttgggagccagcagaggagcctcctaagttagaagattctgaaggagagatggattaggaggcacaaagcagaaactgttagagggcaagagacagtagggccggggcgggcagcgggaccccagaccgtcagggcagcaacagcgaggcccagaggagaagatcttggagagatgacaaagaagcacaggaaagccgggttctggggtcctagaagaacccaggcgtccgacggagccagagggaccggcagaaagggatgcgaaggtgtaaggatgagggcgcgcaccagcacgcgggagaaaaagagggggcggcgggcaaaatgaagctgtttccctgctcctctgctcctctgcccctggtacagatcgcaactcctcgccgcgcaccgcgcagcgccgggtccgaaggcagggaagcggctgctggagcccctgtgacttcaggaccctgcctcaccttgctcgccgcgtcctggcgtcccgccgcttgtccgccgggtgctgcgctccgagggccaaagagggagtcgcgcggcgcagccggggctccctcctgctgcgaggcaccagcacccgcaccttcgcaccctctgctcgccccgaccacttcaccctgtcctggcgcaggcggagagcacggaccctaacccgaatgccgctgcagttattttcaaaagtccccgttccaggcttcccaggaataggagctgagctactgcggccgcagcggcagagcctccgcctgacctcaccagggtgtgggggggctgctgagggaggggggcgggaacccagttggggagggagggggcagtgggggggggagcgcgcgggcgggggaaacatggcggcgggggtggccccggcggcgcctgcgcgggaggcagggtggcggggagccggggctaggacggtgtgtggggtccgaacggaactcccaggctgtagcgaaagcgtgacagggccggaccctgaagctgaatgaccgctaagtggccctcacgcctcggaaaccgggaggctctggtgtgagcccacatggattctagtgccgggaggcagaaaaagtgaaaagtgtcaagtatccagggacaacagtgcagccgccccgggttagccactccaaggaggtccacccgtgcattctgccagccgtggcctcggcctcctcatagtcacggcggggcccgagcaaagggtgtgccctggaagcggtgccacctcacctcagtggggcccacgtctcaaaataagcctgacccaggctctcacacaaatatcactcttctagtgggataagcgcttcatccctccccctccctgctgcagtacacaacattaagaaagaggaaggataaaaactacaaataacagtttaacattttactgagcgtctgctatgaaccaagcactgaagcatcaacttacctaattcacagctactctacaagttacacactattgtctccattttacaagtgacaaaactgaggtgtataggttaaccaagttgccagaggttacataaatagtaagtggcagagcgggactcaggatcccaagcggtgtgattctggtacccaggctcttaaccactatgcaaactgcttccaaactctggtgggactgctcttctaagtcagaatcttgattctgctctatcagcctagcccccaaaaaaaaccccagtcaagcctgtttttccccttgcttgtcttctattcattctttgccttcttgacggttacagcctggggccaccttcttacacctattcctttgccctttctacttataattccagactcctccttgggaaaataaagggagtttgctcttagcaaccagtttaatcactattgtgattttttttctttggctgtttttttcttcttcttcttcttaaggaagtgatgcggtgagtgtggaatctttatgttttctaggatttctccctctgggatctgagatcttcaacattgctgactttgtatttcaacttacatacactgaaattctagtagtaggttttaggtaaatttgagaataatcagctactcaaaaacttgctagaactaaagataataccacattgttggactttaccaaataatcaaagaactccaaatatacatagaatttgcattattaccttttacgtgcaagtgtattgaacccaattcccctttgttaacaggaatgcttccactggcttctccactatgcttattcaataattattgtatacctaccttacacactaaatgcttattgggtagaaagcaccttgtacagaagtttacaatctcactgaggtgatatattccaaacaatcacttttagcatgtatcaaaaacctggcacacaggttaaaaaaaaaataagtacaaactgagctggtgtacactcgagtcactgctttgtcctgccataaaaaggttcaagtggggttactttataataagtttctcccacagaaatgccagtaaaaatgggataatccagtgtgggccaagcagcccttatctacacaaagagaaaaccctcatagcaagggtgttgagatgggggcaactgcaggatctgcatttgaactgccagtagcttgcacagattctcagtttaaaaaaaaagaaaaaagaaaaagaactggcaataagatattacaaatatgcttatccaatagaagtccattgctgtttgggttcggatgctttatctgaatacttaatctactggatagagcactagactcagagtcagaagacaatttatgtgctatgtgacattaagttagtgctctgagagtgttttcccaaatttccagtggggagcaaaataatactggtctgatatgccccacagcattgttttgggtttcaaataagataacacatgggagagtatgttgcatttggagaaaaggtctttaaagaggtaattcagttaaagtaatgtctctaagatgggcccgaatccaatatgactggtgtccttttaagaagagtttaggacttagacatatatgcacatagaggaaggaccatgtgaggatgcagtgagaaggcaaccacttgcaagacaagatggggcttcagaagaaaccaaacttacctacaccttgatcttccagaattacaagaaaataaatttctgttgtttaagttacccagtctatggtgttatactttgttatggcaggtctagcaaacgaacataatgggaagcatttcaaatgccagctagagtatccgctgacttagttattgttcattgctaaaaacacacaca

SEQ ID NO: 1563779 - DNA, 4001 bp, Homo sapiens
ttttaataattgaagctcttatttatctgttttttaaatacatcatttgatgttgcagcagaaactactctcatctcactgccataagacgtgctaccaggacagtgaaatttagccattatcttcattcacaacctggtttcttctgagattgctgccaattagtgcacactgtgtcaatggcaacacttggtcatacatcaggcaaacaactcttttaccgttaagtatgaggatattaataagaacttgcagttaagggagctaatatttttagatgtaaaatgatgtcataaatgctgaattatttcatttttctcagtttttaaatttgaacactagatacagtctatttccaaaaacacagctgcgtatgtcagcatgtgcttgttcactggtatttgcctccactttgtgcttctccattcagctttcttcacacactaattgcagtatgaaagtgagcaaatgaacctcagtatgggagctaacaccacaactacatggggagaaagcgatatcgctaagagtgagtagtcttttttgtaactacgtggttttaaaatatgctgcttttagagggtttatacaaacatgaaatctactgttaagaaactgtggcttcaaaaaaaagaaagcaggtgccctccagagacagttttaaatcccagcgtctcttagtctccattcaatgtgcttagttaccagcctatgctaacttgagcgactttatcccaaaccactaaagtcctctgactacattaaaacgattaacatcctagtttacaattagagaaatggagccaggcatcacaattcccaccaatcctctctctcaggcctgctcagcagccagggaagaatcagatttaggaccatgtacgaagattgcgtaccaacatatatacatacattttaagtggctattgttcttggactaagttaatgaaacctagaaagaaactttaaagttccctagttgatatttactaaggctatttagtgaaggaatgatctcatcactttcagtaaactgtagcctagactataagcctccaagaaaatcattagtcaactgtaattaaacaaacaaacaaacaaaaaagtcaaaatattcagagctgaagacattcagagctaagttaaaagcttcgaggaagaagaggagtgtgctcctgacttgggagccagcagaggagcctcctaagttagaagattctgaaggagagatggattaggaggcacaaagcagaaactgttagagggcaagagacagtagggccggggcgggcagcgggaccccagaccgtcagggcagcaacagcgaggcccagaggagaagatcttggagagatgacaaagaagcacaggaaagccgggttctggggtcctagaagaacccaggcgtccgacggagccagagggaccggcagaaagggatgcgaaggtgtaaggatgagggcgcgcaccagcacgcgggagaaaaagagggggcggcgggcaaaatgaagctgtttccctgctcctctgctcctctgcccctggtacagatcgcaactcctcgccgcgcaccgcgcagcgccgggtccgaaggcagggaagcggctgctggagcccctgtgacttcaggaccctgcctcaccttgctcgccgcgtcctggcgtcccgccgcttgtccgccgggtgctgcgctccgagggccaaagagggagtcgcgcggcgcagccggggctccctcctgctgcgaggcaccagcacccgcaccttcgcaccctctgctcgccccgaccacttcaccctgtcctggcgcaggcggagagcacggaccctaacccgaatgccgctgcagttattttcaaaagtccccgttccaggcttcccaggaataggagctgagctactgcggccgcagcggcagagcctccgcctgacctcaccagggtgtgggggggctgctgagggaggggggcgggaacccagttggggagggagggggcagtgggggggggagcgcgcgggcgggggaaacatggcggcgggggtggccccggcggcgcctgcgcgggaggcagggtggcggggagccggggctaggacggtgtgtggggtccgaacggaactcccaggctgtagcgaaagcgtgacagggccggaccctgaagctgaatgaccgctaagtggccctcacgcctcggaaaccgggaggctctggtgtgagcccacatggattctagtgccgggaggcagaaaaagtgaaaagtgtcaagtatccagggacaacagtgcagccgccccgggttagccactccaaggaggtccacccgtgcattctgccagccgtggcctcggcctcctcatagtcacggcggggcccgagcaaagggtgtgccctggaagcggtgccacctcacctcagtggggcccacgtctcaaaataagcctgacccaggctctcacacaaatatcactcttctagtgggataagcgcttcatccctccccctccctgctgcagtacacaacattaagaaagaggaaggataaaaactacaaataacagtttaacattttactgagcgtctgctatgaaccaagcactgaagcatcaacttacctaattcacagctactctacaagttacacactattgtctccattttacaagtgacaaaactgaggtgtataggttaaccaagttgccagaggttacataaatagtaagtggcagagcgggactcaggatcccaagcggtgtgattctggtacccaggctcttaaccactatgcaaactgcttccaaactctggtgggactgctcttctaagtcagaatcttgattctgctctatcagcctagcccccaaaaaaaaccccagtcaagcctgtttttccccttgcttgtcttctattcattctttgccttcttgacggttacagcctggggccaccttcttacacctattcctttgccctttctacttataattccagactcctccttgggaaaataaagggagtttgctcttagcaaccagtttaatcactattgtgattttttttctttggctgtttttttcttcttcttcttcttaaggaagtgatgcggtgagtgtggaatctttatgttttctaggatttctccctctgggatctgagatcttcaacattgctgactttgtatttcaacttacatacactgaaattctagtagtaggttttaggtaaatttgagaataatcagctactcaaaaacttgctagaactaaagataataccacattgttggactttaccaaataatcaaagaactccaaatatacatagaatttgcattattaccttttacgtgcaagtgtattgaacccaattcccctttgttaacaggaatgcttccactggcttctccactatgcttattcaataattattgtatacctaccttacacactaaatgcttattgggtagaaagcaccttgtacagaagtttacaatctcactgaggtgatatattccaaacaatcacttttagcatgtatcaaaaacctggcacacaggttaaaaaaaaaataagtacaaactgagctggtgtacactcgagtcactgctttgtcctgccataaaaaggttcaagtggggttactttataataagtttctcccacagaaatgccagtaaaaatgggataatccagtgtgggccaagcagcccttatctacacaaagagaaaaccctcatagcaagggtgttgagatgggggcaactgcaggatctgcatttgaactgccagtagcttgcacagattctcagtttaaaaaaaaagaaaaaagaaaaagaactggcaataagatattacaaatatgcttatccaatagaagtccattgctgtttgggttcggatgctttatctgaatacttaatctactggatagagcactagactcagagtcagaagacaatttatgtgctatgtgacattaagttagtgctctgagagtgttttcc

SEQ ID NO: 1563780 - DNA, 4001 bp, Homo sapiens
cacataaaacaaaaactaagttaaaaaatggcaactcaccacagctctaaatacacaattaaactaaggcaggagaagttttccacatttttcctactgataaatattttaaaaataacactcaaatttaaaacattcttttcaaaagcttttctcgtactaatattttctttaaaaaaagattcggttttcctccaccaaaaaggatcatgaacaatactttaaaagaacattttattatatctcctggattttgcctttaaagcaacactgcaaatttaaaaagattttcaaaaattttgaaaacttctagaaagacttcccagtgcacttcagtacgtatttacttaaaatacatttttaaaacagacatttgtagaatactttttcaatccccataatataactgctcatagagatataatttgcacaaattcaaacttacacttcagaacttgaatgataaaactgagaaagatgtactatcaaacatattaatattcatacacaactaaagtataaaagtctcaattaaaagactcattttctgatcaatgttaactctgtttttaattcatgaaaaaatagtaaagaggcattaccatatttaacacaccaccatcaatcatcaatttttaatgccattacacaaaagaagtcatcctaagtgttttagatattcaaaaattcaaacaaatccaacatatgttaaatattaaagttaattcttttgcaattccttaggtatgcctttgtactttcacactggtaattagattaccattaaacactttaaataaacataaactttagaaaaacaaaacaatgatgaagtgtgggcatgccaacatctttaaatgtaagcaagcttgaggtttttaatcctgtaggtttttggatgttgctgtttgggggctcccccgcccccattttgccacaaggtagattcatgaatgaaatcccactttaatatcctattttctctcacttacatgtatgctggagaaagtggagttgacctggatgttttaagcacaggaactgggaatttccagatagcaggagagctcgttttccatttcaatggcatgttgtcaccacggtactacaataacagtaaagagcgtttccataacagactaccaactaagacttccattccacactgtactgacacagcagtggctgccgcggagaacaagcaaaggattctgccagtgcccttaaaccgatgcttccaatctgtaaaatagggctgtaaggtacctccttaaattcttctgtcccctaaagcaatatgatgattcaatcattccaactcaacaatagtgccagaaaagcgttgactgcagtatatttttttaggactgcactgtgcataccatacaatgcagctttatttaataaaagcagccaggctttttttttttaagcttgcaataccattgttctaccttaacagggatactgcagcactgtactatattctgcacctattaacctgatttctgaccaatagtagcaagaaaaaacatagatgggtttcatatgaaaatgaaacaacaacatacctactcagaatacacttgtcatcctctgaacaatcttcttttgagctgcaacaatacaaatgggatataaacctcagcatagccttaggctaccgctaatagagatcagtgactaaattcagcagcctgctttcctcctgtgcaagctctggccacacaaatcaagaatgccattatgggaaaagcccgtttcaaaaattccagtccctctgctttccagctaggagaaggcaaaatgtaagaagaatataaactgcttcagaactctgcaggttcttctagtagcttctgattcaagttgctctcctttccctattcttatttccaagctgagatgagcaaaatctcacacatttacaacatgctgtagtaacacaaatatcactctctcttctgcagcagcgaagtacagagtagcatgctcttaatagcagtcctcagagggacgctatcaacaatctaattcaatactgccctccccttctctcccctttcccctcttgttcaccaccccccccactcctcccctccctcccccgcagacagctcacaaattgcctagaggaaagaccaacactgctggccaagcaggtgtccagcagggaccactccaaagctcaacagcgggtccggtaacctatagggattagcgattgtcaaggaggttcaaaaattgaagctgctgtcaaaggcagcttgaggtatttcatgaaagcaatggcaaataaagggctcatctatattgtttcaaaatactgccagaaaatagcgttgtaaatgccctgaaagtgacttttaagcttctgtttaaagcaccaaaacaaactcacaaattttctacacaattctaaaaagtgaatataggttaaatgagtattatgctgaactgtttatttacaggctgaagaattttacttctgatataggcaattcacaatcatagtacccttctgcttctacctaaaaacagaattatccatttccatcaatgcaagcttagtaaaggcagatcatgattgacatgaaagcaactacctatttttaaaaaatcactgcaggaacaaagctcatatttactttcaagtctgtatccaaacaataaactcatgcttccaacttaaatagttagcgttcgaatattctttccaaattattcctagtttttaaagattgagatttagtcccctaagaggctttttcatctgtattttagaaacacacatgaatgtttctacagtaaggaactattttcaaaaattccaaaataccaaatttagtatataagaaatacagcatgaaatcaactaacataatcacaaatgccttccttttaagatacagaccaatatcaaggcaaaaagacaaactactattttcctgtgaagcacaaaacatatatgtacatgcagtatgtacatatacacatacatacatatatggaaagagaaagcttattttgaaagattgacaagtaatatatgaactttgtaaatattaaaattatgtcagccatcattaccttacatacaatttttattcaacctatcatacaaaagaaacagcccccaaaaacccagtcaagcattttaaagggttaaattacatatccaactccttttagtacttgcacacaaaacagactcacagaaattgtcaaatgagtcagagaaaggaatatttatcaatgcgctagtggccaaaatatatttaaaagttttttttaacctgccattaatacacataaattatagtcaatattttacattagaaggctttctgcaataatccttaatggttatatagcaaaaaggcctcaggtataatcagcaggggcaacttgtttgaaatccaaagaaggagaaatacatacacacacacacacacacacacacagccacacacatgtatgaacacatcaagtttgaaatgtcttattccacagtgagtttcaaacaaattttcaaaacccgaagcatttgcaaacatttaaaaatataaaacataaagcagctatatattatgtagtaaggaggtgatgttttagaaaagagactcaatcattttccagcttatgaatctttttgtttgtttgcttttttgagatggagtctccctctgtcacctaggctggagtgcggtggcacaatccaggctcactgcaacctctgcctttcaggttgcagcaattctcctgcctcagcctcttgagtagctgggattacatgcacctgccaccatgcctggctaatttttgtattttcagtagagacaaggtttcaccatactggtcaggctggtctcgaactcttgacctcaggtgatccacccgacttggcctcccaaagtgctgggattaaaggcgtgagccaccgtgcctggtctacttcaccttctgagaatgaagatccaaaaacctgtgtaaaaaacatg

SEQ ID NO: 1563781 - DNA, 4001 bp, Homo sapiens
gagggccgactggggccgcgggcggggaaaagggctggggggcagcaggcagagacagaagcaccagccgaggaagcgtcgaggacggcgtctctgggcttctgccccgaagcgcgccgagcctcgggatcacccacgccgggggtggaggaaggcgggaaaggggcggggaaggggcggggcgtgcggggccacgagccgggggccgctccgggccgcgcgccccctgcgggccgcgggagccgcccggggcccgcccagggaggcggggctggccggcagggggcccagtgcgctgtcgtcttgacgcggaaggccgccacgctgggagagagggcggagggtgggaagccgttgggggcggggagctggcccgggaggcccccccctcggcccctgctggcgccccgagggggccagcccgtggcctggcgggtgtttaccttccccctggtcgagcgccaatgccgccatctttcagcccaaaacgcgtcacttccggcgccacgggagcgggagcgggtgtgggaacgggggggaagggggggcggggaaggctgtcccgcgcccgcggcgccccgcgtcccggctgccggcccgccacgccagcggtttcccaccgaggaaaacaggcggccgggcgtcgcggccctggactgggcccgacgcagcttcccccgcggcgccgccgtcggggctgaggacactcagctgtcctcgtccccttgcagcggtctctctccgcctgcacgagcgatgggccctgagccactgcggtgcgcccaccctcgacaagttgagggctaggaagccaggaaagtgtctttttgcatcttggccacggtgggggtgggggaatcggggacaacgtggagggagcttttccatagctacctgttataaaagtgactagatctgcgccaaatgacatcattttttgtaaggcaacttgcagtggactattgcgtcactgtccacttggcttactgcacaacaattacacgtttcagaaatcgatttcccaagggtgggaaaattcataaaaaattgcatgtctgcaccacccggagataatgccggatttaaaaaagctgtctctacttgcgtcaaaataatcaagaacgaacattcagagggcagtgatttttgttgttcgttttttatagaattctagctagtactttttaaatattaccttttcttgacaagaatataaaactagactataggactgttttgtaaatttattatggcatctctttctgggaaaagtgtagatgacggaaatacacagttggaagcccgtggatctacaattaaccttaaattagggcatccattgcccatagcagatcctaaactgaggtatttcggcttcccccacccccaccccccgccgccattttctctctagaccaatatcccgatgaactttccgtgagaggtgtcgctaaaagcgataattatctctttctagcaaacttgaacataccatctttcccaagaggccaaaatagcacacggtgtactgttttgctgaagtagactacttcgtgggagagataacacaatcacttcaatcttttggaaatacgcttccttattccgatttaaactataacaagctttaaaaaaactgtaagacactgaaattcccaagttgttcacactttctttccatcttttccaatagctcctttaagatatttctgttcattatttaaaaatccctgcttgccatatttgtatctattactacatgacaaattaccccagaatttcacattaaaacaaatttttaaaattaaatcataaaataaactttaaaaatgcatacattccacttctgaatatttaaatgttcatgcattattcccgaacatctaaacgctgagtttggatttttgtacattaactaacattttaagctatacattactatgtggcactgacctgtctaaagagaggcttctgttcttgattcaagcaagagttgaaacgtttctgcgctctttgtaccaggtataaatgtagtgagtgtatgtcataagccattgtgtgatcaccgtgcttcccgtccctccttattttgacattgcaaggtctcgtggaatttcaaatgtgcttttttggatatttatgtagttttaaaactgggctgtgtctttcaatcaatctatacgtttactatatgaacccctccccaagttatcttcaatcaatgatgcctctttcactcttatttcttatttttatgttattattattattttttttttgagacagtctcactctcggccaggctggagggcagaggcatgatctcagctcactgcagccttgacctcccgggctcaagcaatccttccacctcagcctcccgaatagctaggaccacagacgtgccccaccatgctcggctaacttttcttttcttgtttttgtttgtttgtttgttttgtttttgtttgcttgtttttttctgagatggagtctgtcgctcaggctggggtgcagtggatctcggctgactgcaacctccgcctcccgggttcaagcgattatcctgcctcagcctcccgagtagctgggattacaggcgctcgccaccgtgcccagctaacttttgtatttttagtagagacggggtttcactgtgttggctaggctggtctcaaacccccgacctcatgatcgcccgccttggcctcccaaagtgctgggattacaagcgtgagccactgcactccagctcaggcaacagagcaaaaacaccgtctcaaaaaaaaaaaagaaaagaaaatatattttaactttccccaccaatttctggactgtaatgggagttgttaaataccttgagagtatcctttcacactggtagagtcccacagaggtagatggaagctgtcttttcttagccctctagcctaagtatttgagaatacacattcctcaatagctatttatttagcagctagcgaggtcggaagcatgctagaagcctgggcctgggagtgctggtggagttggaatgaggttcttccccaggggttctgaggatttaggatactgcataccctcctcctccctcctgtttttgctttttaagaaattgaggccaggcgtggtggctcacgcctgtaattccagcactttgggaggccgaggcggaaggatcattagaggtcaggagttggaaaccagcctgacgaacatagtgaaaccccgtctctattaaaaatacaaaaaattagctggcatggtggtgcgggcctgcggtcccagctactcaggaggctgaggtaggagtatggcttgagcccaggaggcagaggttgcagtgagtcgagattgcaccactgcactccagcctggacaacggaactagacgctgtctcaaaaaaaaaaaaaagaaaagaaaagttgaggcttttcagaaattcccagtctgtggtagttgtcttggtaatcacttttctttttactttttttttttttcttttttttgagacagagtctccctctatcatccaggctggagtgcagtggcgtgattggctcactgcaacctctgcctcccaggttcaagtgattctcctgcctcagcctcccaagtagctgggactacaggcacacaccaccacgcccagctaaattttgtaactttagtagagatgggttttcccatgttggccaggctggtctcgaactcctgacctctagtaatccatccacctcagcctcccaaagtgttgggattacaggcgtgatcaaccgcacccagccaccccatgatctttccactgtaccatgtaattatattaacatagtaaatgatcttcacatagttgtatttttattcctacttaattccacaaattgttggtttgcaatctactatactatttatttattcattccataagtatgtgtaagtgcctagtacatgccaagtcttgttctacccactggggatccatcagtgaataaaacatatg

SEQ ID NO: 1563782 - DNA, 4001 bp, Homo sapiens
gcctctccctgccttgccccccgagatgtacacaacaccgcggtccccgacggcccccgcgtgaccgtgcagagcccgcggtagtgccccagccgccgtccagcggtcccgacgcaggtcgtacatctccaccgaggccagcacctcaccgcccgcacccaggcccccgacggccaggagcctctcgcccaccgcgccgcaccagaagtgggcccgcgcttcccgcatggcgggcacttccgtccaagcgtggaagcgcgggtcgtaacggtgcacttgggccgtgaccacccgcgagtcgtcggccaggggagaggatgcactgccggaagggctctccccacccaggacaaacaggaagttgcccgcggtgcacacgctgtgccccagcagtggtgtgggtagctgcgtaaggctgcgccagcggtgattgtacacatcgaaggccaccacgttctgggtgagctcccactcctcctcctcctcctcttcctccaactcttcctcttcttcctcgggctctggggcggcgacctggcccctagctgccctctgcggggccgcgacctcctcaatcaccacctcccgtgccctgcgcccccccaccaacaagatgcgggtctgggggctccggatgctggtctgctcgccctgcatgagcggctggcgggagggcgtcgtgtggtagttgagggcctggatgatgaggcccttgacccgggcgggcagcacgaggccagagcccgagtacacgcgccgcagtacgtcggcgggaaccaggccaaagcggacacgctccagcaactctgtacagtgtgccaggcgctcagttgtgggctcctgccgcaaccaagctaacgccaggcccagtagccgggcctcgggcacccgcgccacgtcgggggcacccagtacagccctcagcgatgtagggttgagctccaggagtcccgcggggcccgcgccccgcgccagcagctcctgcaagtggctcacgatgcagcgctcggccgcgtccagcgtgtgagccaggccaaagcgcgctgccacgttggcggcgaagcagcagttctctggagccagctggcgctccaagtagcgcccacagagccccagggcctcagtgacctgcaggtagctggcggcctccagagtgtcctctacagtgtccatggaaagcgacagccaggcagtgtagatgaagtccagcaggcgctgcaggccggctgccgatggcacgtgcaggtggatcacgcgcgcccgggattcctgggtgtggctcttgaacagggccctgaagtagtcactggagcacgccaggagcgacctgtgcgccgggaattcgctgccctcggtctccagtgtcacgtcgcacaggaagccctcggcgcgcagggcctggtagccggtgagcagcgcgccgccatgagctttgcagtaagacaggaagtaactcattctacccagggctggaagcagcctggtgggaccagaggcctgctgggcagggccggaggcatcccggggcacaacactcccgggacccccgcgtaagccacagagcccctagcaggggcccatttctgcctgctcagtttaaagcccagggctccttcatccagacctgcagatcgcccagtgcccctctcagagcaaatccagtctggaaacggttttcggaggcccctagtaacggagggcgcggaatttggaggcttcccgggagtgtggggcttggtttccacgactgccgaggcttccagcgcgttgcccgaagtcccctccccggcccaatgtggagagcccacacctgcacgccaggggcggcggtggctgcacaccatcacctggaagaaccgagttgccggtggactccgggggtgctggatgtccgacggcgcagatgcggcgtcccgggagtgcagggcgaggactctgacctctccggggtggacgaggaggacgggttctgcgggcacccgcgaaggccggggacaactggtcacggggcagtgggggggtgagcttgttccgcgcggaggatcaactcaaagcctaggggattagggaggggagggcgcaggtcagagcggcgggtcagaggcgtgattgggcgccgcacataacatgccggtagctcacagcgacaggaatagcgcgccgcctcggcctcccgggcgcgccccgccccgtgccctgactgctggccgcgaaccgagggcacgggcgcgggtgaagcggcccgggccaagggcttgactccagtgaccctactggccaccagtgtcaccagagggtcccaggaacccggttggggttgcgggagccggagttcactggagaggcacgagtcgccggagcccctcgacccggtagtgtcggcggaggggcgtccggctgggcaggaggagtgtagacctcccggtgtccctgtgtctgggaaagaagccctggctcaactttctgctttgaagaggccctaattaatccagcgggagcgaggattaagctgcgactttgcgcgctgacacccagtaggccgctgcgcgctgaagaggcactggcgggaaccacgcccgggcgaatcccaagctccccgccagcggcgctaggtaacgtgtccctcacctggactcacccttgagagattctgggcctactctgagcccttcctgaggcagctcgcgtctcccaggctggctcgtttcacctttgttcccacgcccgttcccagacctcacctgagttttcccttcctattcttggaccctgccccgacccatccctttgcagcatgaacaaggaaactgtggttgacttggattttctgccactcattgtacacttcctttggggaaaaaaaaaaaaagtcattccttccaatttctctccccgattttccacgctctgatctaattactggctgctacatcctcgatgttatcccgggataatgagccgtacggttgcaagctcggtaaagctggaatttcgtagggcccttcctcataaagttattttttacaagaaacgccccagcatggaaatgactaaaaccagcctgatcttgagactttaggaaagcatctctccatctccatcctgttcttaaataactaaatgattaatataactggtctttttctttctttctatttattttatttatttatttatttatttatttatttatttatttatttattttttgccaatttggagacttcttttgctttcatctgggattgatttttctattttctagtgcaacccctctggcagccttttttaggtgagccttttgagggcatctgtaataactcgtatttctgacagctggggttgtatttcatagggaaaaacagttcaaggaaggataaaattatgtcatttcctacctggcatgccattagtacttacaaggtctccaattagaagtaattctttaaatgcataaaagtattagtaaaatgattttgctgtcaaagatgaaactgcattatgacttaaattagccaaattataaagtgcaggcaggggctccagttgggcttccttaaactccagaggctaaaaatactccaatttgaattcctaatgttagagctaaagctgggttgggagggcaggtgctggatttgtggggatttgggggttttagcattaaaattattgattcacaagtaaaataccagtttggttcactttgcacagatctacattttgaattcaaatggcctttacccaacccaatagaattttgctagaagggatttttgagatcatttagtcaaactttgtcccttttctctgaaatcttgtttttctttttaaacaaatgtgacaaacaagccccagtgagagtacggtttgtctggatgacttggatattaagttaccaagtctgtactagaatcaagggctccctccccactatattatgtgagcttatgtatgataaaaataaaattgtgcaacacacagtttatttaagccaaata

SEQ ID NO: 1563783 - DNA, 4001 bp, Homo sapiens
aaaattatggactctatattactttgagagtcttatttgttgtaccaaatgcaacctgcaatccctacagttatatagcttttccacgagcaagcacaaaatatttaggaaaatttcacacatacgtgctttatttcctgagaagtttatatgacagacaatctaacattattattaatgtcatttcacaaagtcttctgcatgtttatatttcaacaagactgagttcctataaaggcatcattttgctgtaatgttattaggctgcttcttcttctgataaactgttttgaatttatgaaagcaagacactgtgaggttgttttattgggaaaacttatattaagaagcaaatctgccagtccttcttctctatttttaggtagagacatagtatgccagatatccaggtttccaaataaattagcatgttgaactactatatgatctaaaatgcataaaaacacttatttttctatagtactactgaatattaattacattgccaatattatcaactgtgtctaaaacacgttgggactataaaaatgtctgatagtgaaaaagcaaaaaacaaagagataaggatacactaggttaagttatagttgacagtattagagaacagaatgtaattttcttgcactcaaacaataccggtgggcataaaagtaaagacaaaatcaaatgttttatgaactatacccaaactacactatatcgtcactgtttattcaattttcattttatgtaaaagctgaaatgctccatttcccgctttaagatcacattgctgtaagtagcatcttattacctgctttatgtagaatattttcatgcttgcaaaaactagctatgaaagtaatacaacttgaaatgagtctccgaacgccaaatattccatattgtcacataaagataacacagttttaagagtcaatatcgcaactatgtactaaggaaacagataaggatgtgctgatcagtcacagcttttattttgttaaagttggcctaactcacaatgtcagaaagagttctccgtgattcataacacttgcacaaagaattgcatttaaacatctgagccacggagtgtatttatagaacattagtaattacaataaacatctcttagaattgaaacagaattcttaatgaaaataggagaagtaaactcataacccaccccccaaatttccggtaattataaagacgtattcattattgctgttttcttttataaacttagaggagacggtttctgagagactctgattggctgaatacaaactcagagattattatgacactttctatttaaacactaaacatgaattgtagaggataagttaactgaagttacggcattcagttatgcgaccaaaaactcttaccttgctgtagaatcttctatattgtcatcagccatcatctccaaatcttgtgcgcgtttctcacaagcttctttgaataaattcttctctggaactgatttaggagtatcttcatttgcttgaaaatgtactatcagattatgttgctgcaaattctgaacggctctctgatgggcaggggccggtcctggcactggtgccagtatattgtggtggacaggactgttgcttttcttcagtccgtttctgtcccgagagtggctcttcaacctgccctgaaccggggtccctctatgctcatatccttcctgctgaagacagcttccagtgttggtggaaccttgaaaaggatgactaaaccacctccagcgtagccttaggatctgtttcacatcaaactctttcttgccagacactgacatcgtagcaggaggaaagacaaaagccttctctcacagaaaggaaacggagcctttgttatctcttgtttttctgcctcttctgtagaactaacaaaagcacaagtgccgagagcagtctttcttgctttctctcccctcccccactgcctatgatacactgtgaatacttgtagccttctagcagaagcagaaggctgcagctaacagtgtaggtgggaacccatgctgacaggatgatgaggtcagaccttaaacaagtaaatcagcttaccacaggaaagcagccaccacaacactctccagctgttagatttgcaggcttgcagccctcctgcttggacttgcaaatatctagccctgcttcttcagtatcaaagtacagtagctgcagctgaaacccaggcaagtgagccaaagcgaagtgtttaaacttattttcttctagattccttctactcacgcctcccctgctagattcatttctcagtagcccacttctaaaaatgtgccactttgttccatgataatatgcgacagaggaattcattataatctattttgagattccttttatggaaactttgaaaatggttcattaagggaaagcatcagtaccctcatgcgggttcgtaattagtttttacaaaattaatctgaaaatgtgaaagtctctatatgaatatttacctgaaaacttgacagattttagaaacatgtaagaaagtattggttacccatgaccactcacacaaacacgccatttgggaatgtagaaatggtatttttagtctacatatggaggaagaaagcagtgcttttccaagctagttaggttaaaagagatgtcttctctcagttaccacagcttgaaaatgaatagttcattctggctccatgcctggatacaaaccttcttatcatgccttttactttcacaggcagtgttaaaggtttattttctttgttcaaaaacccttatgagaggatgaacagagtatgttttgaattaattccaaatcatcacactgttcaggaataactgtgcccaaagtactttgagatctgaatcataatcactactttgtacagatggacatgtttacaaaagacagtcatgtatcaagaatgcatttatcattgacattttgaaattcagtttgtactttatccagttctcatatcatgcatacaggtgataaaggggaaattatactggtgtatgactagaaagaacactgaagttgtaagattttgcttttagtttgactttatggttaatgaactgtgtgaccttggacaagtcactttacttttttgcatctcaatttcttcatatatattatacggagtctagacagatttctatgttttcaaaagcactcagatgtgatggatttaaaaacaactgaagagagaataaaatgaatctaagttttgataggcattttatctgtggttttctttaaattcaattatacctctccctttcccctcttgtttttgtaggtgtgatagttaatttatgcatcaacctgactgagctatgggatgcccagatatttggctagtctcgatgtttctgtgagggtattttttttttggatgagtttaacatttaaattgatagactgagtaaagcatattctcctctctaattgggtggggctcatccaatcagttgaaggcctaaatacaacagaaggctgacctttccctcaataagagagaattactcttgcctcactgccttctatctggaacatgggatttcttcctgcctttagactttaactgaaacactgcttcttcctggatttcaagtctgccagcatttgcgctggaaatacaccattggctctcctcagtctccagcttgccaactgcagatcttgggacttgtcaggctccataatcatgtcatctaattccttataataaatctgtgtgtgtgtgtggtgtgtgtgtgtgtgtgtacatatagaggaaacaaactgtaaatatcaggcagaataaataaaatgttgtaacagaaatgtaaataacatgtggtaggagcaagaagtactaaattatccatttaagtaactctaaataatactttttcatatatcaggagtctataaccttatttttctaacatgttctttgagcttgttatgatttagatataattggggatttg

SEQ ID NO: 1563784 - DNA, 4001 bp, Homo sapiens
tcattttctcctttctcacaatttgcattttgattaccaggctcctccttctttggtagtttttcaaataaagttccagcaaggagcttctgtgcagagtaaccattgcatactgcaacaatcattgtgacagtatcaggacaacagggttcagcttggtgtggcttagcaggtcatgtcccctggcccactttcattaagcattgaaataaggcagcagagatggatgacagcgtacctagagactacttggaaattctataaactaaaaatatattttctgcactttggtcaggatgaagggacactcagcatttcccctggaagcaggtgcctgattgatggtgtggggctgactcaaattcagaaatagccaatggcaagagacgggaacacaggggtgcacaaataggtgtgctaggagaggccaatcctctgtggctggctgtgatccttcccagcctcatagcgcctttacaggcactacagcagggcacctgccccatggggggacatccatgcctccatccacctgtgactttcacctgtccctcctccagcaggaatcaaactgcactgtcacacggtcctcgatggcatctggaagttgagccagctttgctttgtctcagctgaagtgagggacaaaggccactatgggtccagctcttctaggacctgctatcctgtgagcctcctttctctgccctgaggatctgggtctgggctctgggctgaggcttctcctccaactcgcctcagctcagcgtacctctcttgtgtccaaggccgcaggaccaagggattcagagacaaacacgccccagttgaggccatcactatagcaccagatctctgcctgtgacccagggaactcacctccttctgaggcctcagcctaagtcttctgagactaagtgaggaagctggggcacagataaactggagtctgaagtcggtgagcagtggtctcaggtctgcactctgaccctggaaacacaatgaccacaggagattcaattagcaacacctatgctcccttccatgcagtgaagttgagtaaaacccaaaggttttacccagcagaagagggacaatgcctcattctagctttaagagttaacattgattcacagctcaattatcctcagtgagcgaaaccctgccttcctgagtccgggctttggaatcaactgactgactgctgtgccacttttattcactgaagaaatgggtgccttccttccatgagcccgttctccgtgctggaaatacatcagggaacaaaatctcaaagtcccagctcccgcagagtttctagtccagcgggggagacacacaggaaacaataaacatgataaacgaagcacaggaaaagaaaaaaaagattcctcgggtttgctacctacgtgactttggacaggttgtcaagccacactgagccattttctctctataacacgaaaataatcatcgtaacacctcacagggctcctgtgaagattaatgtgaaacatttgcaaggttgcctggcatttttaggcgctcaggaaacaggcgcggagtgactcaatcagtcactcgctggccctgaacctcgtccccagcactcacgcccacaggcctgcgggtctcagggaaccggaccctggtcctggctcagagggtcctgagagcaaggggcctgtctcaggcggggaagtggcctggaggatgggcttttgagctgggctgtagagccaccctgtcacccacaaaggcgttcacccatggccccatgaccccacgaccccgtcaacccccgcccccatcaaaaccatcaccacctccgcgtccctcttacttcaccgccaagagcctgaaacctcagaggccgctgacaacagccagtgtgaactagggaccgccctcccgggtcagcggagcacttccgcttcccaccgccccctgggaacgcgggatggggtcggagtgtgtcgcagcgccgcgcacgcgcagtagcacgggggtgggtgcgccaccgccaatggccaagatggcggcttccagggaccccgtgtttctgatagtgttcggcttgaggacaaaagcgtgtgaccattttccgtggcgagtggtacaaaaggcccagggcgtcatcccttgccggcgagaggcgagcggactttccagcggcctagctcccgcccgcagggaggccgaagtcccccttgtcccccttctcccatttcgtcctcctgcatcgcgaccctcccagtcgctgcggcattgggtgtttgtgtccctccgtcctgaaagccattgttcccgcttttttaccctcctgggaataggaaaaagagtcgcgcctccggcgccaatagcgctcggaggcgtggccatctagggtccaggctggtctcagggaacccgaccctgggcctggctctcagagagtcatgggagcaaggggtctggctcagccggggaagtggcctggaggatgggcttttgagctgggctgcagagccagcgatctcttgaaatgaggaaagaaaccctcattctgatttttctctacgcaatagaggggctccaattcctgagatcctagacaccctgggagaatctggattttacttttttgaaaacgcactgtaaatagcaaagaggtgttttctgtgagattgccagccagtggcaacatggtcccctaaaaaggcctgtaatggccttgaggaaagttttctgtttcctgtctgggcctgggggaaacagacgaagtgtgttctccatccttctgtgcctgcctagtcaccaagcaggcttccttgggtcaggcatggcagggtctccaccaggtacaaagcaatcccttctgtgctggagccaactggtgccagacactgtttatagatgaaagtgttaaagctgatcatggaatccatcagatatgtatttaatttccatttgaacatgggtctttctcctttttctttttcgctttctcctctgcaggttaacttgcattccccaggtagtttgaatgagtctcagcccaaatttgcaaactcagtacagccatcccctgggaagttaccctgtctaagcctcctgtacaagtcctaggaaaagaacctgttttcctttgggcatgtgagcagtgaattattgctcattcagaatttcatgtgtatgtgttgctgatggccaggtttagagaaaccaacctatttatttttagaggagaggtgaactgataacattcttttcagacatcactatcacgaggcaggaaagggctaatagtatgacagtgtcctgaggacaatagagaaactgcaaactgcagaagcacctggtctgtggccctgaccagcatctctccatttcaggatatggagattctgcaggaacaggtatttcttcagaaagagaagggactgatattttagatgtgaccagatgcagggcacgctcttattgccatgccagcatttgctattcatgatgttagtattcaaaaattaagaaacaccctgcctcggccattggtgtctactaatccattggaagagaagactggaatccaccacttgctagcttcttgggtctcattcccccgctttctcccatagctgaggaccacctaacctagatggctgctgtaattgttcaaaggaacatctttagagcctgaagcccaggaatagcccgtggcaggcacctggtaaatgttagttttcactgcctctcccaacactatgaaacatgcagcactctctgcaactgaccctgtggatttccataggcaggagaatatccagtgttaagtggagctggtattttcagaaatgaagcccctttccttatttgtgccagcccgttttgtcttaggcatatgtgcattgcattattgcccactctgtattttatttgcatctgtaacgatggccaggttcagagataccaccctatttacttctagaggaaaggtgaactgataaccttcttttctcata

SEQ ID NO: 1563785 - DNA, 4001 bp, Homo sapiens
gggccctgagctggggagggagatggtgacagggatgacaggatgcagaaagccaactaggtggaggaagcaggaaaagagacaaagggggctggagtggctggggagggagagatggaagacaggttccaacagggagggccggctgcctgccactgcccactgtgtcgtatcagggtcaagaacaagtgctggtcagtgaccagggcagccttggagctgccatggccttttggcctagttctctctccccactcccatctttctgtagagaatgcacggcttgcattccactgtacagtgttatattgtgtatccacctctgtgtcctctgggtctaaaagcctcactggtgtgtgtttccacctgtgtggcctctcagcggctctgctccttcatccctgcacctgccttgtcttcatgcacctgtgtgcatgtgtccatgtgcatctgtaccaagggagtctgcctggccctggccctccatgtatgtgtctaaggggccagcccctttacctcctccaagccctcactgcctcccaacgccaggtgcctccccagcctctctctcgcagcccctgtcccactgctggcacagacagtcttcccaacccctatccgccaactcgtctctcagtgacactggcctcctccttgtccaggcccagagacaaaggtgtcaaggtgaggctgggaagggactggagcctggtagctcaagagacacaaatgccctcacacatgataccctgtgacatgcccctcacacggcctgacagctacttacaggagaaaacaccatcacggtaacaccccccacacgcaagtgtgtacttacattcagccccactcacacatacacatgacccaatgcaatcaaatgtcgtggtcaaatacctcccgacctccacaagcctggccagtaagtaacagagtgactcacacagtcacccatgtaaggaagtcaaaatcacattcacgaatatctacgctcagtcaatcacaagaacacacagacatacacagtgtatccatgcttaatcacaaccctacggccacactccccaacatccactcacctgcttgtgcccccaacaaatgttacaaccatagacacatgctccagcagccctgcccccacccccaccaaataactacacacaaaaaagggtccagaaggctgctgggctgggaccagggtttttcaagccaccttttcctgtctcagttcagagacagggtgaccaagggcccaggaggggaaagagaaatggggacaagacttgaacacaggcctttgcacaagccagctgagggctggggacgaccccattctcctgctgccacacccctgtggtgggggatggaagcggaggagtcggagtggggcgggcagagatggggcgggctaaggagagcatggaggaggcccaagacctcggggccctgctccaggttcgctgtccctggtgctgaaatcgccccggcggccgcgcctgtccctgtccatggtcctgacacgccccgcaccttctaccctgcccttctctccgggggtacccaacgtcctggctatctcctgcccaccctgtgcccaggaaaggccagggagaggagtcagggtccggaacagggagaaggtgaggaggtagaagataaagaggggcccaacatagcggcgaaggtaggcgcccaggctcccttcagctactcacattcctcggggatctggataagcaggcaggggctgcagaggaggagaggccacacgtaccgcagcgccacgaccatctttcccggcggcaccgcgcagcacagccagccgggctcggttcaggctccggccggaggggaagggggctggtgggcggcttggggcgggagttgggagtgggggcactgggagaggggagaagggaagggaagggtgggggaagagagacgagagaacggaaggacgttagtgactaacatctgggtaagcccgggctcttggccccgccctcagccccgcccccagctggccggcttctccagccctcccctccccatccgcacccctccccaccttggagggagaaatctggaagagatagccctggctgggcctctaggttgccttttattccctctctactctctgtctgcacctttcctgccagctgccttcccagcaccaacttgttgccccatcagctcccctgtgcatggcatgcacatccccgtatgtgtctgcatgtgcaggtgtccgtgggcatgtgtgtggttgtggatctgcaagcagggagtgagctgtatgtgagctggtatttctgtggtgtgtcttctctgggaggggttgcactcatgagtgggtgtgttagtgtgtgtgcctgagggaatcaacacacaagtctgctagctacgtgtgtcttcttgtatgtctttatgtatctgtggggatgaatccctgtatctattatctctgtgtgcacacacatgtagagaagaattcttcttgcagtcacattgctatagctttcagagccaactgatgcctgggtgctgtacagacctaaaaagctaatggggggattgggaagtgggatagagaagggaggaaaggggcccaagatggcagcatttcacaaaatagtttcaggaaaatgaagaaagaatggggaaagggccaggcgtggtggctcacgcctgtaatcccagtagtttgggaggctgaggtgggtggatctcttgaggttgggagtttgagaccagcctggccaacatggcggaaccccgtctctactaaaaatacaaaaagaaaaaaaattagccttggtggtgggcgcctgtaatgccagctacttgggaggctgaggcatgagaatcacttgagcctgagaggcggaggttgcagtgagccaagatcgtgccactgccccccagcctgggtgatggagtgagactctgtctaaaaaaataaataaaaataaaaataaaaggccaggcacagtggctcatgcctgtaatcccagcactttgggaggccgaggtgggtggatcacctgaagtcaggagttcaaaaccagccaggccaacatggtgaaaccctgtctctagtaaaaatacaaaattagggctgggcgtggtggctcacgcctgtaatcccagcactttgggaggctgaggcaggcggatcatgaggtcagcagtttgagaccagcctggccaacatggtgaaatcctgtctctactaaaaatacaaaaaaaaaaaaaaaaaaaaaaaaaaaagccaggcgtggtggctcatgcctgtaatcccagctactcaggaggctgaggcaggagaatcacttgaacccaggaggcagaggttgcggtgagcggagattgcgccattgtactccagcctgggtgacagagcaagactctgtctcaaaaaaaaaaaaaaagttagcctggcgtggtggtgcattcctgtaatcccagctacttgggaggctgaggcaggagaatctcttgaacccaggaggcggaagttgcagtgagccaagatcgcaccattgcactccagcctgggcaacaagagcgaaactccatctcaaaaaaaagagagaaagaatggggaaggaagccttcccttgagaactggtgtgggagaagagaggaaggaggaaaacaaccccctgctgctcctcagccccctgggggtcaagagaggccactgaggcctcctcccttccagatgctccaggttagggtcaggacaggggtcaggacaagctctgggacattttccgtgacagtgtttctaacacttcttgtgtgtctcaaagtcccaatttctaggtctttgtctgagtcttcagagctcaactgctgcatgtgtccaccccaaacccaagccacaccggccatgtccatattcacctacaagtaaggggagccaaagactaagggtctgaaagagggggctcctctgacaatgacaagaggaaacagactcccaagtggccagacca

SEQ ID NO: 1563786 - DNA, 4001 bp, Homo sapiens
gggagggagcagcaggctgcctctgaaagctttgtctctgcagaagacctcagtgtgaaggtccagggagggaggagggggctccctggggacactgcagagggccctgagctggggagggagatggtgacagggatgacaggatgcagaaagccaactaggtggaggaagcaggaaaagagacaaagggggctggagtggctggggagggagagatggaagacaggttccaacagggagggccggctgcctgccactgcccactgtgtcgtatcagggtcaagaacaagtgctggtcagtgaccagggcagccttggagctgccatggccttttggcctagttctctctccccactcccatctttctgtagagaatgcacggcttgcattccactgtacagtgttatattgtgtatccacctctgtgtcctctgggtctaaaagcctcactggtgtgtgtttccacctgtgtggcctctcagcggctctgctccttcatccctgcacctgccttgtcttcatgcacctgtgtgcatgtgtccatgtgcatctgtaccaagggagtctgcctggccctggccctccatgtatgtgtctaaggggccagcccctttacctcctccaagccctcactgcctcccaacgccaggtgcctccccagcctctctctcgcagcccctgtcccactgctggcacagacagtcttcccaacccctatccgccaactcgtctctcagtgacactggcctcctccttgtccaggcccagagacaaaggtgtcaaggtgaggctgggaagggactggagcctggtagctcaagagacacaaatgccctcacacatgataccctgtgacatgcccctcacacggcctgacagctacttacaggagaaaacaccatcacggtaacaccccccacacgcaagtgtgtacttacattcagccccactcacacatacacatgacccaatgcaatcaaatgtcgtggtcaaatacctcccgacctccacaagcctggccagtaagtaacagagtgactcacacagtcacccatgtaaggaagtcaaaatcacattcacgaatatctacgctcagtcaatcacaagaacacacagacatacacagtgtatccatgcttaatcacaaccctacggccacactccccaacatccactcacctgcttgtgcccccaacaaatgttacaaccatagacacatgctccagcagccctgcccccacccccaccaaataactacacacaaaaaagggtccagaaggctgctgggctgggaccagggtttttcaagccaccttttcctgtctcagttcagagacagggtgaccaagggcccaggaggggaaagagaaatggggacaagacttgaacacaggcctttgcacaagccagctgagggctggggacgaccccattctcctgctgccacacccctgtggtgggggatggaagcggaggagtcggagtggggcgggcagagatggggcgggctaaggagagcatggaggaggcccaagacctcggggccctgctccaggttcgctgtccctggtgctgaaatcgccccggcggccgcgcctgtccctgtccatggtcctgacacgccccgcaccttctaccctgcccttctctccgggggtacccaacgtcctggctatctcctgcccaccctgtgcccaggaaaggccagggagaggagtcagggtccggaacagggagaaggtgaggaggtagaagataaagaggggcccaacatagcggcgaaggtaggcgcccaggctcccttcagctactcacattcctcggggatctggataagcaggcaggggctgcagaggaggagaggccacacgtaccgcagcgccacgaccatctttcccggcggcaccgcgcagcacagccagccgggctcggttcaggctccggccggaggggaagggggctggtgggcggcttggggcgggagttgggagtgggggcactgggagaggggagaagggaagggaagggtgggggaagagagacgagagaacggaaggacgttagtgactaacatctgggtaagcccgggctcttggccccgccctcagccccgcccccagctggccggcttctccagccctcccctccccatccgcacccctccccaccttggagggagaaatctggaagagatagccctggctgggcctctaggttgccttttattccctctctactctctgtctgcacctttcctgccagctgccttcccagcaccaacttgttgccccatcagctcccctgtgcatggcatgcacatccccgtatgtgtctgcatgtgcaggtgtccgtgggcatgtgtgtggttgtggatctgcaagcagggagtgagctgtatgtgagctggtatttctgtggtgtgtcttctctgggaggggttgcactcatgagtgggtgtgttagtgtgtgtgcctgagggaatcaacacacaagtctgctagctacgtgtgtcttcttgtatgtctttatgtatctgtggggatgaatccctgtatctattatctctgtgtgcacacacatgtagagaagaattcttcttgcagtcacattgctatagctttcagagccaactgatgcctgggtgctgtacagacctaaaaagctaatggggggattgggaagtgggatagagaagggaggaaaggggcccaagatggcagcatttcacaaaatagtttcaggaaaatgaagaaagaatggggaaagggccaggcgtggtggctcacgcctgtaatcccagtagtttgggaggctgaggtgggtggatctcttgaggttgggagtttgagaccagcctggccaacatggcggaaccccgtctctactaaaaatacaaaaagaaaaaaaattagccttggtggtgggcgcctgtaatgccagctacttgggaggctgaggcatgagaatcacttgagcctgagaggcggaggttgcagtgagccaagatcgtgccactgccccccagcctgggtgatggagtgagactctgtctaaaaaaataaataaaaataaaaataaaaggccaggcacagtggctcatgcctgtaatcccagcactttgggaggccgaggtgggtggatcacctgaagtcaggagttcaaaaccagccaggccaacatggtgaaaccctgtctctagtaaaaatacaaaattagggctgggcgtggtggctcacgcctgtaatcccagcactttgggaggctgaggcaggcggatcatgaggtcagcagtttgagaccagcctggccaacatggtgaaatcctgtctctactaaaaatacaaaaaaaaaaaaaaaaaaaaaaaaaaaagccaggcgtggtggctcatgcctgtaatcccagctactcaggaggctgaggcaggagaatcacttgaacccaggaggcagaggttgcggtgagcggagattgcgccattgtactccagcctgggtgacagagcaagactctgtctcaaaaaaaaaaaaaaagttagcctggcgtggtggtgcattcctgtaatcccagctacttgggaggctgaggcaggagaatctcttgaacccaggaggcggaagttgcagtgagccaagatcgcaccattgcactccagcctgggcaacaagagcgaaactccatctcaaaaaaaagagagaaagaatggggaaggaagccttcccttgagaactggtgtgggagaagagaggaaggaggaaaacaaccccctgctgctcctcagccccctgggggtcaagagaggccactgaggcctcctcccttccagatgctccaggttagggtcaggacaggggtcaggacaagctctgggacattttccgtgacagtgtttctaacacttcttgtgtgtctcaaagtcccaatttctaggtctttgtctgagtcttcagagctcaactgctgcatgtgtccaccccaaacccaagccacaccggccatgtc

SEQ ID NO: 1563787 - DNA, 4001 bp, Homo sapiens
gctcttccatgggcagcccagagcccggcccaaaggagcactggccatgagcagctgcccagtacacgactgcccatcgctgggatcctgagcgcctgggtagggaagctcttcactggctgcagggcaggggaccccgccaccttgaagcgctgattgtcctcctgatgctcagcagggagctggcagctgggaacttggggaggagccttttaggagcgcggtgtagcaaaccagggaggctggggcgtgctgaacgtgtttccctcttggtgatcagatcactagcgattcttaatttcttttgttcttttctgtatatttcaagtgtcctacaataagatgtattactttcgggatcatacacacacaaacatcaataaatatggagagagactcagatgcagcagagagaaatgaccaggagccaaggaggtgggaaggtcccaggcccaaccctgccccaaacttcccatgtggccaagacagccgagtcctcaaaggctctggagccctcaggtgtgcacatgtgggcactgcatgggagctgtgccaggggagaggccaggctgggccaagtcccaccacctgcagcaaggagctgacgggaggggagaggccctggggaggcccccgccccagaaagatgatgctgggcagcagcccccaggggaagaagggcggactgcactgatttacgtcagggccacatgagtcagcagagatggcactgggctgccccgatgcccctgccctcagggtggggttaacaggggcagggtatctacctggggggtgccaggcccccactccttctggagaagggggcagatggctctaggcctgccttcctgagagggacagtgataggtggggggtccagataccctgtcgggggcaatggattgtagtgcgtgttctttgcaatccctgccaaccaagaggccccaaaagtctgacctggaatggagggaataggaatcgctgacccctcccataaccgcacagagataggaagatgtggcagtgggcaaaagacctgcagtgcgcagggaccgcctgagccagtgaggcccaccttccctcacccctacctgatggaccctacctgatggacacccatgcacgggaggcacagcagtgggtgcccgaaccgacctcacccactccagccctgactggccacagagcctgtggaaacgggctccagaggcgccctacgcctccggggaggagcccctggctctgcggcaggttttcgggtgagcccggaggagcccaggctgggatttggaaagaagaaggaggagaacaaagcccccccaaccttggggcggaggggcaggcagcgcccagtcccgttcactcccctccccccattgcaggggcggcttatcccgatctacccctcaccacgctgtcagccgggattttcaaccaaactgagctctcggctggggatgaggggcagccacgcccagggccacaccccacggcggcctgtgggggagcgctcgacccgatctggcttcctttctcagacacgcacacacgcacggggacccgccaacttcagcccccgcctgcccacacagaccctgcctgacgccccccgccctgttctcccgcccaggccagcatctggggccccgcaggttacccctcacctgtcgggctcgggcacccggcatccctcccccgccccgcttacagcccgcggtgcccggagcccgacgcccggcatgggtggggctccggcagcaacgccggttaccgcgggccggaccgggccgggactccctggtccgtgcaccccgggcagagcggtgtggtgtcgccgggggatcgcggccgcggcccgggtcgcacggggaggccagcccgccttacctgcgctgcggccaccgctcgggctgcccgcccagcctccgcgcacgccggcctcggacccgccgcccgagcgcgtctgcgatgccgatgctgcggcagcagcggctgtggcggggcggggcgggcgtgcgcgcaggggcgggggaggggagcgccggggaggagagggagggaggagtgagatcacctccccggccgcccgccccgccccgccccgccccgccgcaccctagcccctggtgccagccgagcgcggcttgggctgggggcccccgggcagcccactccgggagctcagcgggaccccagccgacgggtcccgccagacccccttccccgcagaccgggagtctccggccggagagtgtcctcagccccagcgcaagggagcccgctgtgaaagctcggagcgggaatcgcggggcgagagtgctcccagaggcctggggccgggcggtggagagaggagtccggcaaggaaggggatgctcccttagcctcggcctggccctcgacggcgccggccagcgatgggcacctgcacgcaacgcccccccaacacacacacacagggcaggactcccgggacctctcccgaatgccccccgatcctgagggcccagtcagggtcctgttgggaggggtgcgggggcttcgtcctcagcgtgttggggaggcgccgcggagcaccggctcctgcgcaccccagagcccaggtgggcggcagggtaggaggcgagcccaggggagacagggtctgggagagggtatccctcgaactgccacccccaactcccagattttcctccagctctctggtgtcttatttctttgtcctcgggattggccccattcgacctttcccgccgactccactctctcccactctcccccgcagccctgcacaggatcgagaaggaaggagctcctccccagtgccccctcctaggctcaaggccatgacctcacaggcgaggaagcaaaatggagggggtaagaattccggagccggcgagctggctgcagcctcagggctaggaaggcctagggccccgatggcagattgcagatctggcggccacggtatttttatgggcatgcctgttgcccagtgaagcattccaggggccctcgactcagtctcacaagactccccaagtggtgtggggccctggagggcccacatgggagcagccctggcatcctggcttggatgccccacccccatagtgccagcttcagttcccctggaatgggaagcttggggtggacccatctgtgctcagagagggtctggatgccatgtttgcccagcctttaggaggagaatggacaagactaggcacctgagtgaagacggacggctagggagactgcttccagagtgggggcacttgcagggcatcttcaggtgacagcagaggaaactgagcccgcctgggtcacgaggccagcaggctcatgagctgggccaagagggcgtactttccatgaggcactgagctgtggtcagcttcctgcctttgctgatctgaactctgataggcctctctcctttccagttgctgcctccactcactccctacgttcccagcctttcctccaagccccaacttctgcaaatcctttacctaatctagggtttgatgcccatcaggatggtgaagtaagcagggaatagagcccgtttatacgcacctgctaatgtgtagtgatgggtccatttatggtaacaaaaaattcattactaggattacacgacatcacatttcctgagcacagccatggacctgccatcgttacatttcctgcacatttaaattgcacaccaacctggggaggtctgttgaagcattcgccccacgttacagatgagaaaaccaaagcccacagagctcaaggctgggtccagcaagcacagttaggaaggtctctttctctccactggctcattgcatccacacacacaccccagatgatggtgctgttattatcctcactctcccagtgaggtacccaaggtccagagaggggcagtcatgcaaccaggaagaaattggcactatcagtgcccccatttcacagatgaggaaaccaaggttcagaggggt

SEQ ID NO: 1563788 - DNA, 4001 bp, Homo sapiens
agcaagactcaaaaggatcaaaccatttccttgttttctgagaataaaagcagttgtacctcttccttttcactctcagaaaatctgatagaatctataaaagagccctaaggctggagacactgtattttccagggagccaactccttgccccagacactagtcaattgccccagcactttcttcactgatcgttagaggaaaaaagctcatgttagatttaaaaatcaggaaaaaaatttaacactaaacttgcaaatattatgtggtgtatattacagttacacatttactatgtaagtgcaactgtaaaactgaggaagtattccaaaatgttgacagtagttaatcctgaatgacagaacccaattgattttcattttcttccatttcctaaattgtcttcaatttccttgtactccttgaatatctgaattctagaaccccccccccagcaacccaagcacaacaagaatattgggaggtgccccagctgcaaataaactcagacttggaatagtagcgcagttttattttctgtagtaacaaacatttaagaaccagataaaacatgaggccctcccaggaaagtagcaactgtgggaattcctgccctagggaaggatggacgcactgcctacaaggagacgcaaagtgggacctcgctccatttgcccaggccaggcttagcgggaaacggggggcccaaagcgctgcatggtccgcaccaccagggaaagctggtcaagaaagttgatgacggaaattcggagcaggcgacagtcttcagctttccagcggctaaaagtgaggggaaaagaaaatcaaattggaggtggcaactcctggtccctcgctctgcccctcaggcacccaatatagcaaacccttgggagccctgccattacacagcccctcaggcagagaccggcccagcgcacctggcgctccttagggctcatccttggatgtcccccatgtctccatgggccgcctcccccaaccccgtccctttcagaacttacacgaccaggatcctgccactcactgtgagatccttcccaaccaccctttggtggggctcggcatctggtgccagggacccatgggcgatttccgcctccaagggggtcgggaaaggcacgctgagggtgctgggggtcattcggttaaggtgccatctgatacgatcttgcctatgtctcaggccttcttgctcctctgaagccccctctcaggtcaccctgcctagtgtcacccccttcactccttacctcgcccaggccaccgttagcagagcttctccctccatttcaatgtcttcccctcctccgaccacctctgaccgtatacgccagccccggtccccccctgctaccctttccgtcggccccccgcccgccctcctttccttctccccgagtccagccctcgctccgccgcaagcagcccccagctcggaaaggatacaatatgtgcggccgcattcgtgaccccctggccgcagacgcggcgtctctgcccggacctggcgcgtgcgctgggggagctccaccggccggagctgcggctgtgtccacgcccccgcggcagctgtggccaccccggccatccccgccgtcagcgcctccgcctgcgtctgcatccgcgtcccgcatgaccgccgccgcgccgctccgactccacccccgaagcgcaggtcctacgccccgccctctctgtggctccttcccgaagccccgccccctgcgcacgactccgcccacacgcgcctgcgcaggtccctggagagcctgactggcgcgtggtcagttcccgccaagcggccctgccgggggccttctgagacccggtcagcggttgagaggctgcggtttcctccagaaactctgccctttcgcgcgtaactcgattccagagcgctggtgcaaactgacccacagtcggtccggccccaggaagccaaccctgacggggcttttgaagacaccgtggtcgcctatcccagaggcgcaccccgcgaggctccgcccctaagcgcgccttgtgaccttagcgcgcctgcgctggcggggccttcccccttgtccctggaggccccagtgaggccctgcggtgcctggacggcttcccgccccgtttcttacctggacccaagagccccaggagatgtggcacaacgtccatgttgcgattcgcagagggagggtggccgggtcgggtaacccccaaggatactgctcttgccctcaaccccagtgcccaaccaacggggcttcaccatggactgtgaagcatcggatgtgcattttagaggaagcattttagagcgggtgggctgtgcagagcgggggagcctgtcagcaggaggcctgcacggaggcgaaaaatgacagggccttgaatgaaagtactggcggtgggtctaggtctaatataacgtgaaaaatcagactgcacaactatgagtatgaaaatgccagtttaggccaggcaaagtggcccccgcttggaatcccagcactttggaaggccaagggaggaggatcacttgagcccaggagttcaagacaaacacaggcaacatagtgagaccccgtctctacaaaaaatacaaaaataaattttaaaagttagctgggagtggtggagcgtgcctgtagtcatagcttcttggaggctgaggagggttgattgcttgagcccgggagttcgacaccagcctgggcaacatagtgaaaccctgcctctacaaaaaatacaaaaattagctgggtgtgatggtgcacacctgtggtcccagctactagggaggctgagatgggaggacagcctgagcccgggaggcagaggctgcagttagccgtgatcgccccaccgcactccagcctggttgatagagccagaccccgcctcaaaaaataaaagaaaatgccaacttagtctcttactgtacatatgtagagaaatcctagaacaatacagcgtcaggtaaatcctcatgatctctgctaatagtatggtgggtgactttaatttcctttttgtgttttccctccaatttttccgaagtggtcttttatgacatttacaataaaaaaaaaagtatttaaagtgacatcagtccgggcacggtggctcacgcctataatcccagtactttgggaggccgaggcgggtggatcacttgaagtcaggagttcaacaccatcctggccaacatggtgaaacccccggccctactaaaaataacaaaaattagctgcgtgtcgtggtgtgcgcctgtagtcccagctattcgggaggctgggacagaagaatcacttgaacccgggaggtggaggttgtggtgagccgacatcacgccactgcactccagcctgggcgacagagggagactgtctcaaaaagaaaaataataaaaataaaaaatgaataaataaagtgacataaaatttccaacagtgtttgtcatgtttggacaacctattttcctcctttgcagtcataaggaaggattaaacactgaactatatcagcaaatcctgttgggtttccctctgaaataggttccacatcagcccacttctcgctctccactgctagtctgctgtggaagccagcatctttccttgacctccctcaacagcttcctggctgattctcttttacactttcccctctacaacctattcaccacaccgcagaatgactttttaatttctaatttaaattgcatggggctgggcgcagtggctcatgcctgtaatcccagcactttgggaggccaaggcaggcagatcacttgaggtcaggagttccagaccagcctgaccaacatggtgaaaccccatctctactaaaaatacaaaaattagccagttgtggtggcaggagcttgttatcccagctatttgggaggctgagacaggagaatggcttgaacccgggaggtggaggttgtggtgagcccagatcgcaccattgcactccagcctggg

SEQ ID NO: 1563789 - DNA, 4001 bp, Homo sapiens
tagcagcatccttggcctctacccactagatgctaaaagcaatcccccagttgttacaaccaaaaatgtctccagatgttgccaaatgtcccctggttgagaatcactattccagggtgttgatttcattctactgaaatgtgaattacaaaatgtatacctctcactgctttctcagacccctaatatgtctatttcttccccactcccatctgggtctgttctttatgttattttattaagtcacaaatagcaagagcaggtgggtagcaacaagcacagcatgaatcaaagtcaggaagagacactttagtcaaagttcacttttaggcattaaagttgttagcgacccactgcctattagggcacaacacaatcagcgaacattcacccagccatttatttattgatttatttatttttattttttgagacagagtttcactcttgtcgcccaggctggagtgcaatggcgcaatcttggctcactgcaacctccgccttctgggttcaagcgattctcctgcctcagccgcccaagcagctgggattacaggcatgtgccacgacgcccggctaatttttgtatttttagtagagacggggtttcaccatgttggccaggctggtcttgaattcctgacctcaggtgatacacccacctcggcctcccaaagtgctgggattacaggcatgagccaccacgcccggccccatccagccattcttaggccctggtaacaacccaatccttagcaagtttgtctacctgctccctgcacccccaaaatatgaggtaataggctagctgtgtgatggggaagaaagaaaagaagaaactctgaaggcaaagaggtagtctaccaaactcaaatactccacccccaaaacctcacatctgggaggccctcctaactgaaacgtctggggatttttttgtcagcgtctggctgggaggaagtagcaaaactgggagaaaatcgacatcctcaatacctccaagtcagatgtgcactccccatcaaagttccccctgaaccccttagtctccagaggttgggtccaagttttctttcctggaaattgccccagctaccttaggttccttcgcccttaaaactatgactaccaaactcaaacccagcatcactcctaatctcttgaatcatcctttcttcacagtctcaaattccaaccttcaaaatgcccaaccctgtcactgcccctgcccctcaggctctactgtcctatctgtcccatctgtcccccacccacacacttctcccaagctactccaggcaggcatggtcttctctcttaatttcctatctcaccccatagtttttccaccatcttcaaaactcttccctgatctcagcaaaccaagactctcctaattgtctctggcgcccaaaatctgcatgtaccaccctcctacgctcactcctcagtgttttccccaagttactctttccacgctgaccctctccacgcttcactcctcccagcctactccctcggcgtccaccccccgttaccggccccttcttactctcctgggcccttcttccccgccatccgtcggtcaggccttctctaggtcaccgcttgcctccccgggccaaccgccgccgcccagtgttagctgctgagcctctcaaccccctccccctcggaccagtctttcaggttgtagctttgaactggtgccccgggcccaggcggacagactaatcgggagggcccgacaactcacccaggactaggcagaccagaacgagccctgagcccggaaccgggaagaggcggaagcacaccatgaccccgcagagcaggcggcgacggcggcgacggcggcggtacaacaacagctgcaacaccagggaaaaggctcgctggacctgggtcaagagcactgatgaccaccgaccacagccttgcaaaagccaggaatcggcgcttcagtgcgagtcataagactaggggcggggctctttcttgcttacagccaatctccgcgcttgaaagcggcgagaggggtggtgatgtagcggccggtgggcggggcgaccacgccctggctttttggttcacagcccttcctatgctcctgagagatatgcgcggacggcattttctttttctttttctttcttttttttttttttttttaattttactttaagttctgggatacatgtgcagaatgtgcagctttgttacataggtatacatgtgccatggtggtttactgcacctatcaacccgtcatctaggttttaagccccacatgcattaggtatttctcctaatgctctccctccccttggcccccaccccttgacaggcccccgtgtgtgttgttcccctccctgtgtccatgtgttctcattgttcaactcccacttatgagtgagaacatgcagtgttttgttttctgttcctgtgttagtttgctaaggatgatggcttccagcttcatccatgtccctgcaaaggacatgatctcatttttttatggctgcatagtattccatggcatatatgtgccacgttttctttatctagtctatcattgatgggcatttgggttggttccaagtctttgctattgtaaatagtgctgcaataaacatacgtgtgcatgcgtcaaatggtatttctggttctagatttttgaggaatcgccacactgtctgccacaatagttgaactaatttacactcccaccaacagtgtaaaagcattcctatttttcctcagcctcgccagcatctattgtttcctgattttttaataatcaccattctgactggcgtgagatggtatctcattgtggttttgatttgcctttctctaatgatcagtgataatgagctttttttcatgtttgttgctgcataaatgtctttttttgagaagtgtctggtcatatcctttgcccactttttgatggggttgtttttttcttgtaaatttgtttaaggtccttgtagattctggatattagacctttgtcagatgggtagattgcaaaaattttctcccattctgcaggttgcctgttcacgctaatgctaatttcttttgctgtgcagaagttcttttaattagatcccatttgtcaattttgacttttgttgcgattgcttttggtgttttagccatgaggtctttgcccatgcctatggcggacggtattttctaaggctaaggagagaggaggaacttttgagggccgtagatagtagactatttccgttttggctccttgacaaagaagagaaaaattttgcgggcacaaaaacggttgctaggcatctcaaacgtaatacatacaaaaataatacatgcttattctccaaacactgttgttacctatgcagttcatgctgtgagatggacgagggaacctagggggtagtatggagtcacggaccatcggaacaagacatgatcttgaaattcacctagttacagcaccctgttctcaggtgggggaattgagctcagaaacaagaagcatcttttttaaacacaggaagaaaaaaatgagagaaataaaacagaaggataaagcggaaaaatagagatcatctgtattcctactattaacattattatatatatttacacacatatatacacacacccacatctatacttccagatatttttcctatgtacatacacacaaatattctgtaatgagttcatactaagcatactgtttgctatacttgatagatgaacagacaaaacctaaaatattcaacagatgaaagcatttaaaaatcttgagttggaataaagcactgattctcaagtgttagtttccaaaagaaccatctggttttgggttttttttttttaacatacagattcctgtacctcattccccagagattctgaaacagtaggtctgtggcagtcttattaatcacttctttaacaaacaccccaagtgattctgattctgtggtccatggaccacactttga

SEQ ID NO: 1563790 - DNA, 4001 bp, Homo sapiens
cataaacctttgctgcccagctaacacagtgcacattctttagtaatcttttttctcacttgaatcaacctcacctgctattaaaaaaaaaccctgtctgcctctgtagaggtgatctaagttaattactcttttaaaacactctatatacctttaatttttcttcaaacgcctttctcacctaaataaagccaagttaaatgtgtcacttcctccctagaacagtagttggctccaggggattatgaatgaaagtgcctctctctccgttctagtcactatgatccttcagagttttgttctttttcctactccacaggaactggcatattctcttctaataaccacatgctgatttcaaagtgagtccaggaaaaaatatgtatgtgaaaaccaattcacttttaggagccactgtaaagttattcatcaagaaaagctgccctgtcaagaaagctgtggtcttgcccatcctaagcaaatatttttaagtgaaataatgcacattcaaccacaatggggtacatttccgggtacgtttccgtctacatttatgtatttttaaaggggacactcctatcagatatgcatttaataagagccatgggttgaactgaatagtaagcaaaacagtaaacacatcagacccacagctgagcagttattcttggttacagacccagggctccagaagcaacttacctccacatcggccccgaaaagttccattactttctagcactctaacattcgaggatgcctcagcttttgacagcagagtcaaaggaaaggaaatcccttccatttctgaggttttcatcttacttgaaagggccacactgtcatcccccagaaagctaacaggcatctggagtgatgccacgtaaaaacacgaacaaagcgcagagacgccgaatctcaacaaatgagagactgaaaacgacaggaaagaagagggacaaaagcaggagatagacctcaagggactgaagaaatgctagcaccacaccaagagtaacaaagacttggagagcaactcgggacagtgctgcccgagccacggagtccggggaaaggaggccgggcaggcggcgagcgccctcccgcggcccgggctacctcttacctcctgggcgagtttctgcttgagcaccagcgcggcacacaggtaacccgcgcggcccacgaacagctcgtcggagccgcactccaggaaggagaccggcgcgcagacggcacacagagcccggaacttgcccagcggctgcacgtagtcggaccggcccagggcgtggtatacgagcgtggccacggcgtacacgcccgcgcccccgagcaggaaggcggcgcgggtgtcggcgtccggttcgccccactcctcagcgcgggcgcacgcgtcgatgaggcgcttagccgagcgcaggtagcgttcccgggccgtggcgaaaagcgggctctgcgagacgtggtagagcatatacgccactccggccacgccgccataaagccccccctggcaggcgctagcccccgccgtcgcccctcgggcctccgcgccgcccccgagtgggggaagctcctggaggatgcgctcgatggtggcggtgaccaagggcgccaccgcctcctcacactggcccgccagcaggctgccctggtagtcatcgaagcgattggcgaagcagcgcttggtgtccatgctgttgcccgtgccccctagtgcggagctgaggaccgcttgaagtcgtgccctgcagccccgcacaccacctccggctctctgaggcactcggatgccggtgtatgcggcggggaaggagcgagaaggatgagacgggaggtgacaagaggaggcgggcaaggagcggatggccaagtggggcgccgggctgccgcgaggctcccgagtggcccgggcgatcgcgggggatgcgtgtcctgcgccccccctcagaggccgcgccctcgctgaacccgccccctcctgcgccgccgcagcttggctgcctcttcaaggggccgaggtgatctctggcaggacccacgcggggcccgcgccactcctcccgctccgcccccgactcctcccctactggcagaaggccgaggacgtgcgggacactgatctggaacgctgggactcagcatacacacacctggcggtagaggtgatggtctccagtcccttgtatactcaaagtgtggtccttgggttagaagcatcagcatcacccgggggcatgttaaaaacgcagcatctcaggcttcactccagacctattgactccaaatctgaatattcagcaagattgccaggtgattcgcatgcacattaaagtttgaggcgccactgaactaggctagagtagcaagacaaaactgggcgccttctttgaagtttgtatttcatcttggtcgcttcggagttctcattatgaatgtttcaatcccaaaggctggggcatttgagcacatcatgtttaatgcattaaaacggtgaaataccccatacaggaacttttttcccagctttgatttttgtattgttttcttcgagtatacaggagtaaaaagtcaaagaaccacaccaggttaaggcaaggaaggggcacgcccctcctgccatgcgtgcatagtaaaagctcaatacatatcttgaggtcattaactagttaatattaggataaacgctctgtgagaatttaattaggctttttatctcccccttccctcccttcttttcccatgtttgtcctcttctgcttttttcccaagggcgttgtggagggtctcctatgtgtcctgaaacctggaaatagagggatgaataagatagacatggtcctagaccccttgtagcttacaattcagtaggaaaaaacagaaaatgaacaattacacaagctagttgcctttcttgtgctcagctgtttgaaataattctgcctttcccaaagtgttgactcttgaagactaaagaggtcacgtctcccaggagtatttgacttttgatagggactgtgcaagacataaaggagtaagtggctcatagaacagtttctgatactttgtggggagagtaactactccacttacttgaaaggccagtttggaggcatttttttttcctcagaagtgttaaatgtcaccatgattgggaagcagatattaaataccctgcccctccacccttacttgatgtagtctgggaaagaaccttagtttgccaacatgattgccaggactgacacatccacatagttcaaggacagtatggccatcgtccccctttgatgctgccaaaacaggtttatttttaataataataataatgataaaagtccacttttaggcagggagcttgatatgttaaaggaggaaaaggcatcaaagaagcaacaggaatgttgagtttctccttgagacttccttcctcatccctcaaccataacagacattagaggtgatttttgtcccctcagacaaggaaacataaaataaagcctttaccagcagaaatgaagccttattccacttcattcctccacacctcactcacccttgtcatgaatctagaggcaactctattaattctgactctgattattcttcgaaacactccagcctagaggtagcgccagcaacaacaacagggatctgctaactggcttcaaaatagaactgtgtgtaaacacgtctccaagaaaacgagctcttccactttttcccagttgtgtcatctgtctattgccccaaaatgctgtatgaaaagcaatcacaaaatctaatagcatatggcagtaaatttaatgtttatgcatctaggatcttggctgggctcattcaggtgtctggaggtgggttgggtcttgcttggggagactgaggtgactggcctctggcccatatgtctcttctcttttagctggccaaccccagcatgcttgcacggcaatggcagaggggctaaagcaaaagcagagacatgcaagacttctgag

SEQ ID NO: 1563791 - DNA, 4001 bp, Homo sapiens
gtctgccctataatgaagccatacagatgaataagacactgctctagccttgaacagttcggtctaggataaataataatgatacaatgtaacatattaggctagaacataatatgttataaatgctgcaaaggactacatcagataatggggagcacagctaaccaatggagaaaataagaagagaaagggaggatctcaaggcagacaaggggaaatagataagcaaagactttgacagatatgaaaactcagtagcaacctttttttccgacgtgtatacagctagaaccattatgagtcactttgtaagtcaggaattcccagcccatgtctccacttccataactcagcaatctttcagtgttcatgagggagagaaggggaaaagggtagtgctaggaatagacagggacagggttggaaagtccacattaaatcacaggcgaggaccctgagccattcagacaagttcctctgggtgaggaattcaaaggtaagaaaaaatatcagaccaccaagagacccacagagatcacctggtctgaatcccttcctccacattccaagatagaaagaaaaatggaagagaaggctttcaggaaaaaggaagaaaaagaggaatgcgttgacgagggtaccaaaagctgataagtcaagcaataatcacaggctgatccacagtgaggtacacgcagggttttgcttcaggtaacacctgaagccaagttttgcttatcacatgcctcccctgcctccagtccccaaagccaacctccacccctaccccatgcaggtcttacctgaccaatgccatgccatagagcagtctaagttcatcagtgcccaagccaccagttacatccaagagcttacagcgtatcaggtcagcagtagaagccactgccagagggagttcgttgcctgacctaaagggtcacagtccagcaccatcataaagagcccttacactggtccaccctccacctcagaacctaggttgttgcaggctacacccatcatattctggttcaagagagcatgaacagacacaaaacaagaaggtgggaggagacacggtaatgtctgtgggatccaacagtatacagggcatgaggagctgactaggccgtatacaggacacctaactggtagactgtccatcaacagttgtgtggacacacccctttctttcacccccaaatcaactcattgagctagaggagccccttatcccttgtaagtcggctcccaactcaatcttaccaactggactgaggcgccccactcaaacactgtcttgcaggcaagacttcctccccattggaatcggaaatctaccctagggtactaatctactccttaagccctggctcaggcctcactagtccctccggcatcctctccaagttgggagaaagtcactttttggaggtaatgggtaaacctcacagatataacaagagaattgttgaggcacaaccccttactttccattccgctaacgggattagcgcaagagatggctgccgcgttcccccaggcatttgggagagggacaactttaggcgacttaggggaagactggagaacagggccttatagaaactcgacaaaggaagaggtgcagcgccaccagcacgcaggcaaaagggccgaacccgccaccttacctgctcctccacaccgtgatgcggttaagcgcgtaccgctgcaacttatggtcgtcacagaacagataaaccgtcacctggtcccactcggccctgctgagccaggcgaccacgatgccgtgggccgagagtggcaacgaccctttccctttaacgcactttccgtaccacgcactccacacgagatccatcccctgggaacctagacctggcccggccccggattcccacgacatactgagctcaacaacaggctctgtgccgcgccgctccgcacagccttcagctcagcgtgctaccctcactccgaaccgccaccgcaccagcagccaataggagagcgtgaccccatacgcaagcccgccttccagcgtcagcatggccaatcggaacgtcagaattgggcgccgacctaatgacatgcggggttaaaaactcaccggccggaagtgttcttttcacaaagcaaaccctccaggggcaagagttcagcctctaggttccgccaatttcctggttgctaaccggcttctgtaccagaccggaagcggtatgtcttcactgcaagaggaattttattttgctcccctcggcgggtggcagcttgattgtagtcatccagtgaactgaaaatgcgattttaagtatatttttattgccgtgaatcaggacctaacctagtaaaacactggacactgaagcagggctacagaggaaatatctcatatcgaaacagttacagttgggttgaaaaaatctgcttttgtggcaggtaaccaggggccctgccttttaaattagtaccagcctggccaggcgtggtggctcacgcctgtaatcccagcacattgggaggcccaggcgggcggatcacttgaggtcaggagttccagaccagcctggccaaaatggtgaaacccggtctctagtaaaaatacaaaaattagctaagcatggttgcacatgcctgtaatcccagttactcaggaggctgaggcacaagaatcgcttgaatccgggaggcggaggctgcaacaagccaagatcgcaccagtgcactccaccctgggtgacagatcgagactctgtctcaaaagtaaattaaataaatacatacataaataaataaataaataccagcctagagacctgagttttactctaaattttgccactaactatgtggacttagactagtctcagttttcccatctgtacagtgagagttgtagactggtctctaggttctctgtcatagcagaaaattgtagaattttactctgccaacattccactgctatgttggtttcaacatccaccaaggtatacttagtttttctgcaaaattccttggtattttggagttctgggagaaaagcggtattatgaagttcctccgattttacgagttgactgaaatatgtttaggactatgtcccaatccttcttgcagaagttattttccaatgtaacacttgagagagagagagagagaactgttgctaacgatcttaacagcattgctgtgagtggcacttttacgcttcacagcaacaaatcccaattcatcctctatatgtgcttctttctccagccaacttttcctaagatatagtctgcctatagttattttatttttctttttttctttttctttttttttttgacatggcgtctggcccagtcgcccaggctggagtgcagtggcacaattctcggctcactgcaacctctacctccagggttcaagtgattctcttgcctcagccttccaagtagctgggattacaggcgcctgccactatgcttggctaatttttgtattgttagtagagacagggtttcaccatgttggccaggctggtctggaactcctgacctcaagtgatccaccagcccaggcctcccaaagtgctaggattacaggcatgagccaccgtgcccggcctgcctatggttcttgactgacagttactctgtcccaagtagccatgccaaccagttggccaggtgtctgcctgaaaccagataccctttttccttcaggatcatgacagtgtgctggcaaagaagtctggggagtggtttctatgactcctcaagatacaggccagtcagaggagctgccagatctgcggcaatcattcacacacattttggggtttataggctaaaaattttgcatagtccttttcaggcaaagacccctatttatccccattccatccacataaagctgaagttctctctattccgtgtgttctaagaaaacatgaccaaagcatgtaacaagagcattatgtctaatatgtggcaaatggggcctga

SEQ ID NO: 1563792 - DNA, 4001 bp, Homo sapiens
gggtgcacttgcccaggatccgggacttaatgttagctggagcacctgaaagtgacatgttggctatttggagtttgaaagtgacaatctactatgttggctctctggagtctgaactcaacagctgcacataggcaataaggattaaggggcagaacttccctggcacagtgttaaggaatccaaaagctcagagaattaggagcattacatatatatgtccaggtttacgcctattgttatggtctaattattaatactgctctctttgccgtctgctcagccaacccttaaccacgccaccctggaggacccagagaacacaccctttgccagggctttaagaaatgcgttggtgaagggagcatcagaaccctgacaaagccctgaggtagctgtccccagcagcctggagatgacagcggggaatactaggattggttgtattccctgatttccacgggaataatggtagtcagagtgacagtggtagaggccagtgatagcacttaaccattaaaagacaatcatttctttttttagtgcttgatatttattgaaaataatgccaatgctttttccaggtagtattgaggagctgggctgagtgcttgtttgttttgtttttaagtactatttgtccaaatgcacacatctgtgggactgctgcaattttgaaagaaaaatgacagctgtgtaaaaccagtgcataggaaaaaagaagtgtcaacaatttggctgccaggcacaccgcgcccctgcagcaatctggtggggcaggggaggacactcggagtaggtagaaaactaaccaggctgaacggccccttcaggggttggtgagctgtccaaatcaatgtctgaaaaggcatagccaactctggcattttccaggttggtcctgatctcgaaaggtggtagtctgtaggtgggatgtggtgagtggatgtgaagtggcagcatagttctctgggaagatgtaagcctggcagcagggcaggtggcagcagcagggctacgggtggtctgcgcagtttgtaacaggggcctggccaatagctggggttcaggacacagttcagattagcaggggagggatcccggggatggccagggtagatgacacttccaagcacttccgagtgagtgaggctccagccccgaccccagcagcaggtaactggagcgctattcctggaacaaagacaagcactacggagaaatgaagagagagagcagacgggcgcgggtaggtaaggggaccggagggcaagggggagagcagtggctcctggcggggtgagggctgcggggagggggtggcggcgtgcagggccctcccccccgaggcccgagggtcgagggcctaataatcatcctcctcttcttcgtcgtcgtcgtcttcgtcgtcatcccagccaaagcactgtttcatctcatcgaggaaggcccggtaatcacctaggatggggctatccatctcgatgtagggcaccacccactcctcggcttccccggtgaggaggctgattaggaatgccaccttcatggcgtcgttgcagaatcggttctcgttcacgagcatgtaagacgccgtctgcacgataaactcggggagccgggagctctcgccattaaacgtttcggggaagggcaccgggcagctcggcggacgtacctggcgcagcaggctggccctctcgcacaccagcagccgcagctgttccatgagctggctgttctcgatgctcagggcgcggtgccgcatcaggagcgcgtgcagcagcagcaccaactcatccaccattgcgaacggcctggaaggacaggactcggctcggttcggctcggccaaggtgcgcacggagccctcgcaggaagtgcgtgtccacggaggcgcttggtggccaggggcggggggcggggggcggtgtgcgccggggtccgggaggctacgcaagctccgcccacgaggccattcggacggacggtgcgccggcgcgacgggggaggggcgtggctaggctgggagtgggggggccgcggcggcgtgggggcgtggccgggatgggaagggtgtagacaaagagggcgtggccaggaaaaggatgcgctgggtcgctgaaccaccggcttgtggtaggtctctcggcgggcagttaaaggctgggataggctcccctagctcctagttgtggggcctgcgttagcagaggacttggcgagcgctgagtccggtctcagagaaggtaaatttgttcaaactgaaaggattagccacccttctacctaggtagcttgcacaactcagtgttccttcgtgggtctgtggccactagattctcttggcttgatgttttattaacacattttctttcttatttaaatctcactcagagaagtattgacactgctggctgccctgtgggagtcacacttccttttagaatcatgaagaccctcagggggtcctgcctttcatgaaaaaggtagtatttaaacagtgacttctttagtagggaaataatatggtatacacacacacacacacacacacacacacacacacacaaaacctaagtaacaagatataaaaaagttctgcaaaatcagcatccaatagtcaattgcaggcatcccacatatctttgattctctatttcttgtcttgctattagtgccgttggccactgggtattattctgtacttaaaaatgaactgttaagatgtttgtgtttttaaataattttgtttttctactttgaatggatccctgattctagagccaacatgaattgttggctctgctttcaaatatattgccaattcaatcacgtcttgtcatttctgccactgccaccctgattcctagcctttctttctcacccagactgctgcaactaatcacttagctttcactcttttcttcctatagtatattctccatagagtagccacgggaatcctttaaaacaaaaattagggccgggcgcggtggctcacgcctgtaatcccagcactttgggaggccgaggcgggcggatcacgaggtcaggagatcgagaccatcctggctaacagggtgaaacccgtctctactaaaaatacaaaaaattagctgggcgtggtggcgcatgcccgtaatcccagctactcgggaggctgaggcaggggaattgcttgaaccctggaggcagaggttgcagtgagccgagatagcgccactgcactccagcctgggctacagagcgagactccgtttcaaaagaaaaaaaaaaagatcccttcactctcctgctcaaaatcctccaacagtttcacctgagaataaagagcaaagttgcagccaaggcctacaaggcccctccttctatcctgtgcctcttcccagtttctgctgtgctctaatcactgtcctccttgctgattctcacacccatcaagcagttctggcttcatagcctttgcatcttctattccttctgccttgcaaggctgtcatcccagttggctgcctgactcctcctactgctttcagagagaacttttctgaccaccggacctatcagagcaccctgttctctgcccccaatctgtaaccctttactctgcttcatttatctacataacatttattgtgctaccggccaccatgtcgtatgtatatacagtactttgctcatcatctgcttccattttagaatatataagtcaaacactgcttttgctatctggtctatccctaatgcctagaaaagttctggcccagagtagaggcttcattaatgtttggcgagtaaaatcatcccagagtgaagatgctgagatgaaaatcagaagttgtcgctgcacaaagagtcaaaaaatactcttcaaattgttaaatgtaaggttgggcgtggtggctcatgcctgtaatcccagcactttgggaggctgaggggggcagaccacctgaggtcaggagttaagaccaggctgaccaacatggagaaaccct

SEQ ID NO: 1563793 - DNA, 4001 bp, Homo sapiens
ctcataaaaagaacctccacatcaggccctgggctatttcctttctccagagtttgagactggaaaggtaggaactggaataacctccccaaatttcatatgagcttctctctccttccctctccccaagatgctgctccttgagctccccatctatcctatgattttaaaagtgaggtaccaatgagagatcttcatctcagttcttattctggctagacaggtgccatcatcttcagtgataagctggttggctacgagttctatctcacactctcagctggttagaaactacccctatcaagatccctggcaagacattgttaagccctaaaccccagccctgttattgttgcccattagtctctccactccattgtataagctgggaataaaatgtcaccacagctgaccacttctattgagtgaatctggcccatatgggaagaagatgggctgattgcttttccaatcacttcagagaagttgagaggcagcatggtatatcaagaatgtttgtctcaacagaatcactttcaatgcttgttcagaatcactttcaatgcttgttcaaaatgcagactatgtcaccccctccttgattcactgaattcgaatttatgggaattcatattgttaaaaatcctcaatttattctaatgggaactaatgattgaggaatactgttttagtggaaaagtcacaattttggaatcagatcagagacagagtcctgaggtctgccccttacaggctatatgcacataaaaagatcacttaaaacctctgagttttggtttcatttataaaatggaaatgattaagcataaaattcaagtgaaacatctgcactatacctaacaccagagtaggtatcaattctctccctttctaccagaaaagaccctattctctcataagtaatggaaaagacttgaaaccacctaagatttagaacatctctcctttcccctttctctccccacaaccactccatgggtgatttttcctcacccctaggcttcattctattttcagttccccaccacaaaatgaaaccacttggccaagtgttctttgcaagaatggatttatagtttaagtatttcaggttcttctggaaattgtcatgccttggcacatagtaggaactcataaatatttaccaaatggatgcattcttttatttccagcctgagaggcctcaatatttgcatttcagtttaacttcattaccccatttccgtcgcataaccccttagatttaggcaaatccaggagatcaacctaccacattagcaaaccggatccatttttacttgtatagacaggtcataacaaaatcactctctccactcccagaaacaggcacttcatctcctcaggttaccaactcccctggggaaaccaactagcacttaacccttaggtcctcaaatcttgtcaatatgaaataggaatccagccctgattcatcttagcctctgtgcaaacaacggactatgaagaaataaaaaagcaccaggctgccctcgggtagaaaacggcttctctgagctttgagatgaaaggacaggaaacctgagaaaggaaggggagaagggggggctgagcaaggggagagcaaagcagtttcttatccagctgtttgaattgcatttggcccaagttgcatatttaccttctgaccacgaaggctgactgacttgttccctctcttcaggctcagatctcagaaacaacttctccttacagcttgttagacaaggatgggaatactagctgccctttgcagtgatgcctgaaaaccttgctttacctttgggagaaaggggcggagtccaacctaatggggattaactccaaacacgctggaggcttcaaacccagcctcagacatacaggcacttgaaatagaaagtagcttagtgggcacagagtccccaaacctccaacctcacagcggacaaagcagctctgtgtgtgtgtgtgtgtgtgtgcgcgcgcgcgcgcgcgcgcgcgtgtgtgtgtatgtgtgtccgcgcgagcgcgcgcgcatgcgcgcaggcatgcccgcgcttgaactgcgttatcttacttcctcacttgctgcccaaaagcctgctgaggaacagagattttctctaattttcctccaatgccctagataatctctaccatggtaggtagcagacccatgtggctagaagtgactgagagaacacatgcctaaatagaataagacagaacaacctcttctccccaaactgatttccattgcctgatggggaagatgctccagcagagcaatctttggctccaagatgtaatgagcttacatttcagaatttgtggaaatcatacattgaaaggaataactaatatatttttatagtaataatacaatcaaaagtcagtgtttaatttatcccagtgcactaataactgctactctgcttgggaaaagagctgagtggtctggagatgaatggagctttgcctgatgttctactccaacccgatgtcatatttcccacctgtgaatgtccctgacacttcatatttggggaaacttattatcttctacctagtatcattattattattattattttcgtacatgtctcttttcccctcctagatggcctgtgaatggggaactttgctgaacaaatccaaatgatttagaaggaagaatggttacattaacagagcacactggactgatccaaagtatccatgcttctctgatggcccagttccctcaccagaatgctacaaaggtgattaggcctattttctagcatgttgtggcaataattcaaaatatgaccgtaaattaacatattaattgtaccgtgattatttaatgaacttacaaagtttctcctgccttctgtgtataccacctgtgtcctgccttttatcagtgatatgatcctatattcatgcatgtatttgtctatctagcaactttccatcagcaatttttaccgttttgttctacaacacagtgataaatccattcccatctgtaatcatggcttactgaggccatcatgtttctgggggaagcacagatgactccttaggtggaatgttagacttttggcagtgtaagccccccaactaagttttataacctcccagctgtcattcccttaagaaccattgcttcagacataggattatgtaaaaagaaatgttaggccctccttcattaaatataggttaatattaactgacacgtagtaactgtgtgagatacggctgaaaatgttgacatataaaaaatagatgatccccactctatgcacagcagtaaatattgccctttgcttagtgactacacctgtcatttggggaacctatcattatttgaaactctaagaagaataccattttactttcctcttttatcctcttttctctatagacacttaagtgtataataaataataatctaatttattggacaaaattttatttcctgttcttaacagttgaacgctctctcagaaaaaaattgcttgcatcttgtggctcttgatatgttttcaattaaaaatgctcttcagccttgctttcgtaagattatgtggaaaggcttgagaaaggaacacttcttgtaatgtatttaggggacaggatggtgctaaaatgggtattggaaaggaaactagggaatacctaaatcctgccttcaatcagtctggaataagagattctgcaagggtaagatatgggtaacaggtgattctgatatatacccccatccccatccttcatttgccaaacactgttgtatacaatagcatttcccaaatgagatgaacacccccacagcattttgcagtctagacaaggggtcagcaagccggagactgtgcatgccaaatccagtaggctgtctgtttttgtaaagttttattggcacactcccactgtttattcacttatgtatcatctatggctgctttcatgctacacttgcagagttg

SEQ ID NO: 1563794 - DNA, 4001 bp, Homo sapiens
gttgctgtcctccagggggaccatgttctggggcatcactggatctttcttcaggctgtggctgtcccccagggggaccatctccttgggcatcactggcactttcttcaggctgtgtctcctgctaaacatcaggggagctgtgtcctggggcaccactggatctttcttcaggctatggctgttgctgtcccccagggggaccatctcctggtgcatcattggatctttcttcagactgtggctgttgctgtcctccagggggatcatgttctggggcatcactggatctttcttcaggctgtggctgttgctgtcctccagggggatcatgttctggggcatcactggatctttcttcaggctgtggcttctgctgtcccccagggggaccatcttctggggcatcactggatctttcttcatcctgtgactcttgctgtcccccagggggaccagctccttgggcacaactagatctttcttcaggctgtggctgtggctttcccccagggggaccatctccttgggcatcattggcactttcttctggctgtgcctcctgctatacatcaggggagctgtgccctgggccaccactggatctttcttcaggctatggctgttgctgtcccccagggggaccatctcctggcacatcattggatctttcttcagactgtggctgttgctgtcccccagggggaccatcttctggggcatcactggatctttcttcatgctgtggctgttgctgtcccccagggagaccatctccttgtgcacaactggatttttcgtcaggctgtggctgttgctgtcccctatggggacaatctccttgggcacaactggatctttcttcaggctgtggctgttgctgtcccctagggggaccatctccttgggcatcactggttttttctccaggctgtggctcctgctaaactctgggggagctgtgccctcttgcatcactggatctttcttcaggctgtggctgctgctgtccccttgggaagtcattccttggggacactcagaaccttccttttggttgcagcttctgttatctcctgggtgatatactccctggaaattctcaggatatccatcctggccatggcacttctggtcccacggaggggccgtctcctcctgggatcccactgtggcccaaagaccaggtggatagatccctgcaggaggcatctgtggtgcaattgctgctgctgattccattactactgggggtggtagaggtgttgagtatggcagtcccattggtgaaggcatatggaatgggactggatgaggtgcctgcattagcagaagaggttgcatgccctggaccctgccactctggggttcaggcatgtaatacacagctgttggggctgctacctgggcttccgaatgtggcattccctgtgcctctgtggccaccgcctcactctgttctgcatttaaagtcccggccacaggcccatactggccggcttctggaccgggtacaaaatcctgaggcatcggatagacctgcatggatctctcaacttctagcagcctcccgcataacccatcacgctcattcagcacctgctgcagggcggcctgcgtgaggtgcagctgtgttgccacctcctcatgctccaggcgcagctgctgcagctgggaagttagagcccaggaggtcgcctggcactcctccacatgcccttgcagccaccaaacctggtacagcagctcctcctgctgcctcgcagccacttgcacactcagcgccaaagcgctccaggtacaggccctcttaatggcacggggcacccgcgggtcggccacaatggcccgaagccggtcctctacctcgttccacggccgcgagcggaaggccgtgtaaaaggctgggctgccgccgttcctgaggacttcattgttgatgaacctgatcacatcatcatggcggaacccgctggcatggtccccaaagttcatcgccatggcggctgcggcctagtcaagcagctgcctcacggtgcgtcgcctcggctgccgccgccgcttccggtacaggttgctgccaccaaccagtccacccctcacctcccctttcagtcttactttagtccttgctcagtcctggcctcctccttggcctccttcctccctcactcccttgtctcacaaagagagaagcaggtcctcctcgccacaccgaaccctatcggcaactccgcgacacatcacagagaaaagctgagtcatgccgcaaggccagctgggaccagcttcctttgagaaggcacttcctgaatggagagtcgccaagcggctgagctgggaactgcagcgagcccagagacggagagggaagggcaggttttttggagacaataaagtggctatttgcacacccggagtggaatggacccccaaacacacacacacacacacacacacacacacttctgctctgaaagggaaggtgggtttgagaggtgacagcatgctagcagtcctcagagccctctcttgctctcggcacctcccctgcctgggctcccactttggtggcatttgaggagcccttcagccccccgcactgcactgtgggagcccttttctgggctggccaaggctggagcccactccttcagcttgcagggaggtgtggagggagaggcgtgagcgggaaccagggctgcgtgcggcgcttgtgggccagctggggttccggtgggcgtaggcttggtgggccctgcactcggagcagccagccagccctgctggccctgggcaatgagggacttagcaccccggccagtggctgcggagggtgtactgggtcccccagcagtgccagcccaccggcgctgcactcgatttctcactgagccttagctgccttccagcggggcagggctcgggacctgcagcccgccatgcctgagcctctcacccactccatgggctcctgtgcagcccgagcctccccaacgagcaccaccccctgctccacggcgcccagtcccatcgaccacccaagggctgaggaatgcgagcacacggcgcgggactggcaggcagctccacctgcagccctggtgcgggatccactaggtgaagccagctgggctcctgagtctggtggggacgtggagagtctttatatctagctcagggattgtaaatacaccaatcagcaccctgtgtttagctcaaggtttgtgagtgcaccaatcgacactctatatctagctgctcgggtgaggacgtggagaacctttatgtctagctcagggattgtaaatacaccaattgacactctgtatctagctgctctggtgaggacgtggagaacctttatgtctagctcaaggattgtaaatacaccaatcggcactctgtatctagctcaaggtttgtaaacacaccaatcagcaccctgtgtttagctcagggtttgtgagtgcaccaatcgacactctgtatctagctgctctggtggggccttggagaacctgtgtgtggaaactctgtatctaactaatctgatggggatgtggagaacctttgtgtctagctcagggattgtaaacaccaatcagcaccctgacaaaacaggccactgggctctaccaatcagcaggatgtgggtggggccagataagagaataaaagcaggctgccagagccagcagtggcaacccgctcgggtccccttccacactgtggaagctttgttcttttgctctttgccataaatcttgctactgctcactctttgggtccacgctgcttttatgagctgtaacacttaccgcgaaggtctgcagcttcactcctgagccagcgagaccacgaacccaccagaaggaagaaactccgaacacatctgaacatcagaagggacagactccagacgcgccaccttaagagctgtaacactcaccgcaagggtccgcggcttcattcttgaagtcagtgagaccaagaaccca

SEQ ID NO: 1563795 - DNA, 4001 bp, Homo sapiens
agaattatttttaaggcatctaaacattctgactatttcataatgaggaataactgctcagttttttacatatatggttatgtgagaagtgtccactttttaagagtatatggggatgaagggacatggtgtctgggacatggtgtctggggtttgctttaaaatacttaggaaaaagaggccgggtgcagtggctcacacctgtaatctcagcactttgggaggccgacgcaggcggatcacttgaggccaggagtttgagaccagcctggccaacatggtaaaaccccaatatttttaaaaatacaaaaattagccaggcatggtggcaggtgcctgtaatcccagctgttcgggaggctgaggcaggagaatcgcttgaacctgggaggcagaggttgcagtgagctaaaatcacgccaccgcactcaagtccaggcgacagagcaagactctgtctcaaaaaaaaaaaaaaacttgggaaaaagaaacatagattagaaaggtaaaagaatggaaagagaaagcagaagtgccctaatctcagtaactgtggagtctggcaatgggtgtgtggagattccttatgctatcctctctacttttgcacattttagaaaactttatatggtagggagatgttattaccatgacatagaaaataaggtccattcttggttttttgtttattggagtttttttaaagagtcagggtcttgttatatggcccaggctggagtgcagtggtgccatcacgtctcactggagcttccaactcctgggctcaagtgatcctcgcacttcagcctcccaagtaactagaatcacagccacgcaccaccacacccagctattttttttttttcttgtagagaccaggtcttgctatgctgcccaggctggtcttgaactcctggcctcaagtgatcctcccacttcggcctcccaaagtgctgggattacaggcgtaagtcaccatgcctggcctatgattgtttgtagcaaaagtttaagagggaaatgtgagaagttaatgtactcagaaactcttatttccctactcttagtttacagggttgattatttgctgtagccaacaataattaaaattcagatgcaataagaccaactggcaggtgggaagacttttaaataaaagttctcaattcaaccaacaaatcagtgagccacattcagatacacaagataacagaaggaggcagttggccaccttctgtcccaaactacccatgccacggtcttgagtcgttggaaatatttggtagagcatgctaataacattttccataaactcccagaaatcttagatttgcaaagccaatgcaaccaggaaattcacatttctgaaataccaggatgcacttggccgtacgggggacatttgtaaaacagagaaaacatcccagttaacagcatcggcaagacacctatccctgccacttgaatggcagtgccaacttcctgcacatctggcttgaagggcatttggagagatggcaggaaggtgatcccctgtgagtttatgacggcatcgtagttctggagcacagcaattaagttaaagacaccagcagcaatgttgagaattcctgaaacaacgaatgaattgtaggtgtcctcctcaaacattctcatggacatgtttctaagtgcaaacatgttaaaggctctcccgaagaatccgaaaatgctggcagtcagtaggaagcgttgagccatggaaatttcaaaagggagaaaggtgtcctggtagctgtatcggtaacaaaatttggttgtggtgctgttggtgcgacgccggtaaatgcagactctaaatattcccacgcaggcgattccaggggggtagagcgaggtgtctttcatgtaccatattcgccactccacgaggcccgtggacgtagaggagaggatccatcctatggtggtaagggcgaagactgaaaattggcagtcggcactgttgcagaaccagaccatggtggcagcgcacccaggaaactacaaacaaatacagagcatggtgagcggggggaccctgggacctgggacagcctcccatgggtgagtagcgccaagagggaggtgttgtattggagaaaggagacactagaccctctagatctgctggtgggagtgcagtctgagcaaactttgtgcagggccgctccgcgatatttcccgaaagctttaaaatgcacacaccttcagactggcagttccacttctgggcattggtgcaaagacatgaataaggtcggccacaaatatgtagccacaaagatggtcctcacagcattgcttgtaatattggaaaccggggaacaacgtcaagtccaacaacagggcttggtgaaggaatttatgctatgtccacgcgatggagctatacgccaacattgacaatacaaatggaatcatacaaggtataagagttttgtgtggctcttttcacatggcacgtttccaagggtcatccatgttgcagcaggtatgagaaggttgtcccttttcattgctgaatggtgttccattgtgtgggtagaccacagtttgttcattcatcagcttttggacatttggtttggtgccatgttttggccattataaactatgctgtcatgaacacttgaatataaaagtttgtatgggcatatgtccttgtttatctggtgtagatgcctaggagtgaaattggtggttcatatgttaagtgcgcatttaactttttgtaaattgctcaactgttttcccacgtggctgcaccattttatattcccaccagcaatgatggaggttccagtttcttcatattttctccaacatttggtatttttaatgtttttcatgacagccattctagttgacattctgtgtgaccaaaagggaggtgtccgtaatatttcaaatacaaattacatgtttcaaaataatatgtacgatataatcatagatacaaatcgaactgaaaatctacatcctaagctattaggagacatttttaactgggtttgagagattctgagttttttctaagctatttggattgtgaagggtcacacacatatagaaaagcacacaagtgtgcagctcaatgaacgatggtggggtgaacacccatggagccagcatttcatttcagatacacaatattcccacttccttgcttgctttcatagttttgtcatctcagcatgcatccccacacatcttacttctattttgcctgtttttcaaaatggggatcatacggtcaatgcttttgtgtgactggtttctttcacgcaatgttgtgtccatttatgacactcagattgtaattttttaaaggtgcctggctgttcagtattttcaaatatttctgcaataagcatgattatttaaaacaagaaaacaataaaaaatatttcacaaaacagttgtctcgggaaacttgcttgagccgaggagtttgagaccagcctgggcagcatagcaagaccatgtctccaataaaatgttgtcaagcaatggaagattcattagtttgagtacataaatacactttactacctagtatatgttaaaatgaagccaatcatttattataatactttgcagatagtaaagtagaaaaagatttagtaacgtgagaaaatgtccatggtgggttggatctaaaatgcagataacaaactcgttagtatctatagtagtatcatcttatttttgcctatcataaaataggctgggaagacaaaacaagatgcatctgaatattaggattactggtgatttctcttttcgtgtcttaaggtctattacttttttaattggaaaaaatggtgagcatacagagacacaaacataaaagtgtattaattaattattaccaagagtaaggccaggcatggtggctcacacctgtaatcccagcattttgggaggccgaatagggcagatctcttgaggtcaggagtttgagcccggctttgccaaca

SEQ ID NO: 1563796 - DNA, 4001 bp, Homo sapiens
atcacaaggtcaggagttcgagaccagcctggccaacatagtgaaaccccgtctctactaaaaacacaaaaaattagccgggcgtggtggcaggcacctgcaatcccagcttctcgggaggctgaggcaggagaatcccttgaacccgggaggcggaggttgcagtgagccgagatcacgccattgcactccagcccgggcaacagtgcgaggctctgtcttaaaaaaaaaaaaaaaagaaaaaaaaaaaaaaacccagaagttcattctgactacttggtcttccacttcaaaacagagatcataaaaaagatgtaacctcagaaaaaggaatttttacattcctaaaaaaaaagagcaccactgggccaccatctcatcagggtctcagttgatggtttagttttccccaaaaaagcactgaattgactcaatattaagtaatacctgcgtaaccaccacagcacctctttgcagcatcacataatcaccaaaatcaacaatttttcaaaattaaaaaaatcacagcctaatatgtattacttgcagtttctttctagaaattaggtgcatggtatagtgaggtaaaaatggaagactccagatttcacaaagatgtcaagttttacattttgatacaatgcaattgaattggcaaagaccattaaagccaacaattatcaaagaaaaaagtattctataaccaagtaaacacctgctatgacttccctttaagaataaataaggtcacatttattcattcaatgaacatttattgagcacctggaactgtgctaggtgctgaggaatataactgtgaacaagataaatcagactcctgccttgaccagatacgtttgctttaaatgatcctgctaactactacatatttgttctctgctaggattatattttttggaaagtcagagtcatatgaagcctcttctggaatacttttaaagtttctttatggcaaaattgttagaaatctttgtttaacttagagaagggaagaaaaatggtctccagtaacctttagacaagcatgtcgacggttgagttcactctcaagcaatatggcggcaggcaaccaatgaggcagtttagaccattcggttgcgcttttggattggggagtctgtgatgccatcactgcattgggccgaggtgcgcttgcggatccccccactgtccaggtggagggccagttcctctgagtcgaagggattcaagtcgtcctccaagaagctagtttttcggcgcccactgctggcgacaccgctgtcttgaggcgagtcgcccgatcgcatgctgatgccggccatagcaccactgaggccatgcagggcgatcgcctcctggaagggctgcaggtcgacgtccaccgatgagctggactcagttgccacagcctggctggtgaccccagtgggtggcttcgggggtgtcctaggagtgcgaggtggaggaggagcggggggcactttgccacacaggaagctaatcaagtcttcgcgacgaatggtgctccggccctttttcacccactccagcacatctttgatgcgacgctggtggccaacctggacacccaagtcaaaacttcgttggtgggcatccccgctctctttgtagaggctggtcacggccatggccgcattctggaaggggtcccacatggaaagtccttgctgttggcacccagaatccttgtaaagctgagcaacggcggtggccgagatctggaagaggtgccacagcttctgcttctcgctcttgagccctgccaactctgcagccgcctcctcctgcagctcggggggcagctgctcctcctgctcggcctcagccaggcactggcgctcccacttggaaaaccagtgctccgcgacctcggcctcgccctccttctgctgctcctccatcctcctcttcaggccgcgcacctccaccaccgcctcctcctccgccgccgccgctgctgcctactcttggtcctccacctcctcacctcctgctccgagctccccgcctccttctgcggccgccgcctccttcgcgtgcgccgccctgcgggcgggcgggcgcgcgggcggcggggccctgaggccaactgctacagcgctagtcgcccgcggccctggtgcacgccccgccccgcccgccggctcagccacccgcaacggcgtggatgctgccttcgcggccgcggagataaccccgcagccgccggcgccgccgcgatgcccccttccggccccacggtccgctcctacggcccccccatggcgccgcggcctcccagccgccgccgccgccgccgcctcggtcgccgccgccgctgcggccccgcagctcggtcccagcccccgcttgcgccgcggctgcagcaccgataactcggagcggggctggcaggagcgctgcctcaacgcggcgcctgcctacctcttagcccccttttcacacatttttgggacttgtcggcttcatccaatgagctgatcaaattttacatcctatgttgccagagaggattatggggcaacttcatggtgtcgatcacatccagggcgccgatccggggaggccgggggaataaaagtggaaagagcgcggccctcgtgggtaggcaggcagtctggaccctagcaatgtcctccccacactaggtgcccgagaaaagtgttttccgtggacgaaagtagtattttgtagaagaaaaaaaatcacagggaaagtgcctgcctcgtcttcttgggcctcagtttccccaagtgcccgttgaagttgttaaactaggtctccggaaagtgctccagtcctgattgagaactttcctgctgtccctgcaaagcactacttcggggttagtttcatacttatcaaattacaagagtaacggtcagaaatggtattgatccccccttcattcttgcaaaggtttttgtcattaagaaaaatggggtggagagtggattctgtgtggactactctcaactattgaaaatcccaagatgaaggagcaaggggaaagaaaaaaggaaataaaaatgaatgctcaaacacgagattttctgttctaatataaagttcagtcccttttaggaaaaaaaaggaaaaaaaaaaactaatttccaaaaccctaaaaattctagctagttaaaacatcataataataccaaaattaagctaaaacggtatggaacactaacgtcatttccttgggttcaataacaaatcccttgtaataatgcaatgttttttcagtgcagacaattccagagcaaactgtgttaaaaacaaacaaacaaaaaaaaaatcactgagctaaaaataacatcaaaagttggaggaactaacgtaatcatttttaagatttagagaaaaaagttagaattttgcagtttttgttgtggaataattgctaagtatccagaaagccttacagacataaataaagctaactcttctagcaaaatatgtctaataattcccaagaatgaaaattagtacataaaataaaattatcattaagttttatcatctcccttaaaagaaatacatgtttctaagttaaatttagaagagaagaagagtgaattgtgccctttctctgcaaaccgggctttttcacgattcattaaaccctttttccatatgtgtaattggactcttctcatttacataaacgaaggatgaggcaaaagacctaagatcagcctaagaggagagatacgtttctcattcttttatgttaaaaaatatatattgtggaagaaaccaagaaggcagaccctacttcatcccccacccctcaccagacctgaaatattaatacttcatggccaaggagtaagcaggtttgcagagctttgagggttgccctacatctggtgcatcacagtcattatcacaggcacatgtttttgttttattttctctaagtaaaaagcttagaccaaagtgactgacagtaggacagcatatcctactttctc

SEQ ID NO: 1563797 - DNA, 4001 bp, Homo sapiens
ccacccaaccctcccaggcggcactgaaaagcgggacagaggcgtgacccattcgtagccagcccacggtccccagggatccccaagcagttgccgcgccggcctcccgccgggctggccaggttaaaggggttggaggcgagggcacaggctacgggttggcggggcgggcaagggggggcatctatttcagccgaggatcgtgtgataggaagcggtgacaatgagtcacagggcagcggggcgcaagcgctccccctccccccgcacatgctcgtgggatggtttccgaagcgagcgtggtggcccacttcagttacctcagcggttacacaatcccgcccgctcgcgcgggggaggggcgcccgacccgggccgctcgcggcccttatgcaaccagtgctctcctgacctaattccatgccggacccaccccacagggagccgcggccccggaaggggcaacacccggcggcgcgagcggcggacgcaggcgccgaccggacatctcctgctggctacagcccagaggaccgggcgcaagtgcgaggagcgcgcgaagttcctctcctcgctgggaaggtgcgagcaggtgtaagaggagaccaggagtgcagcgggagaaggagagtcagaggaacagagacagtgacaccgaaaaagaaagaaacagtgacaaagatacgaagagacggagaaaaagaaccagaagcaaggagacacagacaggaacggggactgagagacaggaacacaaaagctaacagaagtagcaggaaaagacaaaaagcaaccgagatcaacacaaacacagtgaaacacagataagcagtgaaaacagaacaaactcagagacccagccccagaatcacccctcccccaccccgccacagtccatgggtcccccgccccctcttctgccctggtccaaatcccttctcgctgcggggtttgttctcccgctccctcatgtagccaccgagccccagccccggcccggcagcgcgttggactcacccaacttaactgcctcgttgtacttgagcagtgccgcctccacctggcgctcgcggtacagtcggttgccctcgtgccggagttgcgacgctcgcgctgggcctggaaacaacttgccgaggaggccgctgagcaccacgttgactcgcagcggcggcggcggctgctgcccagcccgccgggctccacgcgcccgcccagtggccaccatcaaggcggagagcttgaccccgcacagcgcacagcgccggtcggcggcccgcccacgttccaggcacagtttacaaaaggtgtggccacacgacaaggacacggggtctgatagaaacccatgacatttccggcacttaaagccgtcccacacctcggtggccgccgcagccgcggcggcccccgtctcttccgccgccacggtgccgcttgcagtgctaccctcgtccgggggcgccggcgccagcgcctcgccttgcgggactttctccgccaggcagcgcaccagctgctccagctgctcagccaccagctgctgccgctcggagagctgtctatacacctcgagggcttcacggattcgcccccgggacgccaaggcgtctgcctgcgtgagcaggactttgctctccggcgttgaggtccccggagactgctcttgctctggctcccgcgtcggtagaggtgcggggccctctgcagccacctttgggtgggggcccatgtctacttgggccgctgatgcccctcgctccgccgactccaagttgtcgctgctgacctcagcgggcaagctcagcatctgttcgatccgtactgactccatgggaagagggacacgggaggagacgaggcgtctagggaccggggacacgaagcaaggagtggcagctggaggaaatcggggcagccaccgccgccatgccaccgagctcctgaccctgccgcgcctccgggagctccatgccggccgccccgcgccgcctaataactgtcttgtctcagcaaagtgttatataaaacggtaccacgtgacgtgccgccacgctgttcattggccggcggcggggaaattgttacaaaaccagacagttttgtaacagtgttgctcttgcttctttgggcttcgcttttcttggcttctttttgaggttgtttgtgtttacacttcgccttattcctcctcaccacctggttctttttcggaagtggggttgtggggtggggagaaactcagtgtcttctcttgggcttctcagtctccaaaccccactccatcccacctccaaacgggccagcaaacaggtcccctctgccagccgctgaccagcggccccccactcctcccaggagaggctggtacctcgaggtgcacagtccgcagggtcttccgggacgcctaagactctccctcttgggggagatggctgctgtcagggaaaggaagcaggttgggaggggtatccgtgaagcccccccacacacacacaacccagtcccagcccgagagccctgggagccccgcctgggttccttgccttctcccaggagcctcccaaaggtggtgaattcggtttctgagggtgcttggtgttctgtgccaagagtgactcagagcagcgggtcccaccggcgcagaagttgggcagcgctcgctggacagtgaggaactcgcggagaagatgcgcttgccggctcagccctgggagggagatgccccgctaactcccctctttacctctctacccccaacgccagaactagcgctggggcaggcggtaggcgcccagctggagacacaccaggccggcccctggagccactggccggatgggcgcggcagggatgtacccggcctgctggggtcggtgggtactctgggggcgtgggagagtggcagggggaagacgcgagctgagagcgctattcaggagaaagtccgcgaatcccggcacagcccagtggcagaccgaatagcctccaggtttgtcgctcctgagcgctgcgcgggaagggtacaactgggcacgagcctcagcgcctggtttacaatggctagggggcctcgacggtgtcctacacacttcctgaaggcgagcggggtggccaactgcacactctttgtctgccttgaacccccacatttaggacgggaaccaagctcacaaatgagcagacagaaaacggtatagtcgcactgctccaagcagggaggcagggactaggcttgccgctggctcagttggccttcagagcctgcgggctcttgggcagtgccaggttgccgccccaggggcctgaagacctattgttgccccctgctgcagccacctcttagccagatgaccttggggaagtcaaactttagaatccatcatttttgcttctgaacaaatgttagagctgatcttacttgggattaagtcatgtttcagagttgggttatggcaggccccctcgggtctctgcttctctttaggtagttaaaccagtcttagatcaacaccaaggtcccagagaacaggtactatgcagccagctctagagcctctttctaataagacaggacagagggagagggtcacagggcagaaaggaagcatcacataggggaaaaaagacacacacacgaaaaaaaaaaaaaatgaagaagaaggagaaggagaagaagaaatagagaaactccagatgtagtcaggaaagcacgagggacacattggaaaacttggcttgaagccttggatttgtcacatatttgctatgaaaccttaggtaggttctccaaaccttagtttctcttaatctccaaggttccctccagctctaaccttgagtggctttgatcctaagaccaaatttcatgatactaactcagttacttaagtacaaatgactagtccaaatgctgtggatggtggcttgaaccggggttgaggggatgggaaatcaatggaagattgtccatttagtcggggtcagacctgagctagatt

SEQ ID NO: 1563798 - DNA, 4001 bp, Homo sapiens
gaaagaaaaacctttattaatggcccccagcgcaagcaggtgttaagtcctgtatgagtatggatcttgagcaaatgataagttttctaggacttttctactggagatcaaaagggttaggctctatttctagtcctaatattgtcctgccttctatacccccagccactctgggcctgaggttccccaactgcaaagtcatttttgcccccgctcacaagtggttcattagaggccccgtggtgtcagtggtgcattagacactttgacataggcgagatgtggctacacacggctagtgtccggcagcctggtttatgagtgcagtattaccaacaagaaaacaggccaggtaggaaggagagagaggtgggcagatgtgacccctatctgaaccaccaagaagacaaatccaagttacttttccaggtgggaatgactgatgacattagtaacacctttgtctacaaagcccagcacatatgaagatttcttgaagaaaatggaaatacatttacatggtcccatcctctcatttcaaatggccaaatgtaaatgaacttggacaaggtttctgggaataaggtgaggccggctctcaccaaaaactctgaattactagatgtcagagctggacaggctattagagattatctggctcaatcaacccattcttcagatgggaaaatcaagcccagagaagggaaggcattttctcaaggtcacacggctagctgggcagtcactgataactggtcagactttgaagctttgaagctgggatgtggggagcaggttcctttttctgaaggtgtgtgcagtacttggaataatacggacacaatggccatcttccagaacagagagcctcctttcctcttagaagggtaaagctggccttgacattttcaccctgacttctctgaggggattaacaaagatgcaaggaagaacttccaggggaatgtggtggcaacagaggagaagggtgagggcaggaaggggctttcctggcccctgggggatggctaaaaggtatggaatctgccttagagatctagagttaagtgacctccacctgcctcattcatattgccctgctcttccccaagatctgggatctagcttcctctgtggcaacaggctttgatgttttttttttccccaggggtgtgctcagggcttgcttgcgtgcccattacttgctcttaagacattagcaaattgtttagtcttttctgtcttttttcttctgcagcacactccagcctggtggcagctcacagtctgccttgcttgtgcacagacaggagctagaagggtccccttctccggctgccagccttgccccttcagtcctcattcctcctcctcctccccccattacctgttgcaagcttgagtggagattaaacacgtggagactccggcccacacccctcctccactccacagagtcaggtccaggacaccctcggatcccagggccctgcctgcccagccctgctgcctcctccccggcatgcttcgccagacaccgcgccccacggccgagctcctggcaaactgccagagctgggcaacaccggctggcggctcagcagccacttcctgggtccaggcgtggtgggtcagagagcggctccctggggaaattcgggtgccctagtctagctggagatgggggactgcccacgttacccttgaagctgcaaagcccacccaaccctcccaggcggcactgaaaagcgggacagaggcgtgacccattcgtagccagcccacggtccccagggatccccaagcagttgccgcgccggcctcccgccgggctggccaggttaaaggggttggaggcgagggcacaggctacgggttggcggggcgggcaagggggggcatctatttcagccgaggatcgtgtgataggaagcggtgacaatgagtcacagggcagcggggcgcaagcgctccccctccccccgcacatgctcgtgggatggtttccgaagcgagcgtggtggcccacttcagttacctcagcggttacacaatcccgcccgctcgcgcgggggaggggcgcccgacccgggccgctcgcggcccttatgcaaccagtgctctcctgacctaattccatgccggacccaccccacagggagccgcggccccggaaggggcaacacccggcggcgcgagcggcggacgcaggcgccgaccggacatctcctgctggctacagcccagaggaccgggcgcaagtgcgaggagcgcgcgaagttcctctcctcgctgggaaggtgcgagcaggtgtaagaggagaccaggagtgcagcgggagaaggagagtcagaggaacagagacagtgacaccgaaaaagaaagaaacagtgacaaagatacgaagagacggagaaaaagaaccagaagcaaggagacacagacaggaacggggactgagagacaggaacacaaaagctaacagaagtagcaggaaaagacaaaaagcaaccgagatcaacacaaacacagtgaaacacagataagcagtgaaaacagaacaaactcagagacccagccccagaatcacccctcccccaccccgccacagtccatgggtcccccgccccctcttctgccctggtccaaatcccttctcgctgcggggtttgttctcccgctccctcatgtagccaccgagccccagccccggcccggcagcgcgttggactcacccaacttaactgcctcgttgtacttgagcagtgccgcctccacctggcgctcgcggtacagtcggttgccctcgtgccggagttgcgacgctcgcgctgggcctggaaacaacttgccgaggaggccgctgagcaccacgttgactcgcagcggcggcggcggctgctgcccagcccgccgggctccacgcgcccgcccagtggccaccatcaaggcggagagcttgaccccgcacagcgcacagcgccggtcggcggcccgcccacgttccaggcacagtttacaaaaggtgtggccacacgacaaggacacggggtctgatagaaacccatgacatttccggcacttaaagccgtcccacacctcggtggccgccgcagccgcggcggcccccgtctcttccgccgccacggtgccgcttgcagtgctaccctcgtccgggggcgccggcgccagcgcctcgccttgcgggactttctccgccaggcagcgcaccagctgctccagctgctcagccaccagctgctgccgctcggagagctgtctatacacctcgagggcttcacggattcgcccccgggacgccaaggcgtctgcctgcgtgagcaggactttgctctccggcgttgaggtccccggagactgctcttgctctggctcccgcgtcggtagaggtgcggggccctctgcagccacctttgggtgggggcccatgtctacttgggccgctgatgcccctcgctccgccgactccaagttgtcgctgctgacctcagcgggcaagctcagcatctgttcgatccgtactgactccatgggaagagggacacgggaggagacgaggcgtctagggaccggggacacgaagcaaggagtggcagctggaggaaatcggggcagccaccgccgccatgccaccgagctcctgaccctgccgcgcctccgggagctccatgccggccgccccgcgccgcctaataactgtcttgtctcagcaaagtgttatataaaacggtaccacgtgacgtgccgccacgctgttcattggccggcggcggggaaattgttacaaaaccagacagttttgtaacagtgttgctcttgcttctttgggcttcgcttttcttggcttctttttgaggttgtttgtgtttacacttcgccttattcctcctcaccacctggttctttttcggaagtggggttgtggggtggggagaaactcagtgtcttctcttgggcttctcagtctccaaaccccactc

SEQ ID NO: 1563799 - DNA, 4001 bp, Homo sapiens
attagaaataaatagtattaattaataccggaagctaagaatcacagagaaagatgccactaatatcctaaagtcttccaaattcccttattttcctcatcctctgtccttgtgctcatttcagcaggcatatcacctctaattgtttaggtctcaaccctcaacccttcccacctgtttcctggtcacttcacccctcagaatatgaggttatcggcatatttcaggacataaccatgtagaatcattagatcatttacccgttacattgttctgataactgattatttatccgcttaaagtaaaggtggattcccagtggtaggtaaccttttattgggctcccaattttcagtactaatattcgcaaacacattacaggttttgttcttcccccaacaagaaggccaagggcagactatatgtgatgaccatatacacagacaaaaggtagctacacaattaggcgctgaacaaaccacagcaagggcaacaattctcactgcattttcccaaaaggcaattgaatagatcaagctttagctaagcttggcctgaatgtttctgtgaggcatcttcctggttctccctttaacttgcagagagcacacattctgaaagactggcctgattgttccaataaggctttcattcccatctctgattggcaggagagactttagaatgtagatgccatcaagtttatcaggtgaactcatccttcttggcaagagtgcaacttttcatctgtgacaaggcaaaaggttttataatctatgttgatgggatatgatgttgggaattttgttctgaaaaataaacgtgttgcaaagccattgggtaatctggatctcaggttattattattgtctttatgttagtcaagataaagaaagatggtataattttgtaaggtagcaaagtgaataaccccaccaagctctgaaatattctaacctttgaatttgtctggtcttttccacactgaaataatgataaattacattgctgaatttccttttaaaaggtaactgaaatactgtatttagcaactcaataagacctttttactgaaaatatttaaaatttacaagaagagagtttaaagatgacacattgatgcatttgtatggcaaacagcaattaatttcacatataattgcaaattcagtttatgacagagtttttcattcaaacatgattcttcctttatgggcaagttcatgaattattcaatatagcaaatgtcacattctccataaatcaattaagcatcaaagacatgtcatgtatagttttactagaagaaacctcatcataatacaagccacgttagcgcacaataaactgtaaaccaaagaaatacaaagctagtcgacatactttctaaattgttctacactgtgattttaaattagctctttagaacaactgtgtttacatgaaacagcagcctgaaaatcctgtatgtcttccacggaaacaatattattgccaaaacaatggaaattctcgttttttaccattcatcacgaagatccttgttcagtacttcagagttgaagtctaacttctttccttacactctcaaagcatcagtgtttccactgtagtttgttatgctatcccccacccccaaacgccaaaatcaaatctttttaaaagagaaacttaccccaagaaagagtgtgctagatgagagaatgtgctgatgcctgtagataattagctaataaacatgtaaatgggcaactcgccctttggaagtgcatatttttatccatttttttttttttttttttttttttttttttacagggaaaggttagcccagcctaaagtagcagactctgggctgccgcagctttttactgcaaaccgctcattctgtaaatgtgagcttatttacatttatctctttccctttgttaacgactccctctcttgaatgctgtagcccgcatgcctttagcaaacaggacacaaaaaggcctgaagtccgagctggagccgacggccaggggaactcttgggggtctcaataggaaatgcttttcattggctaaggaggcattattaggagtctagatcccgcccaattccctgtgctccatcgttcccttagtcaccagtcactggactgaataagtttttccttaaagagcattgcccaggaaaagcagtttcacagtcaagaattaatggcttaagtgccacttgacaatataaaaagtgtctttcctgaccaattaatccacagagaaagcctgtgtgcctgtctttgccgcaggactgcagaggaggagacaacatttcaaacaaggaggagtgtttcaattatgcataccatgttcgctcctacttgtttaaaataattacaacaatattgataataataagtagggggcaaggaaaaggcaaaaatgaaaggtaccataaaaatattcctatcacactgtgcaaaattcaatctcccaccatcacaaaaatataaagtaaattttaatactacactcacttaagccagataagtgccctcagatagagatgtactagggtcccagagctctgacacccaccttccaaggactagggagtgttctgtagcaaaaggagggtctacacttctcaagtaactgcctcgcagtaagtctaattaccatgaaaatttcagagatttgctaaaatacaaaataaatagcacagatgcaatctatttacaatagagagttatctgcaactgtatacctccgcccacctcccccatggcaagattttcttttctaattatctacaggtttactgccttggtcactcacaattctttttttttttcctccctatattttcctcttcacctccctctccttgatctgattttgtggcagaaacccactcatccatctgtaacttcattgttggcccttcccctctgccagcccacccctgcaagccttctctactctatctccacccactgcaaaagccaccaacagcagcccctccccctcctctggaatgaaattctctgcccagggataaggtgctttctttctcttggcagagcagagcccctggagtcttggaggatcctctatttgcttcagaacttcagtttgtgtaattaagctgcctcccaagtagggcatgtttcaagcttgtttattctccctatttgttcagctctattgtggctcttctcactatcagtggaggccagtaaacaagttagtgtgaagctgacactagccttattacttgtaactggctctaaaaaaacactttctctgttgcttcctcttctccatcccaccgcccatctctgttctttttattcccctctctgcttatctcaaatatgtctatttctgtcagttgctgacattgtctgtgtctttataaatggtcttttaccaactctcatcctagaccagtactcggtgcatttgtcagtccacaggcgaaagatacagtctctaccctgcagtatgccagagtctaggtagggacacaaagacacatgaaaaaagtgggataccaaaggtaaattttgaaaaaaaaaataccaaggcagttatatggagattgagttctgtaatagatcagaggatggagatgaagtcccatggatagggccaggagggtttcttagaagaagtgggatttgtgccacattttggtggatgattcagtattaaataaaccaagaatggaaggggatatatttctaggtgggcagagcaaagtgatcaaatgcagaagatgtaaagtgagagtaggtgagaaggagaccagtttgtaaagggaaaataagggtaaggagaaaagcttttgagaggagtactttactgtagcaactcaatgcactatagtgattgaagggttaacctatagtcatgatcactgtctgtctatatgatcagctcactacctttctcctcttcaaattaatagccataagttttccaattcttctgtcttcatttctccctcaaggacac

SEQ ID NO: 1563800 - DNA, 4001 bp, Homo sapiens
tttgagagacagagagttgacctagttggaagagaggattctatgtgggagcattttggggaataaggttgcaacaataaagtggagcccaacaatgaaagtcctgaatgccaagctaggatgcttaaactttgtcctgcaggtagaaggatcctttataggttagaaagaacaataagaaaaaaaaaaaaaagaggaagaagaagaaaagaaaaaaatcactataatgatgcagtctgaaactgttttacttgaagcctttgaagaacacaccaagttgcataatatcttgctaacagtcatgaatatgtgaacatattatttaggaaatctgttctgagtgaaggagtaaatactccaacatgctttacaaaatataaaatcagtggtcgattacacattcatagttcttaggatcattgctaaaagaatcactgggtggaaagcttcaattttaggttttcctcctctccccactttgttccaacacaaataccttgatttaagatctaaaaactgaatacatctgaaattgtcttgttttgaaaataagtggtattttactactcctcattatgggtgaatttacttactatattgtttcaaaatgacgacatctattaaaataattttgtccagatttatttcagcaaagcagatgaaaacagaaataaataacaaatttaaagattataaaaagtaaaaaaaaacctttcatcaaatcaagacatatctaaaataatccagcattggtttataagagagtgtgtccctaacaaaaaatgccagccacaacaaagactaccagagagtatatgaagaacattacaatagccaatttctcacccaaagtgataaacctttaatccacaactccataaagaatggagataattttttctcaaaaatacccttaaaattgttggctttctactataaaaattaagactctaagataactcaaaacaaggattagctttcttctagtaagcagacatgtaagtgattgatgatttaatttaccactgcagcaaatactaatttaaccaccactaccttctcaacaccaggaaaatgaaaaatctcagtctttaaaggcatacgtgacaagaaagaagccaagaatatcgtaggatgattaaaccacacagaaaaaccatggcaatcctgctgctgtactctgaaaaaggatatgccattctttcaggcacgtatgcctttaaggaatatgtagagattatgatttttgtgtttcgtttagtttggttgggtttggttttccgggaaagacgggaagatccaggagagttgaaagaagtgcattaaggaaggtgtcaatgactccctcccacccaaactggggaaacttgctttaacaatgatgctctttcacccctaacatcctaccagtttctatacatccttcaggcagcattcctcccctcccctattgcttgattcgcccctcacgttcaggagaacgggctgccccgactttgttagtctggcggtccccgcgcacccgcccagacccgcagagtccaacaacgcagccacgcagccacccactccccgcacctcctccttcacagccagcttcccctccccccgtcctgtcacctgcttgggtggtgtccgtcaggtcgtagccgctgcccgggaagtctcggagtttccgaccactgaggctcaggatgccggagctgcccgcctcttccagggcccggtccaggctcctcacggtgtgctgaggctgcaggctccccgggttccacggcggcccgttggggaacggctgaccgaaaagagtcggtaccgggatggggaccaccagggtcccgccgccgccgccgcctccccctccagccccgccacctccccctccagccgtgccacagccaccgctacttccacctccaccacaaccgccgcccccactgttaccgcctcctccctgactcgccgccatgttcctgggagagagaatagcccccgacaatactgtcagcctgtgccgcgagtgtaaggggttcttaggacgcatgcgcagactgggggcggggggtggggggcgaggtagagagtgggaaggaaccagggggcgggctgggaggaggtgttggatagagaaaagatgatgtttgaaagtgcagaacgcttgctttaagaaatgtatgataagaaggatgctaaatcccggttctgctgctttgggtaccaaagtcttgcgaaacgacaccaggcgaactataggtcatctgggctgtatgtccccaactctctaagttgcttcactgtttccgttctgcaaaacagaaacaaatatatgagctagggatgaaagggattcgtttcagaatatacagaaacagcacttagaagggctatggggcagcttattgagaagcttactgcaaatgcctcaggaatcctttaccagtgttagagaaacgctggggagtcacttggggagggaaatgagtgcagtgttgagtttggggcatatatgaatttctccatagtttagaattctataataggaaaagatttgtaaaatgttttcaaggaagcctctcgtttcaatgtatgtaagtctcagccagactgttgccttccaaaacttggaagagttatccacattctgttctatcactctttgaagttgtgccaagatctccaaaatacctctagtttcttctcatcgtgtcagtactgcctgatgaaaatctctttgatcatcaaacaatcttaagttatttctgaaatacaggttttgtttttagatggaattctgaagatttaaccctgggtattatgaagccaatcgatcttgaattttaggagttcattctcagaacctgaagatatttttaatgtagaagacatagagaagaaagttcaaagtcctttatctggcattccaggcctccataatttaaccccagactatctagccgagtttatcacccaaccatttaggccactgccatccctttacccactaccctctccactctcaatcatagtcattcaaatctttttctctagtattcagtaaagttgatgaagaaaactatcagaatgcttggacatattcacttatcattgagtatcctatgtatctcttttacacctatttcaatttgagcaatgtgtcaacagcctcattttttaagagaaatctccacttcaaaaaagtatatctgccataggctctactttataaaagattacaggaaagaattacaacttgtctaaattgatttgtggctatactggttaactaaaatgattatgtcatgagaaattacattcaccatatgcatgacccagaaggaagaaaacagagaatcagactctgtatagtgaattagcaagtgagataaattattaaaacacaccggtgtcaaaaaggcatgttgcaccttatatctcatcttccttatatcttaaatcaaattattaattcataattcataattaattgagaacttcagaattaagatgaatgagaaaggacactaagttcattagagaaaagattaggaaagaaaatattttaataattagccaatgagaatttttgcaattatttaaaacaatgtattggactccaggaaaaatatgtcctatcaggatacctgtccagtgaaaaaaggcatgtacagccaaatttaagaaggaaaataatttttcaaaaagttgaaagataatctaagaaaatgggacgcttattaagtaagctatgtataccttaaaatcagacaaaataacatgttgtagagctctttgacaagaacaccaaggccaaaagatttagaagagagggcataaagtttagaaatttattctgaacttttaactccctgtgtaatacttgggaaagtggcttaaaagctcagtacttcagtgtcttcatatgtaacaatggaaaataataataataataatatttttaaagtgcttgctacttgccagggagtgctttgtatatacttact

SEQ ID NO: 1563801 - DNA, 4001 bp, Homo sapiens
actcctggcctcaagtgagccacccacctcaacctcccaaagtgctgggattacatgaatgagccaccaagcccagctgaccctcttcatttctatggtacactctccctccacttatcctgccccttttaaagttcagccctccctgctctgctcccctaccctcatctctaaggtgaaccctctttccactgctccatcaatttctgaggtccaccctccttgttcctgcttctccttgctccactcctgcgcttccacattgaagctcagctcccactgctctgcctctccccctctcatttctaaagtggcccttggccaggcgcagtggctcaggcccacaatcccatcattttgggaggccgagccgggaggattgcttgaggccaggagttcgagaccagcctgggcaacataaggagacccaatctctacaaaaatttaaaaattaggtgggcatggtagtgagcacctgtggttccagctactcgagaggctgaggtggtaggatcacttgattgagcctgagagcttgaggccacagtgagccgtgatcgtgccactacactccaacccagacaacagtccctgaccttatctcaaaaataactaactaggccgggggcggtggcttatgcctgtaatcccaggactttgggaggccgagaagggcggatcacttgagaccaggagaccagtctgggcaacatggtgaaacctcgctctactaaaaaacaaaacaaaacaaaacaaaaaaacaaaaacctagacaggtgtggtggcgcgtgcctgtagtcccagctactctgtcgactgaggtgggaggatcgcttgaccccagggggcggaggctgcactgagccaagatgatgccactgcacacctgcctgagaaacagagcaagcacgtttcacacacacacacacacccctaactaaagtagcccttttctgttttgtcctccttcccccatttctacagtttccttcttccgtgctctgatgcccttctccatttctaaagtcagcttccatcctctctactcagctctgctcactccctatctggcttggaaagtctattccctcccctcctcccccatttctaagatggataatagcagaggaactggtccaagtaaaatccactttttctgggtttggtgcgaatggaggaggttaggggccttgataaaggagttcttttttctaaggttccactctccgtgtagaggtctcaggttagagactagagagcgccagcaaagaaaggctatccagagcgaataaccaccagccaacaagcaaataaatggaccaaccaccccttcgaataaccaccagccaacaaagcagatacaccaacccaccaacaactcctagcactaccacgccgggatccctagtaaaatagcctaaggcttgctcctccgggccctggaatctagtgatttatgacatccgcttggactgagaagagcacttggctccatgtgtttgaaggaggccagtagttaggtatcaattcttaggagagtaaaatacacgttaatagcggtctattttctccgcctgcccctttcagcaatccttaatccccacgcgcttctggtcagcctccctcagttccccacctgaaaggagagggctggaggtgaggagaaaaagaggagaggagggataggggccaagtggtcccagggttcgtcagggtggggcaggtgcggagatgccctgaaggggaagcctctcctcgaactggtgtgttcctcccgacgccacttctagtaagcgctatgccgaggtcttgcgctcaagaccagtgagcccaaactagtggagactgggatccgagatctacatacctagagacatatctaggaagttaacctttttccgactgggatgatttggcggcactttttcagaaagcgttagcttccgaaacgaagccatcttccctgcatcatggcgccacacactccgaggtagggcgcgtgtaccaccccctcaccgcgcaggaggagcagagtggtggactaacctgatcctccaatcatagcctctcccttcggtgttgctaagccccaaggggtggagcttggcgttacccctcaccaagtctcctatcaggagcttggctcgctagaagaaaaaaaaaggaaagacccgcccatctcccacccgatacccctttctaaaaatattctctccacctagagcactatgtagttggctacaagtttctagtgtatgtggtgttccggcccttgcctttcacagttcctaggacccatttctcctctttgctgttgacattcatggcgaataaaaccttataatcttgacttaatgggctgatgctctgcttctctcaaattccaagagggagcacaaatttaacatctagggaggattcacaggtttgcaatgccacacgctttcttttctgtctttcttttcgtttttgttttttgttttttgtttttttgagacacagtatctctttgtcacccaggctggcgtgaagtggcgccaactccgttcactgcaacctccgcctctggggttcaagcgattctcccacgtcagcctcccaagtagctgagattacaggagcgcgccaccacgcctggctaatttttgtgtttttagtagagatagggtttcaccatgttggccaggctggtctcctgggctcaagtgatctacccgtctgtgctaccctcataccacagcgcccacactttccctccctccctctgtccctcccttccttctttccttccttccttcctccctccctcccttcctccctcccaccctctctttcttcttcctaacttctttctttccatctgccttggcatccctccctcaccgcacctggttatttcttttccttccttcctttcttcctttctttcttttctttctctttcttttctttctttctttctttttctctttctttcttttccctttctttctttttttctttctttctctctctctttcttccttccttcctctctttcttttccttccttccttcctccctccctccctcccttccttccttcttcctaacttctctctttccacccgcctcggccttcctccctcaccacacccggctattcccttcccttccctcccctcccctcccctccccttcccttcccttctctcccttgcttccttgcttccttccttccttttttccttccttccttcctttctttttctttcttttctttcttttcttttttctttctttcctcgatctgttgccaaggttggcatgccttaacctcccaggctcctcttgggctgtagagatggggatctcaccatgttggccaagctgatctcaaactcctggcctcaagcaatcctcccaccttggcctcccaaagtgctgggattacaggcatgagccaccatacccggcctgccacatgctgttcaatgaccttgaagatgtgtccatgacatttcttaagaaaaatgtaattgttcttgttatcacctaatactgctcaatcaaatgctactttaaaatattagagaaatcttgtcactggctcttcagtagaaataaaaatcaaattaatacattttcaaaggtaaaaatatgttcaagctattacagaatccacaacataaataaatgccggaagagattttgaaaaatgtaaattatttaactatttattgtatttaagtaaatgcttcgcacctgggacctaaagattaataaataaatctgtttctccatgcatatacaattgcctgaagacaataaatgcatgcaaaatattaatttaggtgctgtaatttagtctgtcaacaaatactgagctcctgctgtgttaggttctgaggatacaggtatgtacaaaatgtatttgggattcaaaggagaaaattcacccaaggaatcaagaaaaaattatttaaatcctgagaaattagggaataattgtaggggtggga

SEQ ID NO: 1563802 - DNA, 4001 bp, Homo sapiens
caccctctgagaatgaggtcctcacctgccccagatctggaaacaggagtgaaaagaagccacatcctgggtgaggtgtccagggctgacccctttggttctggggtgaggattccaatagccttgtctgtctcactcatctttattcctgccagcgcctgtgcttcctcaacccccaattccctgacatgagtagacatcccccctttaccccaagaccccatctccctgagggccccccaacttcctgcctgtggtacaagtgagaatggaacataccgccatccctgatctggtccccctagagctactaaaaggggacagccagactgtgtggagtcccttctttctgagccggggatatccccagtcctcatgaagggggcacatcttgggccatatggatcctggaactcctccctctgttgacctgaggccccacttctcagaccacagctctgtcctgtcacctcaaagatgcaggaaatatgggccatatgtggccaccgtgccctggacctctcagggccgaggtccacactgatctggattccaaggtcccctgagtcctccctcctcttcctccgcgtaagccttgcaggcctgggtcccacccccatgctaatctgagtccccatcattctgattcttgaggccagaagtggcagcctcagtctcagacaggggtgcggtgtcctagggtgctgggtcctctgaggcctccctcatctcgcagtagggccctccctctgctcccctgaggccctgttcaagccccttccctccatcagccctggatggggacgtcaagatccgagtgcctggccgccattcccgtggcttccgtgggttgacagcagggattctgacaagatgaggttgggggtagggggtaggtatgggaatgtgagtggggtggcggtggagatgaggagacaggtgtgggtggggaaccctcagttccctcccagggtcctgaccctaatgccgggcggatgcctggaccttgatgcctgggccctgccctctcctgaccaaccctgccccggtcacataagctatgactacagattgccctgtgggttaagtggcagtgggacgggacggggggtggtccagctgagacatctgtcctggccgggtggtccagggctggcagcaggggtggtactggatcattttggggccatctacctggggtgtgtgcctcctcagtcctccctcagcatctcaccttgcctcctcacagagcctaaaaccactcccctcagtggatctcaagccgcccctcagaaccattaaatgaacctggcttctctcagatctgtgaggttcaagtcagtggtttcacatcgggccatccagggcttccctgggttgagagcaggggcaaaccggattctgccagaatgggggaggcgatgggagtggggcacatgagagagatgagggtggggttgggggcagtgagggtgaggtggcagaagggttggggctggtgctggggctggagggtggtggtcaggtgacggagtaggagtagggatgggggtggaggtgtagctgaggagatgggggttgggtggggaatgggaatgcgaatggggtgggagtggggattggagtgcagtcttgggggcccacagccctccctcttgggtgctgatcttgatgcctggcagagcctgtgccctgccctctcctaaccagtcctgccctggtcacagcaacctctgattccagagcttggggagaagaacctggtgtctctcaaggcttttggagcaggggtctgggggcagcccaggctgagacgtcttcccgcgggtgggccagggctggcagcaagggcggcgctggaatatttggggctctctatttggagtggcggggtcctcagtcctccctcagcctctcaccttgcctcctcacagagcctgggtcaggttccttcggccgaactctacgccgtccctcagaatggaaacctcgcttctctctgccccacaatgcgcaagtcagtggcgtcacatccgggcacccggatgtttcctggcgggaaccggatcctgcctgggtgggggtgggagtgggcgtgggggtgggggtgggggtgagggtggaatggctgggcggatgggcatcagggttgagggatggggtgggggatgtggggtgggggttggaatgacaatgaagagggggttgggtcacgggagtgagcattggagtgggggttgggtcacgggagtggggtcttagggaccctcagccctccttgagaatcctgagcatgatgtctggcagagcctggacgctgccctctcctaagcagcccttccctgatcacacgagctctgacttcagagtccccagtggtttaagcagcaagggggctgggggtggcccagcctgagaagtccaccaccagatggtccaggactggcatgaagggattatttggggtcctctatctggggtaagtgggtcctcagtcctccctcagcatgtcaccttgcctccttacagagcctgggcccgcttccctccaccgatctcaagccgcccctcagaccgaaaacctcgcttctctctaaccactaatgctcaagtcagtggcgtcacatctgggcacctgggcttccctgggttgagagcaggggtggaaccggattctgcctggcttgggctgggggtgagcgtgaagatgtttggatgggtggcgtaaagggagggattgggggtggtagggggagggatgccagtggtgccccggggcttaagtcgtcgtgttggtggtagtggggttgggcgtggggttgggggaccctcggtcacccctcagggtcctgactttcatgcctggcagaatctggacacccatattctctgccgattgtgtctgcttctctcccaccaagtctctggcccccagtcccatgaggtggcaatgggagggggggtgtggtcgtggtaacattgccagggtcttccagggctgacaggaggggctgagctgcattctgtggcccatctacgtcgggagagtggaccctctgtccccactcaggaaggtcctcctcccggctcctggcactttgttgaagtcatgggcgggagatgctgtttctgccatctctgagcatttgcccagctgcacccattgcagagaatggctgcaggtcccaggccaggtgctccctgcagagtggcagctcccgcgattgtagtgacctctgggagaagacgcacaccttcccacgggggcttctctccagccagagctacacttggcaaaccttttgtcctcaaagtaatatgttttactcccaggcacggtggttcacgcctgtaatcccaacagtttgagaggccgaggcgggcagatcacttgaggtcaggggttcaagaccagcctggccaacatggtgaaaccccgtctctacacaaaatacaaaaattagctgggtgtggtagtgctcaggaggctgaggcgtgagaatcgcttgcacctggaggcggagtttgcagtgaggcgagatcgtgccattgaactctagcgtgggcctcgcgacagagtgacactctgtctcaaaaaatttaaaaaatgaaaaagaaatacacttttcgtatcttccaaggatatatgtaggtagctgtatatatatatgtatttatttctaggaaagaatacctaccagtagtatgcatgattcactcttatatcctattctacttcttttccattctttacgttctgttgaaataattttttttgaaacacaatttctcacccactatgttggtgtctggttgttattagtggaactcttgatccatactgtcttaaccagccctgtttaactggtgtcctgctgttgccctagggctactagcatcatgttttgaggagctgcctcagactgtgtaatgatgtgaagtggaaatttgaaaactttcattgtaaccattttgtcaactgcagtctaggcagggtacag

SEQ ID NO: 1563803 - DNA, 4001 bp, Homo sapiens
gaaggggtagggtggggctgagtcctgtgcgtttggagaatggtgtcccctcagtcctcaccttgactcctggcagggtctgggaccctccctctgctgacccgagtgcagctcccttagaccaacacctctccctcccagagaccagtgatccttgtataagacagggagactcagcggacagccctgactgggttctccagagtgacagtagggtcatggcagatttctgtggggaccccatctgtgttatgggctgggggtaccctcagatttccctcaggttccttacctggactcttgtcagatcctgcgacccactgtgtctgtagaaaagaggggttccctgtgttgacttgagtcaccctctgagagcaaggttctcacctccctgagattccaaaacaaaagtaagaaggagccacatcctgtcatccctgtggggtgtccagggctgatatctcccctttacaccaaaactccatttccctgagggttcctcatcttcctgcctgtggtaaaattgagcttgccacttagtgccaatcctgatcaggtcccctcagagctaagaacaggggacagccagactctgtgacatcccttctttctgggctgcaggtacctccagtcctcactaagggggcaccccttgggtcctgcagattctgggactcctccctctgttgaccaagtgtggaaccctgtaataacttcttagcaaccctcagaccaaggtcctcacctccctgagacccggcaggcagaagtggggaggggcaccacacgatcacacctgcatgggattcccaaagctgacagaaggagcagacatttggcgggggggggggggggggtggtgggcaggggagggggacaagacggggacttcctttatttgggtgtcctccaggtattcagatttactcccgacagggcccagccctttccctcctgctgaatcgtgtatgggtcttgcacgccaaagccaccatctccctgggatccccggtgagaaagtgggggccacttctcttcctcaccgtcctgcctggggttccagagctgataagagggacagatttcctagttctgagatgcggggatctgctgagtcctccctcagggctctgggactcctccctctgctgacctgaggctccactcctcagaccatagccctctcctcattgacaccccaaaggcacagcaaagacacatcacatgggccaccgtgcctgaaaccacccagggctgaggtccccactgatctggactccaaggtcccttgagtcctttctcttcttcctccccttgactcttggctgggttgttctcctctaccacgccccgccgcagacctgagtcaccgtcccttggattcctcaggccgagtgaagagacatctcggtctgagacagaggtggggtgggcaccctgtcctgggatcccttcatgcctccctcatttcccagcagggcccgggccttccctctgctcccctgaagccgcattcttggtaccaatatccccttccctacgtcagcctcagatgccgacgtcagaatttgcgttcctggtcgccatgaccagggcttcccagggccgacatcaggggcagagccctccctgagcgtcccgacattgatgctggcagaacctaggcgcggctcccgccgaaccagccgggccctggtcacaccaagctctgactcccagagtcccctgcggcttaagcggcgggagagagtgggggcgggggtggggggggggtgacagcccagcctgagaagtctgccctcaggtggtccagagctggcagcagaggcagcgctgtattatttagggctttctatctgggttgggggcgtcctcagtcctccctcagcctctcaccttgcctcctcacagagcctgggcccgctctcttcagccgatctcaagcctgtccctcagaacgagaacctcgcttctctctgatccccgaggcgtaagttagtggcgtcacatccggtccccggggcttccctgggttgacagcaggggcggagtggattctgccggaactggggtgggagttggggtgggagtgagggtgggagtccgggtggggtggggtacgggtgaggatggggttggggcaggggtggtggtgaagatgagtgtggggaggggcgtggaggtgggaactgggatggggatcttggggctgtgggtcgtggtgggggtgggggtggggtctttcagtcatccctcagtgtctcgaccttgatgcctggaaaagcctggacccctgttttgtgctgaggatgtcttctccccttaaaccaggtctcttgactcggagtcttccaaggtggcagtgaggggagggttgtggtaggggtgacaacattgccagggtcttccagggctgacaagaggggctcagctggattctgtggcccctttgtgaggggtgggtggaccctcggtcctcactcaggagggtcttcctcctggcttttgtctctttgatgaagtgatgggtgggagatgctcagtttccgtcacctctgatcatttgcccagctgcatcccttgcagagcatgggtgcggttcccaggccagatggtccctggggagctgcaacacccgtgattgtaatgacctatgggagaagacgcacaccttcccaacggggctcttcccaagccacaagtagacttggcaaactttttgtcctaaagggtatattttctacaagaaagaggctgagcatcggggtgtggagaggtcctgctgttttgagtttagctgatattttatagtccaatgcagtgatgtctggttttctaaccctcattcctagtaaaaatatgtgttttaaatgtctgccaagtgtatattgaatacatatataacatttcatgaaagaatacctaccttacgctgtgtggttcactgcttattctatttctggtctattctttatattctattataataatttttctctttttttctgagcaagaaaatttaatataaagaattattaacttgtagcagaggatcaactaagaccagtcgtcactgtggtggttttaggtggttagcagcatagactccggagtcatactccctcaatcaaccccgtctttcctgctgtcctgatatcactccagagctactgggctactggcatcgtggtatgaagtgttgcctcagattgtgcaataaagcagggccagaaattcaaatatttcttcctactcgtcctcttatttgccgtctatgcaggctgcggacctccgcaaatgcactgttgtcctccactccccctactccaaacacaaggtccaattcgaaattctgcagtctgcttagggttctatcatgttttgctgtgtagaatttgttgagtgttgataatgttttttcccttctcccctccaggattgattctggagtgtaagtcagcaatatgaacttgatgctcattttggcctaaaggtaaggcactaattctgtaaataatttaaggaaaattcacgcctttaaaatattctgttctccattaatggatatggtataatgctttatttatttgggacttctttcacctgaatctatcagcaaacttttacagttgactccagtaagatcctgctcatttttgttaggattatctttaaggtaattttaggagttttttgctgtttttaatgggatattttctattgtatgttctatttactgtttttttatgaccagtttcttgattttgctataatgagcttccataaaacatttttcttctgaagtcttttattcatttaaatattccacatgcttattcctttgactattcgttaaagataacattgtctccaaacatctctcttttcaaaattcatgcatcttatttagtttgatacccatagctctggctatgtgtttcagtgcagttttgaacagtagagaaggtagcatacatttttgtcttgttcctggcttttat

SEQ ID NO: 1563804 - DNA, 4001 bp, Homo sapiens; identical to SEQ ID NO: 1563803

SEQ ID NO: 1563805 - DNA, 4001 bp, Homo sapiens
ctgaacatcagtcaaggggattgtgcaccatgtgcggaagcagaggcaacaggtaaaagtaaaatgagtcaagatccttgctcttgttgagcatgcttgtacatggtctaagaacactctcaaaagaaggaaacacagtgaacatgcccatagtgctgtttggtgatgataggcagtagcaggggcctctttcccggaggagaggctgaagcagggctaggaatgaggttagagacagagattggggccaacactaaggaagatccttgcaaaattctcagagggatagtggattggagggagggagggtaaacagtcccattttgagaatagagaatagataaatatgtagaagaacagtgtgtgcctacgtgtgtttaggtcaggggtaggacaatgaagaactgggtaaacaagaggtgacatggtgaggtatgctgatgataaaaagattgggggctatcagttgttggcagggctggagagccaggaagcaaaattgggattcagtgcattgggcagaatggcatccacatagatatgtgcctgtgcaggggcatgatgaagcccacctttgaggaaggtcttctagcacagggctttcccagcagtgcaggggcatccccagtgttctgtagcaggtaaggcatcagggcccactgcctaaaggagggagaaaggatgctgggcgaacaggactctgggactagagtgctcacttcagccagactgctctgccttctaatgttcataaattggagttctatggaaggcttcagttaaaataagggattctatgtctaaaatttggcaaccatggtctactagtgagatatgggatgcattgtggtgtcctggcatcctctacttgtgcctaatattgctttcagccctttgcttcactgactttagttactgcaaagttgccagctgcctagaacacactagattagaagaggtttaacaaggaagtgtgtaccatctccatgggttttccatctaccctccaaatatctgcactttaaaccaatcctctattccagacattatctgctgacatatagacccacttttatagtcacaggacacaggttctctgttgtgacaaggacgcagaaaccatgggaggcattctgagctgggaacatcatctggatcatttttcatagccctttatctatagttactgaattagttggtcctgggcattcccactccagcttacccctccttgcagatgcacattcccttaccttgctcattggtattcctagcctgtatcaatggtcagccatcagtcaccagctccacttgcatagcacccacctctatgaaaggggtccagtgtacacaggaaaaaaattgtcagcctccactgggggtcaagacagctccctgccctggtgagagtgcacaggattactacagtgatcaagagaatgactcaggcagccagctatacccttcctgacaggagatggggaaattttaatgtaggctaattgtatatgtatatgtatgtgtatgtgtatatgtatatgtatatgtatatgtatatgtatatgtatatgtatatgtatgtgtatatgtatatgtacatacatatatcactccatgattcctgacattcttatagatcttgttatttcctaagtgagtaaaacaatacgaatatctttcattaaaatatttgtcctgttgtctttggttcccgaagcagcttcagaacagcttcggaatagtaaaggtggaagacagtcttctgttgtaatgttggagtgctttaggcctcagaaggagacctcggaaaacacaatctcgctttctaactttcttttgcccccctttcaccttcttctttttctccctaagacaagccatagaaactaaaaacagtcatctctcctcacctgtcttagagctggtcataaagaaattctctgacctaccttgtctgattgtaggtcttaaactcccatttcagaagaggtcctgacccataccctggaggacacaatgctgctcagggagaacaggaagaatctgaacagacaggccttgctggtttcccaactcagtctcttagtattaggttatatctttctgtccaatcatatttctacacatctgtccatgcttcaatcatgcctatccaatgaagtcttagtaaaagggtcaggaggacaggatattgagagcttctgaacagctgaattcatggaggcttccagaaaggtgcataagaactcatccacgtgccaggagagtgctgcaccccaactgcatgggaacagaagcccttgcagggcagaccctccagaactcgccctatgtacctctttatatggctgtttcattgtgtcctttaaaatatcctttgttataaaccagtaaacataaatatctccctgagttttgtgagctgatccagcaaatcaagcctaaagaaggggtcatgacaacctgaagttgaagccaatcagttagaagttccagaggcctggacttttgactagcatctgaagagagggcactgttgtgggactgagtcctcaacctgtggatctgatgctatctccagatagatagcgtcagaatggaattgaattaaaaggcacctagctggtgtctgctgtagaattgatttcttgctttttggtgaggagaaatccccatacattcagtcacagaagtcttctgtgttgattgttgtggtgtgaaagcagatgaaaacagatgaaagcagatgaaatgccctggtgcattcagctaccgggcctgctcactcacatcacgtggccatgttcagctggagattatggttcccagatttcccaagcctattcctgctcattgtcctgtcctccctactgcctttccccttatatccctcaggtccctgatcccactgggctgaactctggattgagagctctgagtgccagcctgcctggggctctgtggacttggttgtgtgcgtggtctctctcatggactctggcagttgccctttcttggatcctcctaatgcccctcatgagctgatggtgtcctgtcttctctccttccctgccatctggtcagtctgactgcattagtccattctcatgctactataaagaactggcagagactgggtaatttataaaggaaagaggtttaattgacacaaagtttcacaaggctagagaggcctcaggaaacttacaatcatgcaggaggggaaacaaatatgtccttcttcacatggtggcagcaaggagaagtgctgagcaaaaggggaaaaagccccatataaaaccatcagacaactcactcactatcacaagaacagcatgagggtaaccatccccatggttaaattacctctcaccatgttcctcccatgacacatagggattatgggaactaccattcaagatgagattttggtgggacacagccaaaccacaacattctgcccctggcccctcccatatctcatgtcctcacatttcaaaacaaaatcatgccttcctgacagtctcccaaagttttaactcatttcagaattaactgaaaagtacaacttccaaatctcatttgagacaaggcaagtcccttctgccgatgagcccgtaaaatcaaaagcaagttagttacttcttagatacaatgggggtaaagacatccattccacctgggagaaattggccaaaacaaaggggctacaggccccatgcaagtccaaaatccaataggtcagtcattaaaccttaaatttccaaaatgatctcctctgatttcatgtctcacatctaggtcacgctgatgcaagaggtggtctcccatggccttgggcagctctgcccctgtggcattgcagggtacaaccccccacccaacttccctcaaggaagatcccattctgggatctggaggactgtagttctcttctcacagttccactagggaataccccagtgaggacactgtgtggaggctccaaccccacatatcct

SEQ ID NO: 1563806 - DNA, 4001 bp, Homo sapiens
tgggactcctccctctgctgatcaggtgtggctccacctgctgacctgtcatcacccccttgaaacaaggtgctcacctccctgagcaaggtgccacccccaacctcgtggcagaaatgtgagcatggcacatgcctccccaacttgggcctccgagggatgaaaacagaggaagcaaggattggtgaggtccctttttctttggcatgtgggagggtacattcttaccttcagtcttcatcaattttcctctccttgactactggcagatcctggactccaccctgtgctgaccaggtgtgtatccctctgctgacctgaggacctgcctcagaccaagggccccacctctctgagatatgggaggcagaaagtgaaggggcactacatggacacccctcatgggatgccaaaggctgacagatgaagcagatttcaggggtgcctcctctctctgggtttcctccaggtattcagatttactcctgacaaggcctatccatgtctctcctgctgaactgtggatgagttttgcaggccacgaccaccatctcccagagaaccccaactaggaagtggggagctgcctctctttcctagagtcctgcttggggcctccaaggaccgatggcaggggcaggttttctacctcagggataattggttgcctgagtcctccctctgggactcctccctgggttgacctgaggctccactcctcagaccacaacccactccttgctgacaccccaaaggcagagtgaggatgcaccacatgtggccaccgtgccttggaactccaagggccaaggtccctactgacctggagtccaaagtctcctgagtcctccctcttcttcttcctcttgatgctggcagggctgcaccccagaccccctctgcggaactgagtctccatccctcagattcccaaggctgaatgaaaaggcacctcagtttgagacggcgggactatgggggggggctgttctggggtgctgggtcccttcagttgtccctcaggccttgctcacctcccagcagggactgagccctgtctgtgctccccctaggtctttctcatgataccaagccccttccctctgtcagcccaggatgcggaaatcaggatccacttgcctggcagcaatgccaggaacttcccaggactgacagcagagagggagccttgctctgtggggcctcagccctccctcggggtcctgaccttgatgcctggcagaacctgggtcctgccccccccaaccagccctgccctggtcacaccaagctctgaccccacagtcccctgaggcttaagcggcggggggcagaagccgaggggggtgtcagaggggacggcccagcctgagaagtccatccccatggggtgatccagggctggcagcagaggcggtgctggattatctggggtcctctatctgggtagggagcatcctcagtcctccctcagcatctcatcttgcctcctcacagagcctgggcccgctgccctcagcaggtcacaagccgcccttcagaaccgggctatcacttctctctgaccccctaatgtgcaactccgcagtaccaagcccggaggtcctttgcgttgtctgcagggacaaggatggactttgtggcccctctatcaggatggggtggaacctctccataatttctcagagtcctgatgttgatgcctggaaaggccggggccccaccctttatggaactgcctctgcccgggtcacaccatagactcgcagagtctccttgggcattgaggagggggattgtctcagcctgataatttggtcccctgttgtttcagggctggctccagggttggcgctggattatttggggccctctatctgggtaggaggactcctcagtcctccctcagctctcaccttgcctcctcatggagcctggacccgctgccctctgccactctcaagacacccctcagaaagacgctttcgcttctctcagatcccagaggcggaagccaatggaggtcacatccggcccccacgcctggagcttccctggatttacagcaggagcgaacccgattctgcccgtgtgggggcggggcgaggcgaggcggggcggggcgaggcgaggcggggcggggcggggtggggcagggggaaaagtagtggcgaggggtgcagatgtggtcgagggtcatgggggtgcctcagtcctccctcaggtttctgaccttgattccttgcagagcctggagctccgtcctctgccaatgatgtctgctcctctcggaccaagtctctgactctgagtcccctgaggtggcagtgagcgggaggtgtgaggtcgggggacaacattgccaaggtcttccggggctgacaggagggaccgagctggattctgtggcccctctatgtggggagggtggaccgtcagtcctcactcaggagggtcctcctcttggctactggttctttcatgaagtgatgggtgggagatgctctgtttctgtcacctctgagcattgcccaactgcaccccttgcagacaatagctgcggatcccaggctaggtgcttccatgtggcttcagtacccgtgattgtagtgacctctgggagaagatgcacaccttcctacgggggctcctccccagccagatctagactttgcaaacttttgccctgaaagctttatttttacactgaagaggctgagtggctgcaagaaatttgcggaagtcctgcgtttagaatttatctaacacttcatagttcattttagtgattttcattttttaattctcattcagtgtcaaaaatcatacttaacctaactgcctatttcactctaatggtcaatactctaatttaatccattctttatcttcaattaaaacgataatttttaaaaagccaatctttatttactgacgtggttttagtggttatcagcacaaattccagccgtattcctttaatcaaccagtgtttcctcatgtcctgaagttaccccatgactactggcacctgtggtctgagaccctacccgagttttccacagtgaagtaggggcagaattttaaacatttctttcttcctatccaccccaacttccctgccactcttccccgccaatcacaagtattccttcaaaatacaatgaaattctcagggctctctcatgttttttttgtttagatttcttttttgatattgtttgcttgttcctttatttatttatttttattctttagttttcccgggttgttttggggagtctaagatagaagcccaagactgaacgcggtggttcacacctgtaatccaaacactttggtaggccaaggcaggaggatcacttgagcccagtagctcaagattaatctgaactacataacaagaccccatctcaaaaaaaaaagaaagaaagaaaaagaaaaagaaaaaagaaatgaaaaattagctgggtgtggtggcgtgtgactgcagtcccagctggtagggaggctaaggtgggaggatcactggagcccaggatgtcagtgctgcagtgagctgtgttcacaccactgcactccagccttggaaatagagtgaggtcctgtctcaaaaaaacaaaaccaaaccaaacaatcaaaaaccaacagatgcctgagcttgacagtcatcttggctggttaaggaattacgtctgtcaatttttgaaaaaatagaattgccatctttgcaatattctgttccctatcaatgatatcatatactgccttgtttatttgggtgctctttgaactggatatatcagtacttgtatagttgcctcagtaaaaatcatacatgcttttgttagtcttcttgttaggtaatttttggatattgttgctattgtgaatggggtattttctatgacctgttcttaatagttattgtctgttttgcaaatcttttgattttgctttattgatcttctgttcgctatttttcacacgtctcttattca

SEQ ID NO: 1563807 - DNA, 4001 bp, Homo sapiens
gccttgttcttggaactcctgattcctgggagaggaatccatgggcctcagggtgcagactgcaagtacagccacagattcccaaaattgtcaggagggtcggccagactctgtgaggtccccactctactggggtggagggtcccttctgtgctcactcagggccctcacctttctccttgcagggcctaataccgcccttttgctggccaaagaaactctcatggcaagaattcacatccctgatacggtacagaaggacatgaggggaccaacatctggccatacataaccagatcctcccacaaaggacaatgagagatgtccaaattcattggagtccaggtgtcctgggtgacgagcctgcttggtcctcaccactactcctgctagggcctgagagcctccctctactgacctgagtgcagccccttcagaccaaggcctccctttccctgacatcaaagatcccaggataatggagggacctcagcaggtagccttgcccaggctctctgagggaatagcaggggcagggcagatttctgtggggccctctgtcagcgttctggcccaggggtaccctcaatcctacctcaggcttctcacctggatgcttggtagatcttaggaccactgtgtctgtcgactacatgggggcccctgtgttgacctgagtcaccctctgaagaaaaggtcctcaactccctgagatctggaaacagaagtgaggaggagccacatcctgtcactcccaggtaggttgtccagggctgacccctttggttctagggtgaggcttctgatggcctcctgtgggttactcatctttactcctgccagggactgcccttcctcaacccccaaccccctgaaatgagcagacagctcctctttacaccaacaccttatctccctgagggttccccaacctcttgcctgtggtacaaatgacattgccaattggagctatctctgatcgggttcccttagagctaagaataagggacagccagactctgtggcatcccttctttctgggccgggggtatccccagtcctcatgaagggggcacaccttgggtccggcagatcctgggattcctccctctgctgacctgaagtgccactcctcagaccacagcccgcaaatctgtcaccctgaagtcgcaatgagcatggggcacattaggccactgtgcccaggatcccccagcccaaggttgccactgatctggactccaaggtcccctcagtcctccctcttcttcctccccttgactcctcgcagggctgggctccaactccctgctgaagtgggtctgtatccctaggattcccgcggccgaatgaaaaggtggctcagtttgagacaggggtactttgggcccctgtcctggcatgctgggagccctccggactccattatcttccaggaggggcttgggcccatcctctgcttcccaaaggccgtactcacgataccgacccccttccctccctgagccacagatgtgaacgtcaggatccgcgtgcttggccgccattcccggagcttccgtgggttgattgcaggggcaaagctccgattctgccaggatgggtggggatgggaatcggggtttgggggtcccgttgatgtttgagcgatggtggtgggtttggtgttgggggatgggggtggggttggtgttgggggatgggaatggtggtgggggtgcggggggttaccctcagtcccctcttggggtcctgaccttgattcctggctgagtctgggccctgagcacttctaaccagccctgccctggtcacacaaagctcttacaccagagttccctgcggttaaagcggcggggggtggcggggtgaggtggtggcgactcagcctgagaagtcttcccctgcagggtggtccaggcccggcagcagaggcagcgctggattattgggggccctctgtctggggtgaggcccgcctcagtcctccctcggcatcttaccttgcctcctcacggagcctgcgcctgcttccctccaccgacgtcaggccgttgctcagggcgagaatctcgctgttctctgacctccaacgcgcaagtcagtggcgtcacatccggccccgtgacttccctgggttcacagcaggggtggaactggattcttcctggatggggatccagatggaggtggaggtaagcatgaagatggtgttgggggtaggggtagggatagggacggggatcctgaggctgtagatcctggtggggttgggggagttgggggtgggaggggcctttggtcatccctcaaggtcctgacttggatgccaggctgagcctggaccgccatcctctgccgattgtgtctgctcccctcagaccaagtctctgactctgagtccccctgaagtggcactgggggaggggtgtggtcggggtgacattattgcctaagtttaccagggctgacaagagggactgagctggattctgtggtcccactacgtgggggagggtggaccctcagtcctcactcaagagggtcctcttcctcactcctggctgttggatgaagtgattggcaggagatactctgtttctgtaacgtctgtgcatttgcacagctgcaccccttgtagagaatggctgcgggtcccaggccaggagctccctgcagggcgggagctcccacgatcgtattgacctctggaagaagacagacactttcccacgggagctcctctccagccagagctacacttggcaaacctttggtcctaaatgatttattcactgaattgaagaaatacggtttacatatcttccaagtatatatgtaggtagcgatatatatatttatttctacgaactaacacctacccttagtatgcatcgttcactcttactatcctaatctacttctattccagtctttgtgttctgttgaaggaatttttttttaaacgtaattcctctcccactatgttggtttcaggttgttattagcagaactctggagccatgctgccttaacaaacccaattttcctggtgtcctgctattacctagggctcttggcatcgtgttttcaggagctgcctcagattgtgcaatgaagtgaagtggaaattttaaaacttttattctacccattctgttatctgccgtctaggcaggctacaaacctccccaacatccctgccgctaaccccctctaaccgacacggcaagtgtcacacacaagtaccagctcaacaaggtcttcagtctcaccctggactggccctgttttgttgtgtagattttcttgctaatactggttttttactttctgtttccattctataaatttacagggttgatttgggaagcagagcacagcagcccaaatttgcttgtaatgtcggcgactacaggtaaggcactaaattgtaaataatttaagctgagtttacatttttacactgttgtgttccccatgaatgaatatgttatactcctctatgtatgtcaagctattttttcctgaatatgtcagtatacttcgatagttgcctctataagcagcttatacatttttattagacttctattcaggtaattcttggattttattgctattgcaaatggcatattgtctattaattgctgtagttagttattgctttcgtgaggtgaagattttgattttgctgtagtaatctgttgcacacctcattctgaaggccgatgcacttgaatattccacatgccttttcctttgaattttcaagatcgataatggtattatcactaaacattacatgtttttccaatattcataccacttactcattttgatacttatagctttttgtgtctcaatcctgatttcaaacgtagagataataggctacatctacttctcgttcctgactggaatgatagttcttcgaacatttgacatttaagtatgtttgctgttgattttaggaaatggaagtgctctttgaatatagg

SEQ ID NO: 1563808 - DNA, 4001 bp, Homo sapiens
aaaattgtcaggagggtcggccagactctgtgaggtccccactctactggggtggagggtcccttctgtgctcactcagggccctcacctttctccttgcagggcctaataccgcccttttgctggccaaagaaactctcatggcaagaattcacatccctgatacggtacagaaggacatgaggggaccaacatctggccatacataaccagatcctcccacaaaggacaatgagagatgtccaaattcattggagtccaggtgtcctgggtgacgagcctgcttggtcctcaccactactcctgctagggcctgagagcctccctctactgacctgagtgcagccccttcagaccaaggcctccctttccctgacatcaaagatcccaggataatggagggacctcagcaggtagccttgcccaggctctctgagggaatagcaggggcagggcagatttctgtggggccctctgtcagcgttctggcccaggggtaccctcaatcctacctcaggcttctcacctggatgcttggtagatcttaggaccactgtgtctgtcgactacatgggggcccctgtgttgacctgagtcaccctctgaagaaaaggtcctcaactccctgagatctggaaacagaagtgaggaggagccacatcctgtcactcccaggtaggttgtccagggctgacccctttggttctagggtgaggcttctgatggcctcctgtgggttactcatctttactcctgccagggactgcccttcctcaacccccaaccccctgaaatgagcagacagctcctctttacaccaacaccttatctccctgagggttccccaacctcttgcctgtggtacaaatgacattgccaattggagctatctctgatcgggttcccttagagctaagaataagggacagccagactctgtggcatcccttctttctgggccgggggtatccccagtcctcatgaagggggcacaccttgggtccggcagatcctgggattcctccctctgctgacctgaagtgccactcctcagaccacagcccgcaaatctgtcaccctgaagtcgcaatgagcatggggcacattaggccactgtgcccaggatcccccagcccaaggttgccactgatctggactccaaggtcccctcagtcctccctcttcttcctccccttgactcctcgcagggctgggctccaactccctgctgaagtgggtctgtatccctaggattcccgcggccgaatgaaaaggtggctcagtttgagacaggggtactttgggcccctgtcctggcatgctgggagccctccggactccattatcttccaggaggggcttgggcccatcctctgcttcccaaaggccgtactcacgataccgacccccttccctccctgagccacagatgtgaacgtcaggatccgcgtgcttggccgccattcccggagcttccgtgggttgattgcaggggcaaagctccgattctgccaggatgggtggggatgggaatcggggtttgggggtcccgttgatgtttgagcgatggtggtgggtttggtgttgggggatgggggtggggttggtgttgggggatgggaatggtggtgggggtgcggggggttaccctcagtcccctcttggggtcctgaccttgattcctggctgagtctgggccctgagcacttctaaccagccctgccctggtcacacaaagctcttacaccagagttccctgcggttaaagcggcggggggtggcggggtgaggtggtggcgactcagcctgagaagtcttcccctgcagggtggtccaggcccggcagcagaggcagcgctggattattgggggccctctgtctggggtgaggcccgcctcagtcctccctcggcatcttaccttgcctcctcacggagcctgcgcctgcttccctccaccgacgtcaggccgttgctcagggcgagaatctcgctgttctctgacctccaacgcgcaagtcagtggcgtcacatccggccccgtgacttccctgggttcacagcaggggtggaactggattcttcctggatggggatccagatggaggtggaggtaagcatgaagatggtgttgggggtaggggtagggatagggacggggatcctgaggctgtagatcctggtggggttgggggagttgggggtgggaggggcctttggtcatccctcaaggtcctgacttggatgccaggctgagcctggaccgccatcctctgccgattgtgtctgctcccctcagaccaagtctctgactctgagtccccctgaagtggcactgggggaggggtgtggtcggggtgacattattgcctaagtttaccagggctgacaagagggactgagctggattctgtggtcccactacgtgggggagggtggaccctcagtcctcactcaagagggtcctcttcctcactcctggctgttggatgaagtgattggcaggagatactctgtttctgtaacgtctgtgcatttgcacagctgcaccccttgtagagaatggctgcgggtcccaggccaggagctccctgcagggcgggagctcccacgatcgtattgacctctggaagaagacagacactttcccacgggagctcctctccagccagagctacacttggcaaacctttggtcctaaatgatttattcactgaattgaagaaatacggtttacatatcttccaagtatatatgtaggtagcgatatatatatttatttctacgaactaacacctacccttagtatgcatcgttcactcttactatcctaatctacttctattccagtctttgtgttctgttgaaggaatttttttttaaacgtaattcctctcccactatgttggtttcaggttgttattagcagaactctggagccatgctgccttaacaaacccaattttcctggtgtcctgctattacctagggctcttggcatcgtgttttcaggagctgcctcagattgtgcaatgaagtgaagtggaaattttaaaacttttattctacccattctgttatctgccgtctaggcaggctacaaacctccccaacatccctgccgctaaccccctctaaccgacacggcaagtgtcacacacaagtaccagctcaacaaggtcttcagtctcaccctggactggccctgttttgttgtgtagattttcttgctaatactggttttttactttctgtttccattctataaatttacagggttgatttgggaagcagagcacagcagcccaaatttgcttgtaatgtcggcgactacaggtaaggcactaaattgtaaataatttaagctgagtttacatttttacactgttgtgttccccatgaatgaatatgttatactcctctatgtatgtcaagctattttttcctgaatatgtcagtatacttcgatagttgcctctataagcagcttatacatttttattagacttctattcaggtaattcttggattttattgctattgcaaatggcatattgtctattaattgctgtagttagttattgctttcgtgaggtgaagattttgattttgctgtagtaatctgttgcacacctcattctgaaggccgatgcacttgaatattccacatgccttttcctttgaattttcaagatcgataatggtattatcactaaacattacatgtttttccaatattcataccacttactcattttgatacttatagctttttgtgtctcaatcctgatttcaaacgtagagataataggctacatctacttctcgttcctgactggaatgatagttcttcgaacatttgacatttaagtatgtttgctgttgattttaggaaatggaagtgctctttgaatataggttaaataaatattttcttttttccataaactcattaaatgtctttaaaaagctttttctgtaccctttgacaggatcaaattt

SEQ ID NO: 1563809 - DNA, 4001 bp, Homo sapiens
aagtctcagcagggttggccagactccgtgaggtccccactctacttgggtggagggtcccctctgtgctcactcagggccctcacctttctccttgtagggcctaatcccacccttttgctggcttgagaatctctcatgtcaagaactcacatccctgatatggtacagaaggagatgaggggacccacatctggccatacgtgaccaggtcctcccgcgaaggacaacgagagatgtccaaattcattggagtccaggtgtcctgggtgacgagtccgcttggtcctcacgtccactcctggcagggcctgagaccctccctctactgacctgactccagccccttcagaccaaggcctccccttccctgacatcaaagatcccaggataatggagggacttcagctgacagccctgcccagggtctctgaagtaaccgcaggggcagggcagatttctatggggccccctgtctgcattctggcccaggagtaccctcaatcctacctcaggctctccacctggatgcttggcagatcctagaaccactgcatctgtcgaccagatgggggcccctgtgttgacctgagtcaccttctgaaaacaaggtcatcaactccctgagatctggaaacagaagtgaggaggggccacatcctgttacccccacgtgcgttgtccagggctgacccctttggttctagggtgaacgttatgatggcctcctgtgggttactcatctttactcctgccagggactgccctttctcaacccccaaccccctgaaatgagcagacagctcctctttacaccaacaccttatctccctgagggttccccaacctcctgcctgtggtacaaatgagattgtcacttagggccatccctgatcaggttcccccagagctaagaacaagggacggccagactctgtggcatcccttctttctgggccgggggtatccccagtcctcatgaagggggcacaccttgggtccggcagatcctgggattcctccctctgctgacctgaagtcccagccctcagaccacagccctcaactctctgtcaccctgaaggtgcaatgagcacggggcacattcggccactgtgcccaggatcccccagcccaaggttgccactgatctggactccaaggtcccctcagtcctccctcttcttcctccccttgactcctcgcagggctgggccccaaccccctgctgaagtgggtctgcatccctaggattcccgcggctgaatgaaaaggtggctcagtttgagacaggggtacagtgggccccctgtcctggcatgctgggtcccctaaggactccactgtcttccaggagggcctgggcccttcctctgcatcccaaaggccatactcacgagacccaaccccttccctcccttagccgtacatgtgaacgtcaggatccgcgtgcttggccgccattcccggagcttccgtgggttgattgcaggggcaaagcccggattctgccaggatggtggtgggggaggagatgggaatggggtttgggggtggggttggtgtttgagggatgggggtggggttggtgttgggggatgggattggtagtgagggtagggggtgggttgccctcagtcccctcttggggtcctgaccttgattcctggctgagtctgggccctgagcacttctaaccagccctgccctggtcacacaaagctcttacgccagagttccctgcggttaaagcggcggggggtggcggggtgaggtggtggcgactcagcctgagaagtcttcccctgcagggtggtccaggcccggcagcagaggcagcgctggattattgggggccctctgtctggggtgaggcccgcctcagtcctccctcggcgtcttaccttgcctcctcacggagcctgcgcctgcttccctccgccgacgtcaggccgttgctcagggcgagaatctcgctgtcctctgacctccaatgcgcaagtcagtggcgtcacatccgggcccgtgacttccctgggttcacggcaagggtggaaccggattctgcccggatggggatctggatgggggggtgggggtaagcatgaagatggtgttggtgtaggggtagggattgggacggggatcctgaggctgtagatcctggtggggtcgggggagttgggggtgggaggggcctttggtcatccctcaaggtcctgacttggatgccagactgagcctggaccgccatcctctgccgattgtgtttgctcccctcagaccaagtctctgactctgagtcggcccgaagtggcattggggggaggggtgtgctcggggtgagatcattgccagtgtgtaccagggctgacaagaggggctgagctggattctgtggtcccactatgtgggtgagggtggatcctcagtcctcactcaggagggtcctcttcctcactcctggctgtttgatgaaggaatgggtgggagatgctctgtttctgtcacctctgagcatctgcgcatctgcgcatctgcaccccttgtagagaatggctgcgggtgccaggccaggtgctccctgcagggcaggagctcccgcgatgatagtgacctctgggagaagacgcacaccttcccacgggggctcctccccagccagagctacacttggcaaacctttggtcctaaatgatttattctctgaattgaagaaatacggtttacatatcttctaagtatatatgtaggtagcaatatatatatttatttctatgaactaacacctacccttagtatgcatgattcactctgatatcctagtctacttccattccagtctttgtgttctgttgaaagaatttttttaaaaaacataattcctctcccactctgttggtttcaggttgttattagcagaactctggagccatgctgccttaacaaacccaattttcctggtggacactgctattacctagggctcttggcatcgtgttttcaggggctgcctcagattgtgcaatgaagtgaagtggaaaattcaaaacttttattctacccattctttcatctgccgtctaggcaggctacaaacctccccaacatctctgccgctaaccccctccaacagacactgcaagtgtcacacacaagtaccagctcaacacagtctccagtctcactctgggctttccctgttttgttgtgtagattttcttgctgatactggtgttttactttctgtttccattctataaatttacagggttgatttgggaagcagagcacagcagcccaaatttgcttgtaatgtcggcggctacaggtaaggcactaaattgtaaataatttaagctgagtttacatttttacactgttgtgttccccgtgaatgaatatgttatactcctctatggatttcaagctcttttttcctgaatatgtcagtatacttcggtagttgcctctataaacaacttatacatttttattaggcttctattcaggtaattcttggattttgttgctattgcaagtggcatattgtctatcaattgttgtagttagttattgctttcgtgaggtgaagattttgattttgctgtagtaatctgttgcatacctcgttctgaaggccgatgcacttgaatattccgcataccttttcctttgaattttcaagatcgataatggtattatcactaaacactacatgtttttccaatgttcataccactcactcatttcggtacttacagctctttgtgtctcaatcctgatttcaaatgtagagataataggctacatctacttctcgttcctgacttgaatgataattcttcgaacatttgacatttaagtatgtttgctgttgattttaggaaatggaagttctctttcagtataggttgcctaaatattttcttttttaccatgaattcatattaaatttatttaaaaagctttttctgtacccgttggcaggatcaaatttt

SEQ ID NO: 1563810 - DNA, 4001 bp, Homo sapiens
agtctcagcagggttggccagactccgtgaggtccccactctacttgggtggagggtcccctctgtgctcactcagggccctcacctttctccttgtagggcctaatcccacccttttgctggcttgagaatctctcatgtcaagaactcacatccctgatatggtacagaaggagatgaggggacccacatctggccatacgtgaccaggtcctcccgcgaaggacaacgagagatgtccaaattcattggagtccaggtgtcctgggtgacgagtccgcttggtcctcacgtccactcctggcagggcctgagaccctccctctactgacctgactccagccccttcagaccaaggcctccccttccctgacatcaaagatcccaggataatggagggacttcagctgacagccctgcccagggtctctgaagtaaccgcaggggcagggcagatttctatggggccccctgtctgcattctggcccaggagtaccctcaatcctacctcaggctctccacctggatgcttggcagatcctagaaccactgcatctgtcgaccagatgggggcccctgtgttgacctgagtcaccttctgaaaacaaggtcatcaactccctgagatctggaaacagaagtgaggaggggccacatcctgttacccccacgtgcgttgtccagggctgacccctttggttctagggtgaacgttatgatggcctcctgtgggttactcatctttactcctgccagggactgccctttctcaacccccaaccccctgaaatgagcagacagctcctctttacaccaacaccttatctccctgagggttccccaacctcctgcctgtggtacaaatgagattgtcacttagggccatccctgatcaggttcccccagagctaagaacaagggacggccagactctgtggcatcccttctttctgggccgggggtatccccagtcctcatgaagggggcacaccttgggtccggcagatcctgggattcctccctctgctgacctgaagtcccagccctcagaccacagccctcaactctctgtcaccctgaaggtgcaatgagcacggggcacattcggccactgtgcccaggatcccccagcccaaggttgccactgatctggactccaaggtcccctcagtcctccctcttcttcctccccttgactcctcgcagggctgggccccaaccccctgctgaagtgggtctgcatccctaggattcccgcggctgaatgaaaaggtggctcagtttgagacaggggtacagtgggccccctgtcctggcatgctgggtcccctaaggactccactgtcttccaggagggcctgggcccttcctctgcatcccaaaggccatactcacgagacccaaccccttccctcccttagccgtacatgtgaacgtcaggatccgcgtgcttggccgccattcccggagcttccgtgggttgattgcaggggcaaagcccggattctgccaggatggtggtgggggaggagatgggaatggggtttgggggtggggttggtgtttgagggatgggggtggggttggtgttgggggatgggattggtagtgagggtagggggtgggttgccctcagtcccctcttggggtcctgaccttgattcctggctgagtctgggccctgagcacttctaaccagccctgccctggtcacacaaagctcttacgccagagttccctgcggttaaagcggcggggggtggcggggtgaggtggtggcgactcagcctgagaagtcttcccctgcagggtggtccaggcccggcagcagaggcagcgctggattattgggggccctctgtctggggtgaggcccgcctcagtcctccctcggcgtcttaccttgcctcctcacggagcctgcgcctgcttccctccgccgacgtcaggccgttgctcagggcgagaatctcgctgtcctctgacctccaatgcgcaagtcagtggcgtcacatccgggcccgtgacttccctgggttcacggcaagggtggaaccggattctgcccggatggggatctggatgggggggtgggggtaagcatgaagatggtgttggtgtaggggtagggattgggacggggatcctgaggctgtagatcctggtggggtcgggggagttgggggtgggaggggcctttggtcatccctcaaggtcctgacttggatgccagactgagcctggaccgccatcctctgccgattgtgtttgctcccctcagaccaagtctctgactctgagtcggcccgaagtggcattggggggaggggtgtgctcggggtgagatcattgccagtgtgtaccagggctgacaagaggggctgagctggattctgtggtcccactatgtgggtgagggtggatcctcagtcctcactcaggagggtcctcttcctcactcctggctgtttgatgaaggaatgggtgggagatgctctgtttctgtcacctctgagcatctgcgcatctgcgcatctgcaccccttgtagagaatggctgcgggtgccaggccaggtgctccctgcagggcaggagctcccgcgatgatagtgacctctgggagaagacgcacaccttcccacgggggctcctccccagccagagctacacttggcaaacctttggtcctaaatgatttattctctgaattgaagaaatacggtttacatatcttctaagtatatatgtaggtagcaatatatatatttatttctatgaactaacacctacccttagtatgcatgattcactctgatatcctagtctacttccattccagtctttgtgttctgttgaaagaatttttttaaaaaacataattcctctcccactctgttggtttcaggttgttattagcagaactctggagccatgctgccttaacaaacccaattttcctggtggacactgctattacctagggctcttggcatcgtgttttcaggggctgcctcagattgtgcaatgaagtgaagtggaaaattcaaaacttttattctacccattctttcatctgccgtctaggcaggctacaaacctccccaacatctctgccgctaaccccctccaacagacactgcaagtgtcacacacaagtaccagctcaacacagtctccagtctcactctgggctttccctgttttgttgtgtagattttcttgctgatactggtgttttactttctgtttccattctataaatttacagggttgatttgggaagcagagcacagcagcccaaatttgcttgtaatgtcggcggctacaggtaaggcactaaattgtaaataatttaagctgagtttacatttttacactgttgtgttccccgtgaatgaatatgttatactcctctatggatttcaagctcttttttcctgaatatgtcagtatacttcggtagttgcctctataaacaacttatacatttttattaggcttctattcaggtaattcttggattttgttgctattgcaagtggcatattgtctatcaattgttgtagttagttattgctttcgtgaggtgaagattttgattttgctgtagtaatctgttgcacacctcgttctgaaggccgatgcacttgaatattccgcataccttttcctttgaattttcaagatcgataatggtattatcactaaacactacatgtttttccaatgttcataccactcactcatttcggtacttacagctctttgtgtctcaatcctgatttcaaatgtagagataataggctacatctacttctcgttcctgacttgaatgataattcttcgaacatttgacatttaagtatgtttgctgttgattttaggaaatggaagttctctttcagtataggttgcctaaatattttcttttttaccatgaattcatattaaatttatttaaaaagctttttctgtacccgttggcaggatcaaattttt

SEQ ID NO: 1563811 - DNA, 4001 bp, Homo sapiens
atcattagaatcagctccttcagaaggaactgcaggttcccagatcccaaattgccccagctcagggcatttatactcaccactctcacctggaaccccacaccctcacccctgtcttacatttccactacatcctagaggacttctcgccaccttaattacatgactgcagctcctagactctatgaccctatgggtagacgtgagtctggcttaccttagaatccccactactaccagggccttccacagagcagatgctgagtgaatggtaaagaaatgagccagtgaacaggaagaattatttattcagatttaatttcttttgcattctcaaagaagcaaaaacatacacatatttttaattttacataatagactgaggtataaggcaagaattaactatcttttgagttccttgtatcatgtattttactgctaattcgttcacaatataggcaaatacatattccactgctgttattatgtgacaactcacaaaatggaatggatttcccaatctgaataaaaaacaggactcttacccctaaactatataaacagcactatgtgtgactactgtcattcataaacttggatgctgaagttcatccaaccatttgttaaaaggaacatttgaacaattccaacaggaaacaaagataaatctcaaagtcatccaacagaacagaaactcactgctaagaatgctgactgctctcttcaaagaggcaggaatgggcctcatatcacacgaggcagtggaagctaatggatggggccctggaaggtgcactggcccagaccccctcccactggccctggctgcaacatgtgctgagactcactcttctccctctctcaaagcccgttcatgcaggggtgggtaggaaatgtgaggttctccaccgatctttagtgtatggtgcaggactttcacatagctggtttcaatgagggcccttggaccccacaggaactcgtagcatgcaggatcactgccgggcacctgccggtactccaggtagttttcctgcaccagatcttgcatgagcagcttcctgggatgtgcgaagacactgtcctccctcccctcaaacacctccaacatactcagctcctcccagattttctcctcaggggcacagtcgccctctattgcgattatggccaggacgattatcaggaggcctgtcttgggcatgacctgattgtcgcccagcaggccatcgtaggagaggcccaggcaggtgacaaggatgtacaagtggctgatggggaccacttccaccacctcgatgccaaagaccagctgcaagtactcggaggctttgctgaagatcacgggaaagaagtcctggcaatttctgaggacactctccagcatttctgcctttgtgaccggctccctggctcgatacttgaggagcagaaaatgaaccaactcaaccatcttcctactgattgctgcttggaactcggactccaggtcgggaaacattcttggcccctcctcttcttggttgctggagccctcatcggattgtctccaaagagtgtagttgatggtagtcgagaagctggaggctccctgaggactgtggggaggactcggtgagtcggcagcaggcacctcccccagggtaacttccactagagtagaagaggaagaagcggtctgctgctcctcagtagcaggagcctgcgcacccaccaggcccagggcctctcctcgggcctcaaggccttcttcaggcttgcagtgctgactcctctgctcaagaggcatgatgactctggtcagggcagcaggcaggagtgcgggcaggagctgggcaatgaagacccacaggcctggggagagaaggagcgtgtgtgaggccttaggtgagaactgaactgaaccttggaggctctgacaaaggcttacttacagatcttctccttcaatgctcctccagtgcctcgggtcctacttgtcagcctgtccccctcagaacctgaaggaggaagtgggagggcacctcagggtacagccggccagcacatgctcaggctgcaggactgagaatagggagggtgaggccaggccctctggagtcccatttgttctgggcgggtggggcccttggtgtgcattccaggcaaaccttcagtgttggcactgtctgcgtcccctctgctctgtgacctgaggacactgactcagaccaaggcctcactgcctggttcctggagctcctgattcctgggagaggaatgcacgggccttcagtgtgcagactgcaagcacagccacggattcccagaagtctcagcagggttggccagactccgtgaggtccccactctacttgggtggagggtcccctctgtgctcactcagggccctcacctttctccttgtagggcctaatcccacccttttgctggcttgagaatctctcatgtcaagaactcacatccctgatatggtacagaaggagatgaggggacccacatctggccatacgtgaccaggtcctcccgcgaaggacaacgagagatgtccaaattcattggagtccaggtgtcctgggtgacgagtccgcttggtcctcacgtccactcctggcagggcctgagaccctccctctactgacctgactccagccccttcagaccaaggcctccccttccctgacatcaaagatcccaggataatggagggacttcagctgacagccctgcccagggtctctgaagtaaccgcaggggcagggcagatttctatggggccccctgtctgcattctggcccaggagtaccctcaatcctacctcaggctctccacctggatgcttggcagatcctagaaccactgcatctgtcgaccagatgggggcccctgtgttgacctgagtcaccttctgaaaacaaggtcatcaactccctgagatctggaaacagaagtgaggaggggccacatcctgttacccccacgtgcgttgtccagggctgacccctttggttctagggtgaacgttatgatggcctcctgtgggttactcatctttactcctgccagggactgccctttctcaacccccaaccccctgaaatgagcagacagctcctctttacaccaacaccttatctccctgagggttccccaacctcctgcctgtggtacaaatgagattgtcacttagggccatccctgatcaggttcccccagagctaagaacaagggacggccagactctgtggcatcccttctttctgggccgggggtatccccagtcctcatgaagggggcacaccttgggtccggcagatcctgggattcctccctctgctgacctgaagtcccagccctcagaccacagccctcaactctctgtcaccctgaaggtgcaatgagcacggggcacattcggccactgtgcccaggatcccccagcccaaggttgccactgatctggactccaaggtcccctcagtcctccctcttcttcctccccttgactcctcgcagggctgggccccaaccccctgctgaagtgggtctgcatccctaggattcccgcggctgaatgaaaaggtggctcagtttgagacaggggtacagtgggccccctgtcctggcatgctgggtcccctaaggactccactgtcttccaggagggcctgggcccttcctctgcatcccaaaggccatactcacgagacccaaccccttccctcccttagccgtacatgtgaacgtcaggatccgcgtgcttggccgccattcccggagcttccgtgggttgattgcaggggcaaagcccggattctgccaggatggtggtgggggaggagatgggaatggggtttgggggtggggttggtgtttgagggatgggggtggggttggtgttgggggatgggattggtagtgagggtagggggtgggttgccctcagtcccctcttggggtcctgaccttgattcctggctgagtctgggccctgagcact

SEQ ID NO: 1563812 - DNA, 4001 bp, Homo sapiens
tcattagaatcagctccttcagaaggaactgcaggttcccagatcccaaattgccccagctcagggcatttatactcaccactctcacctggaaccccacaccctcacccctgtcttacatttccactacatcctagaggacttctcgccaccttaattacatgactgcagctcctagactctatgaccctatgggtagacgtgagtctggcttaccttagaatccccactactaccagggccttccacagagcagatgctgagtgaatggtaaagaaatgagccagtgaacaggaagaattatttattcagatttaatttcttttgcattctcaaagaagcaaaaacatacacatatttttaattttacataatagactgaggtataaggcaagaattaactatcttttgagttccttgtatcatgtattttactgctaattcgttcacaatataggcaaatacatattccactgctgttattatgtgacaactcacaaaatggaatggatttcccaatctgaataaaaaacaggactcttacccctaaactatataaacagcactatgtgtgactactgtcattcataaacttggatgctgaagttcatccaaccatttgttaaaaggaacatttgaacaattccaacaggaaacaaagataaatctcaaagtcatccaacagaacagaaactcactgctaagaatgctgactgctctcttcaaagaggcaggaatgggcctcatatcacacgaggcagtggaagctaatggatggggccctggaaggtgcactggcccagaccccctcccactggccctggctgcaacatgtgctgagactcactcttctccctctctcaaagcccgttcatgcaggggtgggtaggaaatgtgaggttctccaccgatctttagtgtatggtgcaggactttcacatagctggtttcaatgagggcccttggaccccacaggaactcgtagcatgcaggatcactgccgggcacctgccggtactccaggtagttttcctgcaccagatcttgcatgagcagcttcctgggatgtgcgaagacactgtcctccctcccctcaaacacctccaacatactcagctcctcccagattttctcctcaggggcacagtcgccctctattgcgattatggccaggacgattatcaggaggcctgtcttgggcatgacctgattgtcgcccagcaggccatcgtaggagaggcccaggcaggtgacaaggatgtacaagtggctgatggggaccacttccaccacctcgatgccaaagaccagctgcaagtactcggaggctttgctgaagatcacgggaaagaagtcctggcaatttctgaggacactctccagcatttctgcctttgtgaccggctccctggctcgatacttgaggagcagaaaatgaaccaactcaaccatcttcctactgattgctgcttggaactcggactccaggtcgggaaacattcttggcccctcctcttcttggttgctggagccctcatcggattgtctccaaagagtgtagttgatggtagtcgagaagctggaggctccctgaggactgtggggaggactcggtgagtcggcagcaggcacctcccccagggtaacttccactagagtagaagaggaagaagcggtctgctgctcctcagtagcaggagcctgcgcacccaccaggcccagggcctctcctcgggcctcaaggccttcttcaggcttgcagtgctgactcctctgctcaagaggcatgatgactctggtcagggcagcaggcaggagtgcgggcaggagctgggcaatgaagacccacaggcctggggagagaaggagcgtgtgtgaggccttaggtgagaactgaactgaaccttggaggctctgacaaaggcttacttacagatcttctccttcaatgctcctccagtgcctcgggtcctacttgtcagcctgtccccctcagaacctgaaggaggaagtgggagggcacctcagggtacagccggccagcacatgctcaggctgcaggactgagaatagggagggtgaggccaggccctctggagtcccatttgttctgggcgggtggggcccttggtgtgcattccaggcaaaccttcagtgttggcactgtctgcgtcccctctgctctgtgacctgaggacactgactcagaccaaggcctcactgcctggttcctggagctcctgattcctgggagaggaatgcacgggccttcagtgtgcagactgcaagcacagccacggattcccagaagtctcagcagggttggccagactccgtgaggtccccactctacttgggtggagggtcccctctgtgctcactcagggccctcacctttctccttgtagggcctaatcccacccttttgctggcttgagaatctctcatgtcaagaactcacatccctgatatggtacagaaggagatgaggggacccacatctggccatacgtgaccaggtcctcccgcgaaggacaacgagagatgtccaaattcattggagtccaggtgtcctgggtgacgagtccgcttggtcctcacgtccactcctggcagggcctgagaccctccctctactgacctgactccagccccttcagaccaaggcctccccttccctgacatcaaagatcccaggataatggagggacttcagctgacagccctgcccagggtctctgaagtaaccgcaggggcagggcagatttctatggggccccctgtctgcattctggcccaggagtaccctcaatcctacctcaggctctccacctggatgcttggcagatcctagaaccactgcatctgtcgaccagatgggggcccctgtgttgacctgagtcaccttctgaaaacaaggtcatcaactccctgagatctggaaacagaagtgaggaggggccacatcctgttacccccacgtgcgttgtccagggctgacccctttggttctagggtgaacgttatgatggcctcctgtgggttactcatctttactcctgccagggactgccctttctcaacccccaaccccctgaaatgagcagacagctcctctttacaccaacaccttatctccctgagggttccccaacctcctgcctgtggtacaaatgagattgtcacttagggccatccctgatcaggttcccccagagctaagaacaagggacggccagactctgtggcatcccttctttctgggccgggggtatccccagtcctcatgaagggggcacaccttgggtccggcagatcctgggattcctccctctgctgacctgaagtcccagccctcagaccacagccctcaactctctgtcaccctgaaggtgcaatgagcacggggcacattcggccactgtgcccaggatcccccagcccaaggttgccactgatctggactccaaggtcccctcagtcctccctcttcttcctccccttgactcctcgcagggctgggccccaaccccctgctgaagtgggtctgcatccctaggattcccgcggctgaatgaaaaggtggctcagtttgagacaggggtacagtgggccccctgtcctggcatgctgggtcccctaaggactccactgtcttccaggagggcctgggcccttcctctgcatcccaaaggccatactcacgagacccaaccccttccctcccttagccgtacatgtgaacgtcaggatccgcgtgcttggccgccattcccggagcttccgtgggttgattgcaggggcaaagcccggattctgccaggatggtggtgggggaggagatgggaatggggtttgggggtggggttggtgtttgagggatgggggtggggttggtgttgggggatgggattggtagtgagggtagggggtgggttgccctcagtcccctcttggggtcctgaccttgattcctggctgagtctgggccctgagcactt

SEQ ID NO: 1563813 - DNA, 4001 bp, Homo sapiens
gcatgtgagagacctcagctgagtactgaatggaaccttggaggctctaacaaaggcttacttacagatcttctccttcagtgctcctccgggggcctctggtcctccaggtcagcctgtcccctcagaacctgaaggaggaagtgagagggcacctcagggtacatccggccagcgcatgctgaggctgcaggactgaaagtattgagggtgaggccaggcgctctggagtccatgtgttctggggcaggtggggcccttggtttgaatccaaggcaaaccttcaccgttggcactatctgagccccctctactctgtgacctgaggacactgcctcagaccaagtcctcactgccttgttcctggagctcctgattcctgggagaggaatccacgggcccccaatgtgcagacagcaaacgcagccacggattcccagaactgtcaggagggttggccagactctgtgaggtccccactctactggggtggaggatcccctctgtgctcactcagggccctcacctttctccttatagggcctaatccctcccttctgctggcctgagaatctctcatgtcaagaactcacatacctgatatggtacagaaaaacatgaggggacccacatctggccatacattcccaggtcctcccggaaaggacaacgagagatgtccaaatttattgaagtccatgtaccctgggtgaggagactgcttggtcctcacctccactcctagtagggtctgagagcctccctctactgccctgagtgcagccccctcagaccaaggcttccccttccctgacatcagtgatcctaggataatggagggacctcagctgacagccctgcccaggctctctgaggtaacagcaggagcagggcagatttttatggggcccccagtccgcattctgtcccaggggtaccctcaatcctccctcagtctcttcacctggatgcttggcagatcctaggaccactgcatctgtccaccacataggggccccttgggggtacaccttgggccctgcagatcctgggattcctccctctgctgacctgaagtcccactcttcagaccacagccctcaactctctggtcaccctgaaggcgcaatgagcacagagcacatttggccactgtgcccagcatcccccagcccaaggttgccactgatctggactccaaggtcccctcagtcctccctcttcttcctccccatgactcctcgcagggctgggccccaaccccctgctgaagtgggtctgcatccctaggattcccgtagccgaatgaaaaggtgcctcggtttgagacaggggtacagtgggccccctgtcctggcatgctgggtcccctcaggactccactgtcttccaggagggcctgggccctttcgctgcctcccaacggccatactcgcgataccgaaccccttccctcccttagccgtagatgtgaacctcaggactcacgtgcctggccgccattcccggagcttccgtgacttgataccaggggcaaagcccggattctgccaggataggggtgggggtggggatgggaatggggaatgggggatgggggtggggttggtgttgggggacgggaatggtggtgagggtggtggttaggctgccctcagttccctctcggggtcctgaccttgattcctgccacagcgtgggccctgacctcttctaaccagccctgccctggccacattaagctctgtccccagagttccccgtggctaaagcggcgggggtcggcggggtgaggtagtggcgacccagcctggaagtcttcccctgcggggtggcccaggcccggcagcagaggcagcactggattatttgaggccctctgtctgaggtgaggcccgcctcagtcctccctcagcgtcttaccttgcctcctcaccgagcctgggccggcttccctccgccgacgtcaggccgtcgctcgttgctcagggcgagaatctcgcggtcttctgacctccaatgcgcaagtcagtggcgtcacatcctggcaacggtactaccctgggttccgggcaggggtggaactggattctgcctggatggggatcggatgggggtggaggtaagcatgaagatggtgatggggcaaggggtaaggattgggacgggggtcctgaggctgtagatcctggtggggtcgggggagttgggggtgggtgggcggggccttcggtcatccctcagggtcctgaagttgatgcctggctgagcctggaccgccatcctctgcagattgcttctgctcccctcagaccaagtctctgactctgagtccccctgaagtggcattgggggaaggggtgtggtctgggtgacatcactgcctgcgtttaccagggctgacaagaggggctgagctggattctgtggtccctctatggtgtgtggggtgggggggcggtgtggaccctcagtcctcactcaggagggtcgtcttcgtcacctctggctgttggatgaagtgatgggcaggagatgctctgtttctgtcacctgtgagcatttgcacagctgcaccccttgtagagaatgcctgcgggtcccaggccaggtgctccctgcagggcggggcggcagctcccgcggttgtagtgacctcctatttcagtctttgtgttctgttgaaagaattttttttttttaaaaatgtaattcctctgccactatggtggtttcaggttgttattagcagaactctggagtcatactgccttaaccaaccaaattttcctggtgtcctgctattacctagggctcttggcatcgtgttttcagaggctgcctcagattgtgcaaagaagtgaagtggaaaatttcaaacttttattctacccattctgtcatctaccgtgtaggccggctacaaacctccccaacatccctgctgctaaccccctccaaccaacactgcaagtgtcaaacacaagtaccagctcaacacagccttgagtctcaccctgggctttccctgttttgttgcgtagattttgttgctgatactggttttttatttactgtttccattctgtaattttccaggtttgatttgggaagcagagcacagcagcccaaatttgttgtaatggcggcggctacaggtaaggcactaaattgtaaataatttaagctgagtttacatttttacagtgttgtgctccccatgaatgaatatgttatactcctctatgtatttcaagcttttttttacctgaatatgtcagtatacttcgacagttgtctctataaagaccttatacatttttattagacttcttttcaggcaattcatgaattttgttgctattgcaaatggcatattgtctattaattgttgtagttagttattgctttcgtgaggtgaagattttgattttgctgtagtaatctgttgcactcctcgttctgaaggccgatgcacttgaatattccacataccttttcctttgaattttcaagatcgataatggtattatcactaaacattacatattcttccagtattcataccacttactcattttggtacttatagctctttgtgtctcaatcctgatttcaatcgtagagataatagcctacatctacttctcgttcctgacgtgaatgataattattcgaacgttttgcatttaagtatgtttgctgttgattttaggaagtgcaatttctctttgaatataggttaaatactttttttttttttaccatgaactcatattaaatttctttaaaaagctttttctgtacccgttgacacaatcaaatttttttctcctccattttgtatgtaaggaattacaatgaaaccgttttttttttttcccctaatgttaaaccgtatgttatttccttgggcagagcctgtttatttaatatgctagtaatttacgtaggatatttgctgctatgtaagggagcttacttaatgtgtgctttttttc

SEQ ID NO: 1563814 - DNA, 4001 bp, Homo sapiens
tctctctaacccccaatgcgcaagtcagtggcatcacatccgggcacctgggactttcttgggttgaaagcggaagcggaaacccgattcagcgtggaagggggtgggaggggtgaggtcggtggagggggcgggtttttgggggtgggttgaaagcggaagcgcaacccaattcagcatccatgggggtgggaggggtgaggttggtggaggggccccagtttttggggtgggagatggcggtgtgagagaggtgcggggttgaggataggagtgctggtgggggataggggcgcggatgggtttgggagtgcaaatagtaatgggaaaggggaggcggtgggggatagaaataggggtggggtacgcttggccctctcttagggtcctgaggttgatgcctcgtagagcctgccctcactagtcttacactaaccaccccaagctcggactccagagtcccatgcgacttcagacgcagtggggtggagggcgccccagactcagaagtccgcccacgggtggcccacggctggtagcaggagtggtgcgggattatttggggtcgtctatctggggtgggggcctcctgagtcctccctcagcgtctcaccttgactcctcacagggcctggcccgcttccctccgccaatcccaagctgctggtcagacagagcagctcgcttctctctaacccccaatgcgcaagtcagtggcatcacatccgggcccctggggctttcttgggttgaaagaggaagcggaaatcagattcagcgtggatgggggtgggaggggtgaggtcgatggagggggcgggtttttgggggtgggttgaaagcggaagcggaacgtgattcagtgtggatgggggtgggaggggtgaggttggtagaagggcccgggttgttggggtgggagatggcggtatgagagaggtggggggttgaagaggagaggagtgctggtgggggatgggggcgtggatggtttgggagtgcaaatggtaatcggaaaggggacgtggtgggggatgggaataggggtggggtacgcttagccctctcttagggtgctgaggtccatgcctggcagagcctgccctcactagtcttacactaatcaacccaagctctgactccagagtcccctgcaacttcagaggcagtggggtggtgggcgccccagactcagaagtccgcccacgggtggcccacggctggtagcaggagtggtgcgggattatttggggtcatctatctggggtgggggcctcctgagtcctccctcagcgtctcaccttgactcctcacagggcctggcccgcttccctccgccaatcccaagctgctggtcagacagagcagctcgcttctctctaacccccaatgcgcaagtcagtggcatcacatccgggcccctggggctttcttgggttgaaagagggagcgcaacccgattcagcgtggatgggggtgggaggggtgaggtcggtggagggggcgggtttttgggggtgggagatggcggtatgaaggtggtggggtgtttgggaggatggggagctggtggaggatgggagtgtagatgggtttgtgagtgcgaatgggaatgggaaggggttaggggatgggaatggggttgcgggatgggaatagcggtgtggtacgctcagctggcttttagggtcctgaggttgatgcctggcagagcctgcccccaccagtcttgcactgatcaccccaagctctgacttcagaatcccctgaggcttaagtggcagtggggtggtggcccccccaccacagactgagaagtctccaggagtggcccagggctggcagcaggggtggtgttggattttttgtggtcgtctatgtggggtgggggtcctcctgagtcctccctcagcatctcaccttgtctccttatagagcctgggcgggcttccctccgccagtctcaagctgcgagtcagacgcagaagctcgcttgtctctaacccccagtgcgcaagtcagtggcatcacatccgggcagctggggctttccttggttgaaagcgggggcggaaccggggatcctgcctggatgggggtatgggtgttggggggtgggggtgcaggtgtggggtgggggatgagggtgcgggggttgaattggggatgggggtatgagggtggcacggggttggggaggatggggtgctggtaggggatgagggtgtggattgggttaggagtgtggaagggaatgggaatggggtgggggataggaatgggggtggggaaccctcagctctctcttagggtcctgactttgacgcctggcacagcctgcccccaccttgcctcctcacagagcctgcgcctgcttccctccgtggatctcgagttgctggtcagaccaatgcgcaagtcagggatgtcacatccgggccacctgggttgacagcaggggtggaaccggattcggccagggtgggagttggggtgggggaggaggcgagaggtcctggggttaggggttgaggtaggcgtgcccctcagtcctttgattcctggcatagcctggacccctgttctctgcggatggtgtctgctcccctcagaccaaggttctgactcctagtcccctgaggtcacagtggggggagaggtgtccttgggcgacaaagccgctggggtcttccagggctgacaggagggactaagctggattctgtggcccctctttgagcgggggtttaccctcagtcttcactcaggagggtcctcttcctgggtcctggctctttgttgaagtgatgggttggagatgctctttttctctcacctctgagcatttgcccagctgtaccccttgcagaaaatggctgcgggtaccaggcgaggtgttccctgggtggctgcagcacccgttattgtagtgacctctgtgagaagatgcacgccttcccacgggggctcctccccagccagagctggactttggaaaccttttttcctcaaagaaatatattttacatatcttccaaggatatatataggtagcaacatatatatttatttctatgaaagaatacctacccttagtttgcatgattcactctgataccctattcaacttctattccattgtttatgttctgttaaaataattcttttcgagaccagcctggccaacagggtgaaacactgtcttcactaaatatagaaaaaaaattaaaaaattagctgggcgtggtggtgggcgcctataatcccagctacttgggaggctgaggcaggagaatcgcttgaacctggtaggcggaggttgcagtgagccaagatcgagtcattgcactccagcccgggcgacagtctcaataataataataataataatattaataataataataataataatgctaatcctcatccactaagttggtttcaggttgtaattagcagatctccggaaccatactgccttaaccaacccaattttcctgctgtcctgctattaccctagggttactggaatcgtgttttgaggtgctgcctcagattgtgcagtgcagtgaggtggagattttaaaatgttcatcctattcattctgtcatctgacgtctaggcaggctatagacttcaacatccctgcagccaacccccctccaactgacaccgccccaaacataagtaccagttcaacacagtcctcagtctcacccaggactttctgtgttttgttgcttagattttattgcttatattgttgttttttctttctttctttttctcttctataattttccagagttgatttgggaaccagagaacagcagcctaagtgtgactgtaatttttggcagctacaggtaagacactaaattgtaaatcatttaagcagaattgacatttttacaatgttctgctcctgatcaatgaataggttatgctcctttacttatttcaaactccttttacctgaatctgtcagtatactttgata

SEQ ID NO: 1563815 - DNA, 4001 bp, Homo sapiens
gggcccctggggctttcttgggttgaaagagaaaccagaaatcagattcagcgtggatgggggtgggaagggtgaggtcggtggagggggcgggtttttgggggtgggttgaaagcggaagcggaacgtgattcagtgtggatgggggtgggaggggtgaggttggtacaagggcccgggttgttggggtgggagatggcggtatgagagaggtggggggttgaagaggagaggagtgctggtgggggatggggcgtggatggtttgggagtgcaaatggtaatgggaaaggggacgtggtgggggatgggaataggggtggggtacgcttagccctctcttagggtcctgagattgatgcccggcagagcctggcctcactagtcttacactaaacaccccaagctctgactccagagtcccatgcgacttcagaggcagtggggtggtgggcgccccaagctcagaagtccgcccacaggtggcccacggcaggtaggagtggtgcgggattatttggggtcgtctatctggggtggtggcctcctgagtcctcctcagcgtctcaccttgactcctcacagggcctggcctgcttccttccaccaatcccaagctgctggtcagacagcagctcgcttctctctaacccccaatgcgcaagtcagtggcatcacatccgggcccctgaggctttcttgggttgaaagcggaagcggaaacacgattcagcgtggatgggggtgggggggaggtcggtggagggggcgggtttttgggagtgggttgaaagcggaagcggaacccgattcagcgtggatgggggtgggaggggtgaggttggtggaggggccccggtttttggggtggcagatggcggtatgacagaggtggggggtcgaggaggagtgctggtgggggatgggggcggggatgggtttaggagtgcaaatggtaatgggaaaggggacgtggtgggggatgggaataggggtggggtacgcttagccctctcttagggtcctgagattgatgcccggcagagcctggcctcactagtcttacactaaacaccccaagctctgactccagagtcccctgcgacttcagaggcagtggggtggtgggcgccccaagctcagaagtccgcccacaggtggcccacggctggtaggagtggtgcgggattatttggggtcttctatctggggtggtggcctcctgagtcctcctcagcgtctcaccttgactcctcacagggcctggcctgcttccttccaccaatcccaagctgctggtcagacagcagctcgcttctctctaacccccaatgcgcaagtcagtggcatcacatccgggcccctgaggctttcttgggttgaaagcggaagcggaaacacgattcagcgtggatgggggtgggggggaggtcggtggagggggcgggtttttgggagtgggttgaaagcggaagcggaacccgattcagcgtggatgggggtgggaggggtgaggttggtggaggggccccggtttttggggtggcagatggcggtatgacagaggtggggggtcgaggaggagtgctggtgggggatgggggcgcggatgggtttaggagtgcaaatggtaatgggaaaggggacgtgatgggggatgggaataggggtggggtacgcttagccctctcttacggtcctgagattgatgcctggcagagcctggcctcactagtcttacactaaacaccctaagctctgactccagagtcctctgcgacttcagaggcagtggggtggtgggcgccccagactcagaagtccgcccacaggtggcccacggctggtagcaggagtggtgcgggattatttggggtcgtctatctggggtgggggcctcctgagtcctccctcagcatctcaccttgactcctcacagggcctggcccgcttccctccgccaatcccaagcggctggtcagagcagctcgcttctctctaacccccaatgcgcaagtcagtggcatcacatccgggcacctgggactttcttgggttgaaagcggaagcggaaacccgattcagcgtggaagggggtgggaggggtgaggtcggtggagggggcgggtttttgggggtgggttgaaagcggaagcgcaacccaattcagcatccatgggggtgggaggggtgaggttggtggaggggccccagtttttggggtgggagatggcggtgtgagagaggtgcggggttgaggataggagtgctggtgggggataggggcgcggatgggtttgggagtgcaaatagtaatgggaaaggggaggcggtgggggatagaaataggggtggggtacgcttggccctctcttagggtcctgaggttgatgcctcgtagagcctgccctcactagtcttacactaaccaccccaagctcggactccagagtcccatgcgacttcagacgcagtggggtggagggcgccccagactcagaagtccgcccacgggtggcccacggctggtagcaggagtggtgcgggattatttggggtcgtctatctggggtgggggcctcctgagtcctccctcagcgtctcaccttgactcctcacagggcctggcccgcttccctccgccaatcccaagctgctggtcagacagagcagctcgcttctctctaacccccaatgcgcaagtcagtggcatcacatccgggcccctggggctttcttgggttgaaagaggaagcggaaatcagattcagcgtggatgggggtgggaggggtgaggtcgatggagggggcgggtttttgggggtgggttgaaagcggaagcggaacgtgattcagtgtggatgggggtgggaggggtgaggttggtacaagggcccgggttgttggggtgggagatggcgatatgagagaggtggggggttgaagaggagaggagtgctggtgggggatggggcgtggatggtttgggagtgcaaatggtaatgggaaaggggacgtggtgggggatgggaataggggtggggtacgcttagccctctcttagggtcctgagattgatgcccggcagagcctggcctcactagtcttacactaaacaccccaagctctgactccagagtcccctgcgacttcagaggcagtggggtggtgggcgccccaagctcagaagtccgcccacaggtggcccacggcaggtaggagtggtgcaggattatttggggtcgtctatctggggtggtggcctcctgagtcctcctcagcgtctcaccttgactcctcacagggcctggcctgcttccttccaccaatcccaagctgctggtcagacagcagctcgcttctctctaacccccaatgcgcaagtcagtggcatcacatccgggcccctgaggctttcttgggttgaaagcggaagcggaaacacgattcagcgtggatgggggtgggggggaggtcggtggagggggcgggtttttgggagtgggttgaaagcggaagcggaacccgattcagcgtggatgggggtgggaggggtgaggttggtggaggggccccggtttttggggtggcagatggcggtatgacagaggtggggggtcgaggaggagtgctggtgggggatgggggcgcggatgggtttaggagtgcaaatggtaatgggaaaggggacgtgatgggggatgggaataggggtggggtacgcttagccctctcttacggtcctgagattgatgcctggcagagcctggcctcactagtcttacactaaacaccctaagctctgactccagagtcctctgcgacttcagaggcagtggggtggtgggcgccccagactcagaagtccgcccacaggtggcccacggctggtagcaggagtggtgcgggattatttggggtcgtctatctggggtgggggcctcctgagtcctccctcagcatctcaccttgactcctcacagggcctggcccgcttccctc

SEQ ID NO: 1563816 - DNA, 4001 bp, Homo sapiens
actatgccacctcacagagcctggaccggcttccctctgccaatcccaagctgcctgtcagactgagaagctagcgtctctctaacccccaatgcacaagtcactggcatcacatccaggaacctggagcttccctgggttgaaagcagaaacggaatgcgattcaacctggatggggatagtggtgttggggtgggggatgaggacataagggtagtgggggtttggggaggataggggtgctggtgggggatagggtgtagatggggttgggagtgtggatgggaatgggaagggggatgggaatgggggtgggggaccctcggccctctcttacagtcctgaggttgatgcctggcagagcctgccctcaccagtcttgcactgatcaccccaagctctgactgcagagtcccgtgcgacttcagaggcagtggggtggtgggcgccccagactcagaagtccccccacgagtggcccagggctgggagcatgagtggttcgggattatttgggattgtctatctgcggtgggggcctcctgagtcctccctcagcgtctcaccttgactcctcacagggcctggcccgcttccctccaccagtcccaagctgctggtcagacagagcagctcgcttttctctaacccccaatgcgcaagtcagtggcatcacattccggcacctgcggctttcttgggttgaaagcggaagcagaacccgattcagcgtggatgggggtgggaggagtgaggtcggtggagggggcgcgttttgggggtgggttgaaagcggaagcagaacctgattcagtgtggatgggggtgggagaggtgaggttggtggaggggcccgggttttggggtgggagatggtggtgtgagagaggtgcggggttgaggaggataggagcctggtgggggatgggggcgcggatgggtttgggagtgcaaatagtaatgggaaaggggagggggtgggggatgggaatgggggtggggtacgcttagccctctcttagggtcctgaggttgatgcctcgtagagcctgccctcactagtcttacactaaccaccccaagctcggactccagagtcccatgtgacttcagacgcagtggggtggagggcgccccagactcagaagtcagcccacgggtggcccacggctggtagcaggagtggtgcgggattatttggggtcgtctatctggggtgggggcctcctgagtcctccctcagcgtctcaccttgactcctcacagggcctggcccgcttccctccaccaatcccaagcggctggtcacagagcagctcgcttctctctaaccccgaatgcgcaagtcagtggcatcacatccgggcccctggggctttcttgggttgaaagagaaaccagaaatcagattcagcgtggatgggggtgggaagggtgaggtcggtggagggggcgggtttttgggggtgggttgaaagcggaagcggaacgtgattcagtgtggatgggggtgggaggggtgaggttggtacaagggcccgggttgttggggtgggagatggcggtatgagagaggtggggggttgaagaggagaggagtgctggtgggggatggggcgtggatggtttgggagtgcaaatggtaatgggaaaggggacgtggtgggggatgggaataggggtggggtacgcttagccctctcttagggtcctgagattgatgcccggcagagcctggcctcactagtcttacactaaacaccccaagctctgactccagagtcccatgcgacttcagaggcagtggggtggtgggcgccccaagctcagaagtccgcccacaggtggcccacggcaggtaggagtggtgcgggattatttggggtcgtctatctggggtggtggcctcctgagtcctcctcagcgtctcaccttgactcctcacagggcctggcctgcttccttccaccaatcccaagctgctggtcagacagcagctcgcttctctctaacccccaatgcgcaagtcagtggcatcacatccgggcccctgaggctttcttgggttgaaagcggaagcggaaacacgattcagcgtggatgggggtgggggggaggtcggtggagggggcgggtttttgggagtgggttgaaagcggaagcggaacccgattcagcgtggatgggggtgggaggggtgaggttggtggaggggccccggtttttggggtggcagatggcggtatgacagaggtggggggtcgaggaggagtgctggtgggggatgggggcggggatgggtttaggagtgcaaatggtaatgggaaaggggacgtggtgggggatgggaataggggtggggtacgcttagccctctcttagggtcctgagattgatgcccggcagagcctggcctcactagtcttacactaaacaccccaagctctgactccagagtcccctgcgacttcagaggcagtggggtggtgggcgccccaagctcagaagtccgcccacaggtggcccacggctggtaggagtggtgcgggattatttggggtcttctatctggggtggtggcctcctgagtcctcctcagcgtctcaccttgactcctcacagggcctggcctgcttccttccaccaatcccaagctgctggtcagacagcagctcgcttctctctaacccccaatgcgcaagtcagtggcatcacatccgggcccctgaggctttcttgggttgaaagcggaagcggaaacacgattcagcgtggatgggggtgggggggaggtcggtggagggggcgggtttttgggagtgggttgaaagcggaagcggaacccgattcagcgtggatgggggtgggaggggtgaggttggtggaggggccccggtttttggggtggcagatggcggtatgacagaggtggggggtcgaggaggagtgctggtgggggatgggggcgcggatgggtttaggagtgcaaatggtaatgggaaaggggacgtgatgggggatgggaataggggtggggtacgcttagccctctcttacggtcctgagattgatgcctggcagagcctggcctcactagtcttacactaaacaccctaagctctgactccagagtcctctgcgacttcagaggcagtggggtggtgggcgccccagactcagaagtccgcccacaggtggcccacggctggtagcaggagtggtgcgggattatttggggtcgtctatctggggtgggggcctcctgagtcctccctcagcatctcaccttgactcctcacagggcctggcccgcttccctccgccaatcccaagcggctggtcagagcagctcgcttctctctaacccccaatgcgcaagtcagtggcatcacatccgggcacctgggactttcttgggttgaaagcggaagcggaaacccgattcagcgtggaagggggtgggaggggtgaggtcggtggagggggcgggtttttgggggtgggttgaaagcggaagcgcaacccaattcagcatccatgggggtgggaggggtgaggttggtggaggggccccagtttttggggtgggagatggcggtgtgagagaggtgcggggttgaggataggagtgctggtgggggataggggcgcggatgggtttgggagtgcaaatagtaatgggaaaggggaggcggtgggggatagaaataggggtggggtacgcttggccctctcttagggtcctgaggttgatgcctcgtagagcctgccctcactagtcttacactaaccaccccaagctcggactccagagtcccatgcgacttcagacgcagtggggtggagggcgccccagactcagaagtccgcccacgggtggcccacggctggtagcaggagtggtgcgggattatttggggtcgtctatctggggtgggggcctcctgagtcctccctcagcgtctcaccttgactcctcacagggcctggcccgcttccct

SEQ ID NO: 1563817 - DNA, 4001 bp, Homo sapiens
tgaggctttcttgggttgaaagcggaagcggaaacacgattcagcgtggatgggggtgggggggaggtcggtggagggggcgggtttttgggagtgggttgaaagcggaagcggaacccgattcagcgtggatgggggtgggaggggtgaggttggtggaggggccccggtttttggggtggcagatggcggtatgacagaggtggggggtcgaggaggagtgctggtgggggatgggggcggggatgggtttaggagtgcaaatggtaatgggaaaggggacgtggtgggggatgggaataggggtggggtacgcttagccctctcttagggtcctgagattgatgcccggcagagcctggcctcactagtcttacactaaacaccccaagctctgactccagagtcccctgcgacttcagaggcagtggggtggtgggcgccccaagctcagaagtccgcccacaggtggcccacggctggtaggagtggtgcgggattatttggggtcttctatctggggtggtggcctcctgagtcctcctcagcgtctcaccttgactcctcacagggcctggcctgcttccttccaccaatcccaagctgctggtcagacagcagctcgcttctctctaacccccaatgcgcaagtcagtggcatcacatccgggcccctgaggctttcttgggttgaaagcggaagcggaaacacgattcagcgtggatgggggtgggggggaggtcggtggagggggcgggtttttgggagtgggttgaaagcggaagcggaacccgattcagcgtggatgggggtgggaggggtgaggttggtggaggggccccggtttttggggtggcagatggcggtatgacagaggtggggggtcgaggaggagtgctggtgggggatgggggcgcggatgggtttaggagtgcaaatggtaatgggaaaggggacgtgatgggggatgggaataggggtggggtacgcttagccctctcttacggtcctgagattgatgcctggcagagcctggcctcactagtcttacactaaacaccctaagctctgactccagagtcctctgcgacttcagaggcagtggggtggtgggcgccccagactcagaagtccgcccacaggtggcccacggctggtagcaggagtggtgcgggattatttggggtcgtctatctggggtgggggcctcctgagtcctccctcagcatctcaccttgactcctcacagggcctggcccgcttccctccgccaatcccaagcggctggtcagagcagctcgcttctctctaacccccaatgcgcaagtcagtggcatcacatccgggcacctgggactttcttgggttgaaagcggaagcggaaacccgattcagcgtggaagggggtgggaggggtgaggtcggtggagggggcgggtttttgggggtgggttgaaagcggaagcgcaacccaattcagcatccatgggggtgggaggggtgaggttggtggaggggccccagtttttggggtgggagatggcggtgtgagagaggtgcggggttgaggataggagtgctggtgggggataggggcgcggatgggtttgggagtgcaaatagtaatgggaaaggggaggcggtgggggatagaaataggggtggggtacgcttggccctctcttagggtcctgaggttgatgcctcgtagagcctgccctcactagtcttacactaaccaccccaagctcggactccagagtcccatgcgacttcagacgcagtggggtggagggcgccccagactcagaagtccgcccacgggtggcccacggctggtagcaggagtggtgcgggattatttggggtcgtctatctggggtgggggcctcctgagtcctccctcagcgtctcaccttgactcctcacagggcctggcccgcttccctccgccaatcccaagctgctggtcagacagagcagctcgcttctctctaacccccaatgcgcaagtcagtggcatcacatccgggcccctggggctttcttgggttgaaagaggaagcggaaatcagattcagcgtggatgggggtgggaggggtgaggtcgatggagggggcgggtttttgggggtgggttgaaagcggaagcggaacgtgattcagtgtggatgggggtgggaggggtgaggttggtacaagggcccgggttgttggggtgggagatggcgatatgagagaggtggggggttgaagaggagaggagtgctggtgggggatggggcgtggatggtttgggagtgcaaatggtaatgggaaaggggacgtggtgggggatgggaataggggtggggtacgcttagccctctcttagggtcctgagattgatgcccggcagagcctggcctcactagtcttacactaaacaccccaagctctgactccagagtcccctgcgacttcagaggcagtggggtggtgggcgccccaagctcagaagtccgcccacaggtggcccacggcaggtaggagtggtgcaggattatttggggtcgtctatctggggtggtggcctcctgagtcctcctcagcgtctcaccttgactcctcacagggcctggcctgcttccttccaccaatcccaagctgctggtcagacagcagctcgcttctctctaacccccaatgcgcaagtcagtggcatcacatccgggcccctgaggctttcttgggttgaaagcggaagcggaaacacgattcagcgtggatgggggtgggggggaggtcggtggagggggcgggtttttgggagtgggttgaaagcggaagcggaacccgattcagcgtggatgggggtgggaggggtgaggttggtggaggggccccggtttttggggtggcagatggcggtatgacagaggtggggggtcgaggaggagtgctggtgggggatgggggcgcggatgggtttaggagtgcaaatggtaatgggaaaggggacgtgatgggggatgggaataggggtggggtacgcttagccctctcttacggtcctgagattgatgcctggcagagcctggcctcactagtcttacactaaacaccctaagctctgactccagagtcctctgcgacttcagaggcagtggggtggtgggcgccccagactcagaagtccgcccacaggtggcccacggctggtagcaggagtggtgcgggattatttggggtcgtctatctggggtgggggcctcctgagtcctccctcagcatctcaccttgactcctcacagggcctggcccgcttccctccgccaatcccaagcggctggtcagagcagctcgcttctctctaacccccaatgcgcaagtcagtggcatcacatccgggcacctgggactttcttgggttgaaagcggaagcggaaacccgattcagcgtggaagggggtgggaggggtgaggtcggtggagggggcgggtttttgggggtgggttgaaagcggaagcgcaacccaattcagcatccatgggggtgggaggggtgaggttggtggaggggccccagtttttggggtgggagatggcggtgtgagagaggtgcggggttgaggataggagtgctggtgggggataggggcgcggatgggtttgggagtgcaaatagtaatgggaaaggggaggcggtgggggatagaaataggggtggggtacgcttggccctctcttagggtcctgaggttgatgcctcgtagagcctgccctcactagtcttacactaaccaccccaagctcggactccagagtcccatgcgacttcagacgcagtggggtggagggcgccccagactcagaagtccgcccacgggtggcccacggctggtagcaggagtggtgcgggattatttggggtcgtctatctggggtgggggcctcctgagtcctccctcagcgtctcaccttgactcctcacagggcctggcccgcttccctccgccaa

SEQ ID NO: 1563818 - DNA, 4001 bp, Homo sapiens
ctgcatctcctctgctctgtgacctgagggcacggcctcagaccaaggcctcagtgtctgtttcctggagctcctggaagaggaatgcatgggccctcagggtgcagactgcaagcacagcctcaggcccccagtgctaacaggagggtaggctggaatctgtgaggtctccaccctcttggggtgaatggtcccctctgtgctcacacagggccctcacctttctcctggcaaggcctggatcccacccttttgctggcctgagaaactcagattaagagctcacatccctgatagggaacaggacatgaggagactcacatctggccacacgtgcccaggtcctcttgggaaggacaggaagagatgctgaaatgcattggaattcatgtgtcctgggtgaggaacctgcttcgttcttaccttgtctcctggcagggcctaagacgctccctctactgacctgagtgcagacccctcgacaaagacctccccatccctgacaccaatgatcccagggtaagtcggggggactgcagcagacagccctgcccatgctctctggagtgacagcaggggcagggcagatttccgtgaggtcctcatctgtgttctggcccaagggtgccctcaatcgtccctcatgttcctcaccggaactactgacagatcctgggaccactctgtctatccaccagatgggggcccctgtgttgacctgagtcatcctcggagaacaagttcctcacctccccgagatctgaaaacaggaatgagatggagctacatcctgtcacccccacatggggtgtccaggtatgacccctttggttctggggtgagtgtttctatggcctcctgtgggttactcttcatcgtgatggggcctgccattcctcaacctgaaaccccctgagatgagcagatagctcccctttactgcaagaccccatcaccctgagggctcttcaacttctttcctgtggcacaaatgaggttggcacatagggctatccttgatttggtcccctctgagcaaaaatcaggggacagccagactctgtggggtcccttctttctgagccaaggtatccccaatcttcatgaatggggcacacattggggcctgcagatgctgggactcctccctctgctgacctgagtcaccactgctctgaccacagccctctcctctttgtcacccagaaggtgcagcaagcatgggctacaggtggccactgtgcactggacctcccagggcaaaggtccccattgttctggactcaaaggtaccctgagtcctccctcttcttcctctccttgatcctggcagggttgggccccaccctctgctgacgtgagtctccatccctctgattcccgaggatgaaagaggaggcgcctcagtctcagacagggttggagtggaccccctatcctgaggacctgggttccctgaggcctccctttactcccagcagggcttgaggagcagagactcccctgaggccctgctcatgatactaagccctttccctccttcagccctggatgtggacgtcagaatgggtgtgcctgtctgtcattcctggggcttctgtgggttgactgcagggaaagaaacagattctgccaagatggggtagggtgtggggatggggctgggaatgcaagtagagtgggtatggggttagggatgggtataggggttggggtgggggccctcaattctctctcagggtcctgattttgatgcctgacagagcctggcccctgccctctcctgaccggcccttccctggtcacaccaaggtctgactccagagtcccttgtggcttaagtggcagtggggaggggggaaggtccagcctgagaagtctgccctgggtggtccagggctggcagcaaaggtagtactggattatttggggttctctatctgggtgagggcttcctcattccttcctcgggggtctcaccttgcctcctcacagagcccgggcccattcccctctgctgatctcagtcggcttctcagaaccatgcccttgattctctctgacccgcaatgcacaagtcagcagcatcacatccggccccctagggcttccctgggttgaaatcaggggcagaatcggattctgccaggataggggtgggggatgtgggatagaggtgccggtagggatggggtgggggaatggggggtgtaggtgggggacggaggtagggacaggaatagagtttggcgtgggggtagcctcagctttcccttaggttcctgacgttgtttcctggcagagcctgggagctgtcctctcctaaccagtcctgccctggtcataccaagctctgtctcctgagtcccctgcggcttaagcggtgggggactgggggtggcccagcctaaggagtcctgccctggatggtccagagctagcagcaggagaggtggcactggattatttggggtccactaccaggggtgggatactccttagtcctccctcagcatctcaccttgcatcctcacagagccagggccagctgccctcagctgatctccagctgcccctgagagcgaggcccttgcttctctccgacctcaaatgtgcaagacagtggcaccacatctggtcacccagggattccctgggttgaaagcaggagcagaaccgaattctgccagggtgtgggggggtgggagggtgaggaggagggtcaggggtggggaagatgggaatggtgggagtagggatgaacgtggtggggagtgggcaggatagggtttctggtgggggataggggttctggtgggggatggaggtggggatggggatggaaatggggatggggtgggggatgggaatgggggttgggggccctcagccctcacttagggtcctgatgttgatgcctggcagagcttggccactgccctctcctaaccagccctgccttggtcacacgaagctctgactccagagtcccttgcggcttaagccacaggggctggcagggtgcagggagtggcccagactgagaagtccgcccccaggtggtttagggctggcagcaggagtagtgctggattatttggggccctctatctggggtgggggcctcctgagtcctcccttagagtctcaccttgcctcttcacagagcctggacccacttccctccaccaatctcaagccgccactcagagcgagaacttcgcttctctttgacccccaacgccaagtcagtggtgtcacatccgggcacccggggattccctcggttgaaagcaggggcgaaaccggattctaccagaatgtagggataggggggtgagggtagggtagatgagggtgggggtggggtgggatgagagtagtggggcctggggaggatgggggttctcatgggggatggggttaggagtgtagatggaaatggggatggagtgggggatgggaatgggggtggggggccttcagccctaacttagggtcctgacgttgatgcctggcagagcctgggccctgccctctcttaagcagacctgctgtgactccagagtcccctgcggcttaagtggcagggttggcagggtgctggggggtggccctgactgagaagtttgcccctagatggtccagggctggcagcaggggcgaagctggattatttggggccctctatctggggtgggggcatcctgatccctccctcagccctcaccttgcctcctcacagagcctgggcccacttccctcctccaatcccaagccgcctgtcagaccaagaagctcgcttctctctgacccccaatgcgcaaatcagtggcgtcacatccaggccaggggcttcccggggttgacagcaggggaagacccagattctgccaggatggagctatagaggggtaagggttggggagatgagggtggggatgggggagggatgaagatggtggggactggggaggatgagggtgctgttggggaatggg

SEQ ID NO: 1563819 - DNA, 4001 bp, Homo sapiens
tggggagagagggagcatgtgagagacctcagctgagtactgaatggaaccttggaggctctaacaaaggcttacttacagatcttctccttcagtgctcctccgggggcctctgttcctccacgtcagcctgtcccctcagaacctgaaggaggaagtgagagggcacctcagggtacatccggccagcacatgctgaggctgcaggactgaaagtattgagggtgaggccaggcgctctggagtccatgtgttctggggcaggtggggcccttggtttgaatccaaggcaaaccttcaccgttggcactatctgagccccctctactctgtgacctgaggacactgcctcagaccaagtcctcactgccttgttcctggagctcctgattcctgggagaggaatccacgggcccccaatgtgcagacagcaaacgcagccacggattcccagaactgtcaggagggttggccagactctgtgaggtccccactctactggggtggaggatcccctctgtgctcactcagggccctcacctttctccttataggacctaatccctcccttctgctggcctgagaatctctcatgtcaagaactcacatacctgatatggtacagaaaaacatgaggggacccacatctggccatacattcccaggtcctcccggaaaggacaacgagagatgtccaaatttattgaagtccatgtaccctgggtgaggagactgcttggtcctcacctccactcctagtagggtctgagagcctccctctactgccctgagtgcagtcccctcagaccaaggcttccccttccctgacatcagtgatcctaggataatggagggacctcagctgacagccctgcccaggctctctgaggtaacagcaggagcagggcagatttttatggggcccccagtccgcattctgtcccaggggtaccctcaatcctccctcagtctcttcacctggatgcttggcagatcctaggaccactgcatctgtccaccacataggggccccttgggggtacaccttgggccctgcagatcctgggattcctccctctgctgacctgaagtcccactcttcagaccacagccctcaactctctggtcaccctgaaggcgcaatgagcacagagcacatttggccactgtgcccagcatcccccagcccaaggttgccactgatctggactccaaggtcccctcagtcctccctcttcttcctccccatgactcctcgcagggctgggccccaaccccctgctgaagtgggtctgcatccctaggattcccgtagccgaatgaaaaggtgcctcggtttgagacaggggtacagtgggccccctgtcctggcatgctgggtcccctcaggactccactgtcttccaggagggcctgggccctttcgctgcctcccaacggccatactcgcgataccgaaccccttccctcccttagccgtagatgtgaacctcaggactcacgtgcctggccgccattcccggagcttccgtgacttgataccaggggcaaagcccggattctgccaggataggggtgggggtggggatgggaatggggaatgggggatgggggtggggttggtgttgggggacgggaatggtggtgagggtggtggttaggctgccctcagttccctctcggggtcctgaccttgattcctgccacagcgtgggccctgacctcttctaaccagccctgccctggccacattaagctctgtccccagagttccccgtggctaaagcggcgggggtcggcggggtgaggtagtggcgacccagcctggaagtcttcccctgcggggtggcccaggcccggcagcagaggcagcactggattatttgaggccctctgtctgaggtgaggcccgcctcagtcctccctcagcgtcttaccttgcctcctcaccgagcctgggccggcttccctccgccgacgtcaggccgtcgctcgttgctcagggcgagaatctcgcggtcttctgacctccaatgcgcaagtcagtggcgtcacatcctggcaacggtactaccctgggttccgggcaggggtggaactggattctgcctggatggggatcggatgggggtggaggtaagcatgaagatggtgatggggcaaggggtaaggattgggacgggggtcctgaggctgtagatcctggtggggtcgggggagttgggggtgggtgggcggggccttcggtcatccctcagggtcctgaagttgatgcctggctgagcctggaccgccatcctctgcagattgcttctgctcccctcagaccaagtctctgactctgagtccccctgaagtggcattgggggaaggggtgtggtctgggtgacatcactgcctgcgtttaccagggctgacaagaggggctgagctggattctgtggtccctctatggtgtgtggggtgggggggcggtgtggaccctcagtcctcactcaggagggtcgttttcgtcacctctggctgttggatgaagtgatgggcaggagatgctctgtttctgtcacctgtgagcatttgcacagctgcaccccttgtagagaatgcctgcgggtcccaggccaggtgctccctgcagggcggggcggcagctcccgcggttgtagtgacctcctatttcagtctttgtgttctgttgaaagaatttttttttttaaaaaatgtaattcctctcccactatggtggtttcaggttgttattagcagaactctggagtcatactgccttaaccaaccaaattttcctggtgtcctgctattacctagggctcttggcatcgtgttttcagaggctgcctcagattgtgcaaagaagtgaagtggaaaatttcaaacttttattctacccattctgtcatctaccgtgtaggccggctacaaacctccccaacatccctgctgctaaccccctccaaccaacactgcaagtgtcaaacacaagtaccagctcaacacagccttgagtctcaccctgggctttccctgttttgttgctgatactggttttttatttactgtttccattctgtaattttccaggtttgatttgggaagcagagcacagcagcccaaatttgttgtaatggcggcggctacaggtaaggcactaaattgtaaataatttaagctgagtttacatttttacagtgttgtgctccccatgaatgaatatattatactcctctatgtatttcaaggttttttttacctgaatatgtcagtatacttcgacagttgtctctataaagaccttatacatttttattagacttcttttcaggcaattcatgaattttgttgctattgcaaatggcatattgtctattaattgttgtagttagttattgctttcgtgaggtgaagattttgattttgctgtagtaatctgttgcacacctcgttctgaaggccgatgcacttgaatattccacataccttttcctttgaattttcaagatcgataatggtattatcactaaacattacatattcttccagtattcataccacttactcattttggtacttatagctctttgtgtctcaatcctgatttcaatcgtagagataatagcctacatctacttctcgttcctgacgtgaatgataattattcgaacgttttgcatttaagtatgtttgctgttgattttaggaagtgcaatttctctttgaatataggttaaatacttttttttttttttttaccatgaactcatattaaatttctttaaaaagctttttctgtacccgttgacgcaatcaaatttttttctcctccattttgtatgtaaggaattacaatgaaaccgtttttttttttcccctaatgttaaaccgtatgttatttccttgggcagagcctgtttatttaatatgctagtaatttacgtaggatatttgctgctatgtaagggagcttacttaatgtgtgctttttt

SEQ ID NO: 1563820 - DNA, 4001 bp, Homo sapiens
tgctcatgctctcaggggtgacaaaagaggccgggcagatttctgttgggcccccatctgttttttgcctgctaggagaaccatcgagggtaccctcaatcttccctcagtgttgtcacctagactcttggtagattcttggaccactgagtctgttgcccacatgggggtccctgttttgtcctgagttgccctctgagaacaaggtcctcacttccctgagatctcaagagagaaatgaggagccaccacatctgatgaccactgggtggggtgtccaggggtgacactaggatctgtccctacttgttcttgagtggtgggttctaaggtcttcagggggttattcatctttcccctgatggagcccgcccttcctcaacccacaacaccctgatatgagcagacatctccccttaccaccaagaccttatcttcctgcgtttccccaacttcctgcccacagtacagatgagatctccacttagggccacccttgatcgggttcccccagagataataaccaaagttagccagactttgtggggtcccttctttccaggccaggagtacccccattcatcacaaagtgagcacatcttgggtcctgcagatcctgtgaccccgtccctctgttgaacaggtgtggctccctctgctgagctgaggacgcccttcagacccaggttgctacctccctgagacccaggaggcagaagtaaggaggcactacatggacaaccctgcatgggattcccacggctgacagaagtagtaggtttcatggggtctttctctgtctgggtgtcatccaggtattcatatttactccacgacaaggcatggccctttccttcctgctgaaccgtggatgtgtcttgcatgccaaggccaccatctccttgaggccccctaccagaaagtgggggggccacatcccttccccactgtcctgccttgggtgcccagacctgagagtgggagcaggtttcctaggccatgatgggaggtctgctgagtcctccttaagggctctggggcacctctctccagtgatctgagactccactcctcagaccacagctgtctcctttctgacaccctgaaaatgcagcaaggatgcgccacatgcagccacagatcctgggacttcccaaggctgagatctccactgatctggagtccaaggacccctgagtcctccctcttcttcttctccttgactcctggcagggctgttcaccacccccctgctgacttgagtttcagtccctcggattcctgaggccaaatgtggaggcccctcagtctcagacaggtagggtgggccccctgtcctggggtcctgggtcccctcgggcctcctcatctcccagcatagcctgggccctccctctgctcctcttgagtccgtgctcatgaagcccctttgctgcatcagccccggatgcggacgtcagaatcagcgagcccggccgccatgcccggccgccatgcccggccgccatgcccggccgccatgcccggccgccatgcccggccgccatgcctagggcttcccagggctgacagtaggggcagagatgtgctctgtggagcctcagccctccctcagggtcctgcccttgatgcctggcagaacctgggccctgccctctgctaaccagccctgctctggtcacaccaagctctcactccagattcccctggggcttaagcgcagggctggcgaggggtggcccagccagacaagtctgccccctggtggtccagggctggcagcaggggcggcgctagattattttgggtcctatatgaggggtgggggcctcctcagtcctccctcagggtctcaccttgcctcctcacagaccctgagcccgcttccctcagccgatctcaagccgacccctcagaaccaggccctcgcttctctctgatccccgcggccacgtcagtggcgtcacatccgtccacccagggctcacctgggtggacaacaggggcggaaccggattctagtggggcgggggatgagggaggagcggttcagtcatccctcaaggttctcactttgagatctggcagagcctggagctccgtactctgctgatggtgtctgcttccctcagaccaaggttctgattccgagtcccctgaggtggcagtggggggaagggtgtggtggggggacaaggctgctggggtctttcagggctgacatgagggtctgagctgaattatgtggcccctctatgtggtgtgggtggaccctcagtcctcactcaggagggtcctcttcttgactcttggctcttttaggagatactctgtttctgtcacctctgagcatttgcacagctgcaccccttgcagagaatggctgcgggtcccaggccagattctccctgtgggtttgcagcacctaagattgtagtgacctctgggagaagaggcacaccttcccacgggggctcttccccagctagaagaggattttgcaaaacttttgtactaaatgatttatttttacactgaagaaactgagtagctgcaataaatttgtggaagtcctgagttttgaagttacctaacaattcctattccactttagtgattttcataatttaattcgcattcgtatagtaagaaacgaattttaaatctatgccaattgtatatgtgcattatatttatgtttatatgcataaacacatatgtatgtatatgtttatattatatatgtgtaattatatgaatgtatgtgtatatatctttacatatatttatacatatatgtatgtcgactatacgtacttattttatcaaacaatatctactcatacaatgtgtgattcactcatactattctatttctagttcattatatatatttgattaaaataatagtattttggaaggtagtcctaacctactctttgtttctagttgttattagcagaattctggagccatggtgtctcaatcaatccaattttcctggtgtcctgatattacccctgggctactggcttcgtgttttgaggtgcagactcggatcctacattgatgtggggtggtcctttaaaacttttcctgcaactcaccctgtcgtctgcagtggctgcagacctcctcaacctccctgcctctccaactgcccagaacacaagtaccagttcaacacagttttttccccagggttttctatgttttgttgtttagactttgttgctgatattgttgttttatttttctttttcccttctatatttttacacagttgattttgggagtagagcacagcagcctgggcttgattgtcactttggcagctacaggtaggcattaactgtttatttaatttaagtaagatttacacctttgctgtattctattcctcatcagtgaacatcatatactactccatttatttgggaattttttctctgaatctgtcagcaaacttgtacagttgcttctgtaaatgtcttgcatattttggttaggcttcttcttctttatattttggatttaaatgctgttggggatggtatatttttcattttatgttctaagttgctcatctgtgacaagtctcttgtattcgctgcagtggtctttgtatgctgtcttctgaagtctcttattcatttgaatgttccatgtgtctcttcctttgaattttcttgatggtcatattgtgaaaaatatgatctatttcttttcaatcttcatacctctttttcatcttgatatccatagctctctttttcatttcagcattcactgcagctgtgaacggtagcagtgaaagcatacatcaatgacttgctcctgacgagaatgggaatgcttctaacatttcacattcaagtatgtttcctgtcagttttagaaaattaaagtgccttttaatcttcatttgctaaaaatgttaatttgaaaatatgataaaattcatttcagaggctttttctgtatttttattccttgcatac

SEQ ID NO: 1563821 - DNA, 4001 bp, Homo sapiens
ttagaccctctttgagaaagtgtgtgttgggggtggagggggcacttcccttcctcaccgtcctgcctggggccttccaagactgacggcaggggcaggtttcctaggtctgggatgagaggtctggtgaatccttcctcaggcctctgggactcctccttctgctcacctgaggccccactcctcataccacagccctgttcccattgacacccgatcccaccagccacaatgcaccacatgcggccaccgtgcccgggatcgcccaggccaagatccccactgagctggactccggggtcccctctgtcctccgtcttgttccttccctggtctcctagagggctgggccccacccctctgtggacctgagtctctatctgtcggattcccgaggctgaatgaggaggggcctcggtctcagataggggcggggtgggccccttgtcctggggtactgggtcccctcaggcctcccttgtctcccagcaggacctgggccctccctctgttctcccgcggccacgctaacgataccaagccccttccctcggtcagcccaggatgcagatatcacgatccgcttgcctgaccgccatgcccggaacttcccagggtccactgcaggggcagtgactccctctatggggcctcagccctccctcagggtcctggccctgatgcctggcagagcctggcccctgccctctcttaaccagtcctgccctggtcacaccaagctctgacccagagtcccctggggcttaagtggtggggtggcgaagggtggcccacagcctgagaagtccgcccccggggtggttcagggctggcagcaggggtgctgctggattatttggggccctctatctggggtgggggcgtcctcagtcctccctcagcgtctcatcttgcctcctcacagagcctgggcccgcttccctctgccgatcttcagccaccactcagaaccaagcccttgctactctctgacccccagtgcgcaagtcagaggccttacatccgggcacccggagcttccctgggttgacagcaggagccgaaccggattctgccacgggagacttgggggtggggtggagtggggggggggtgaggatggaggtggggaacctgaggctgtaggtcatggtggtggtggctgggttaggggtgtggaggcgttcagccctccctcagggttctgaccttgatgccagtcagagcctgggcccagcctgatacgcccgaccccgcggggtggtccagggctggcacaggggcggcgctgtattatttggggtcctctatctggggcggggggtcttgagtcctccctcagggtctcaccttgcctcctcacagagcctgggcccgcttccctccaccgatatcgacccgcccctcacagcgaggcccccgctactctctgacccccagtgtgggagtcactggccgtacatccgggcacctggggcttccctgggttgacaacaggggcggaaccagattctgccgcgggagagttgggggggtggggtggagtttggggtggggtggggtggggtggggtggggtgtagagtggagctgaggatggggctggggaacctggggctgtaggtcatggttgggttgggggggcccagcctccctcagggtcctggccttgatgcccggcagagcctgggccctgccctctcctaaccagccctgccctggtcacaccaagctctcactccagagtgcccagcagcttgagcggcggagggagggggtcggcccagcctcacaagtcagccccagatcggcccccgggtggtccagggctgggagcagagacggcacttggttctttcgggtcctctatctggggtggggacatcctcagtcttccctcagcacctcaccttgactcctcacagagcctcggccagcttacctccaccggtatcaagccgcccctcagaaggaggcctctcccttctctctgacccccagtgcgcacgtcagtgacgtcacatccggcccccaagcctggagcttccctgggttgccagtaggggctgaaccgggttctggcggagtaggggtggggatggggataggggccctcagtcatccctcagggggtcctgaccttgatgcctgggtctcgatccccattctctgcccattgggtctgctcctctcggaccaagtctctgactcccagtcacatgaggtggcagtgaggggaggggtgtggtcggggtgacaacattgccagggtcttccagggctgacaggaagggctgagctggattctgtggcccctctatgtggggaggttggaccttcagtcccctctcaggagggttctcctcctggctcctggctctttgatgaagtgatgtgtgggagatgatctgtttatgtcacctttgagcatttgcccagctgcacgcgttgcagagaatggctgcgggtcccaggctagatgctccctggggggctgcagcacctgtgattgtaggacctgtgagagaagatgcacaccatcccatgggggctcctccccagccagagctagactttgcaaaccttttgtcctaaaagatttatttttacacggaagaggctgagcagcagcaagagatttggagaagccatgtgttttgaaggtatcgaacacagcagagtccagattagcgattttcatattttaattctcattcacatggtaataaattttacactgtatgtgtacattatatatggtattgtacattttgtttatatctacgtttatatacatacctgttttagacattatatacatctatgcttatatgtatacatacacgcatatatatctttatatcttatatttacttacatgtatatatctttagctacatattcgtttgtatttctagactttatactatatatatgcacacatattttattaatatctactcatagtatgtggccttcacacatacttactattctattcctagttcattctttatattccattaaaataataattttttggaaggctggtcttctcctactaagtttgtttcaggtggttgttagcagaactctggagccatagtgtctcaatcaactcaaatttcctggtgtcctgatattactccagggctactggcatcagattttgtggtgctgcctcagattgcgcgatgatgtggggtggaatgttaaacactttctcctatccatcctgtaatctgccatctatgcagggtacagacctcctcgatttccctgctgctccctggacccaaaacacaagtactagtttagcacagtcttcagtcatccccagggctttctctgttttgatgggtttttttttttaatcttttccctcctatattttttccggggttgatttggggagcagagcacagcaacctgagcttggttgtcactttggcaatgacagttaaggcactcactctgtatttaatttaagtagcatttacatctttgccatattctgttccccatcaaggaatatggtatacagatccatttacttgagattatttcctgagtctatcagcaactttgcacagttgcttccataaaggtcttgtcaggctcttcttatttacattttggattttaatgctgctgtgaatggtgcattttctattttctattttatatactaagttgcttttgtgtggcaaggctcttgattttgctttaatgaccttctgtatgatgttttctgaagtcttttattcatttgaatattcaatgtgtctattcctttgaattttctatgtagataatcatatagttaacaaatactctatttctttgcagtcttcatatctcattttcatcttgacatccatagctctggctctttttcattttgatattcactgcagatgtaggtggtagtggtgacagcatatgtcaacgacttgtcactgccgtgaatggcagagcttctgacatttcacatttatgtat

SEQ ID NO: 1563822 - DNA, 4001 bp, Homo sapiens
ttagaccctctttgagaaagtgtgtgttgggggtggagggggcacttcccttcctcaccgtcctgcctggggccttccaagactgacggcaggggcaggtttcctaggtctgggatgagaggtctggtgaatccttcctcaggcctctgggactcctccttctgctcacctgaggccccactcctcataccacagccctgttcccattgacacccgatcccaccagccacaatgcaccacatgcggccaccgtgcccgggatcgcccaggccaagatccccactgagctggactccggggtcccctctgtcctccgtcttgttccttccctggtctcctagagggctgggccccacccctctgtggacctgagtctccatctgtcggattcccgaggctgaatgaggaggggcctcggtctcagataggggcggggtgggccccttgtcctggggtactgggtcccctcaggcctcccttgtctcccagcaggacctgggccctccctctgttctcccgcggccacgctaacgataccaagccccttccctcggtcagcccaggatgcagatatcacgatccgcttgcctgaccgccatgcccggaacttcccagggtccactgcaggggcagtgactccctctatggggcctcagccctccctcagggtcctggccctgatgcctggcagagcctggcccctgccctctcttaaccagtcctgccctggtcacaccaagctctgacccagagtcccctggggcttaagtggtggggtggcgaagggtggcccacagcctgagaagtccgcccccggggtggttcagggctggcagcaggggtgctgctggattatttggggccctctatctggagtgggggcgtcctcagtcctccctcagcgtctcatcttgcctcctcacagagcctgggcccgcttccctctgccgatcttcagccaccactcagaaccaagcccttgctactctctgacccccagtgcgcaagtcagaggccttacatccgggcacccggagcttccctgggttgacagcaggagccgaaccggattctgccacgggagacttgggggtggggtggagtgggggggggggtgaggatggaggtggggaacctgaggctgtaggtcatggtggtggtggctgggttaggggtgtggaggcgttcagccctccctcagggttctgaccttgatgccagtcagagcctgggcccagcctgatacgcccgaccccgcggggtggtccagggctggcacaggggcggcgctgtattatttggggtcctctatctggggcggggggtcttgagtcctccctcagggtctcaccttgcctcctcacagagcctgggcccgcttccctccaccgatatcgacccgcccctcacagcgaggcccccgctactctctgacccccagtgtgggagtcactggccgtacatccgggcacctggggcttccctgggttgacaacaggggcggaaccagattctgccgcgggagagttgggggggtggggtggagtttggggtggggtggggtggggtggggtggggtgtagagtggagctgaggatggggctggggaacctggggctgtaggtcatggttgggttgggggggcccagcctccctcagggtcctggccttgatgcccggcagagcctgggccctgccctctcctaaccagccctgccctggtcacaccaagctctcactccagagtgcccagcagcttgagcggcggagggagggggtcggcccagcctcacaagtcagccccagatcggcccccgggtggtccagggctgggagcagagacggcacttggttctttcgggtcctctatctggggtggggacatcctcagtcttccctcagcacctcaccttgactcctcacagagcctcggccagcttacctccaccggtatcaagccgcccctcagaaggaggcctctcccttctctctgacccccagtgcgcacgtcagtgacgtcacatccggcccccaagcctggagcttccctgggttgccagtaggggctgaaccgggttctggcggagtaggggtggggatggggataggggccctcagtcatccctcagggggtcctgaccttgatgcctgggtctcgatccccattctctgcccattgggtctgctcctctcggaccaagtctctgactcccagtcacatgaggtggcagtgaggggaggggtgtggtcggggtgacaacattgccagggtcttccagggctgacaggaagggctgagctggattctgtggcccctctatgtggggaggttggaccttcagtcccctctcaggagggttctcctcctggctcctggctctttgatgaagtgatgtgtgggagatgatctgtttatgtcacctttgagcatttgcccagctgcacgcgttgcagagaatggctgcgggtcccaggctagatgctccctggggggctgcagcacctgtgattgtaggacctgtgagagaagatgcacaccatcccatgggggctcctccccagccagagctagactttgcaaaccttttgtcctaaaagatttatttttacacggaagaggctgagcagcagcaagagatttggagaagccatgtgttttgaaggtatcgaacacagcagagtccagattagcgattttcatattttaattctcattcacatggtaataaattttacactgtatgtgtacattatatatggtattgtacattttgtttatatctacgtttatatacatacctgttttagacattatatacatctatgcttatatgtatacatacacgcatatatatctttatatcttatatttacttacatgtatatatctttagctacatattcgtttgtatttctagactttatactatatatatgcacacatattttattaatatctactcatagtatgtggccttcacacatacttactattctattcctagttcattctttatattccattaaaataataattttttggaaggctggtcttctcctactaagtttgtttcaggtggttgttagcagaactctggagccatagtgtctcaatcaactcaaatttcctggtgtcctgatattactccagggctactggcatcagattttgtggtgctgcctcagattgcgcgatgatgtggggtggaatgttaaacactttctcctatccatcctgtaatctgccatctatgcagggtacagacctcctcgatttccctgctgctccctggacccaaaacacaagtactagtttagcacagtcttcagtcatccccagggctttctctgttttgatgggtttttttttttaatcttttccctcctatattttttccggggttgatttggggagcagagcacagcaacctgagcttggttgtcactttggcaatgacagttaaggcactcactctgtatttaatttaagtagcatttacatctttgccatattctgttccccatcaaggaatatggtatacagatccatttacttgagattatttcctgagtctatcagcaactttgcacagttgcttccataaaggtcttgtcaggctcttcttatttacattttggattttaatgctgctgtgaatggtgcattttctattttctattttatatactaagttgcttttgtgtggcaaggctcttgattttgctttaatgaccttctgtatgatgttttctgaagtcttttattcatttgaatattcaatgtgtctattcctttgaattttctatgtagataatcatatagttaacaaatactctatttctttgcagtcttcatatctcattttcatcttgacatccatagctctggctctttttcattttgatattcactgcagatgtaggtggtagtggtgacagcatatgtcaacgacttgtcactgccgtgaatggcagagcttctgacatttcacatttatgta

SEQ ID NO: 1563823 - DNA, 4001 bp, Homo sapiens
ctctttgagaaagtgtgtgttgggggtggagggggcacttcccttcctcaccgtcctgcctggggccttccaagactgacggcaggggcaggtttcctaggtctgggatgagaggtctggtgaatccttcctcaggcctctgggactcctccttctgctcacctgaggccccactcctcataccacagccctgttcccattgacacccgatcccaccagccacaatgcaccacatgcggccaccgtgcccgggatcgcccaggccaagatccccactgagctggactccggggtcccctctgtcctccgtcttgttccttccctggtctcctagagggctgggccccacccctctgtggacctgagtctctatctgtcggattcccgaggctgaatgaggaggggcctcggtctcagataggggcggggtgggccccttgtcctggggtactgggtcccctcaggcctcccttgtctcccagcaggacctgggccctccctctgttctcccgcggccacgctaacgataccaagccccttccctcggtcagcccaggatgcagatatcacgatccgcttgcctgaccgccatgcccggaacttcccagggtccactgcaggggcagtgactccctctatggggcctcagccctccctcagggtcctggccctgatgcctggcagagcctggcccctgccctctcttaaccagtcctgccctggtcacaccaagctctgacccagagtcccctggggcttaagtggtggggtggcgaagggtggcccacagcctgagaagtccgcccccggggtggttcagggctggcagcaggggtgctgctggattatttggggccctctatctggggtgggggcgtcctcagtcctccctcagcgtctcatcttgcctcctcacagagcctgggcccgcttccctctgccgatcttcagccaccactcagaaccaagcccttgctactctctgacccccagtgcgcaagtcagaggccttacatccgggcacccggagcttccctgggttgacagcaggagccgaaccggattctgccacgggagacttgggggtggggtggagtggggggggggtgaggatggaggtggggaacctgaggctgtaggtcatggtggtggtggctgggttaggggtgtggaggcgttcagccctccctcagggttctgaccttgatgccagtcagagcctgggcccagcctgatacgcccgaccccgcggggtggtccagggctggcacaggggcggcgctgtattatttggggtcctctatctggggcggggggtcttgagtcctccctcagggtctcaccttgcctcctcacagagcctgggcccgcttccctccaccgatatcgacccgcccctcacagcgaggcccccgctactctctgacccccagtgtgggagtcactggccgtacatccgggcacctggggcttccctgggttgacaacaggggcggaaccagattctgccgcgggagagttgggggggtggggtggagtttggggtggggtggggtggggtggggtggggtgtagagtggagctgaggatggggctggggaacctggggctgtaggtcatggttgggttgggggggcccagcctccctcagggtcctggccttgatgcccggcagagcctgggccctgccctctcctaaccagccctgccctggtcacaccaagctctcactccagagtgcccagcagcttgagcggcggagggagggggtcggcccagcctcacaagtcagccccagatcggcccccgggtggtccagggctgggagcagagacggcacttggttctttcgggtcctctatctggggtggggacatcctcagtcttccctcagcacctcaccttgactcctcacagagcctcggccagcttacctccaccggtatcaagccgcccctcagaaggaggcctctcccttctctctgacccccagtgcgcacgtcagtgacgtcacatccggcccccaagcctggagcttccctgggttgccagtaggggctgaaccgggttctggcggagtaggggtggggatggggataggggccctcagtcatccctcagggggtcctgaccttgatgcctgggtctcgatccccattctctgcccattgggtctgctcctctcggaccaagtctctgactcccagtcacatgaggtggcagtgaggggaggggtgtggtcggggtgacaacattgccagggtcttccagggctgacaggaagggctgagctggattctgtggcccctctatgtggggaggttggaccttcagtcccctctcaggagggttctcctcctggctcctggctctttgatgaagtgatgtgtgggagatgatctgtttatgtcacctttgagcatttgcccagctgcacgcgttgcagagaatggctgcgggtcccaggctagatgctccctggggggctgcagcacctgtgattgtaggacctgtgagagaagatgcacaccatcccatgggggctcctccccagccagagctagactttgcaaaccttttgtcctaaaagatttatttttacacggaagaggctgagcagcagcaagagatttggagaagccatgtgttttgaaggtatcgaacacagcagagtccagattagcgattttcatattttaattctcattcacatggtaataaattttacactgtatgtgtacattatatatggtattgtacattttgtttatatctacgtttatatacatacctgttttagacattatatacatctatgcttatatgtatacatacacgcatatatatctttatatcttatatttacttacatgtatatatctttagctacatattcgtttgtatttctagactttatactatatatatgcacacatattttattaatatctactcatagtatgtggccttcacacatacttactattctattcctagttcattctttatattccattaaaataataattttttggaaggctggtcttctcctactaagtttgtttcaggtggttgttagcagaactctggagccatagtgtctcaatcaactcaaatttcctggtgtcctgatattactccagggctactggcatcagattttgtggtgctgcctcagattgcgcgatgatgtggggtggaatgttaaacactttctcctatccatcctgtaatctgccatctatgcagggtacagacctcctcgatttccctgctgctccctggacccaaaacacaagtactagtttagcacagtcttcagtcatccccagggctttctctgttttgatgggtttttttttttaatcttttccctcctatattttttccggggttgatttggggagcagagcacagcaacctgagcttggttgtcactttggcaatgacagttaaggcactcactctgtatttaatttaagtagcatttacatctttgccatattctgttccccatcaaggaatatggtatacagatccatttacttgagattatttcctgagtctatcagcaactttgcacagttgcttccataaaggtcttgtcaggctcttcttatttacattttggattttaatgctgctgtgaatggtgcattttctattttctattttatatactaagttgcttttgtgtggcaaggctcttgattttgctttaatgaccttctgtatgatgttttctgaagtcttttattcatttgaatattcaatgtgtctattcctttgaattttctatgtagataatcatatagttaacaaatactctatttctttgcagtcttcatatctcattttcatcttgacatccatagctctggctctttttcattttgatattcactgcagatgtaggtggtagtggtgacagcatatgtcaacgacttgtcactgccgtgaatggcagagcttctgacatttcacatttatgtatgcttgct

SEQ ID NO: 1563824 - DNA, 4001 bp, Homo sapiens
ctctttgagaaagtgtgtgttgggggtggagggggcacttcccttcctcaccgtcctgcctggggccttccaagactgacggcaggggcaggtttcctaggtctgggatgagaggtctggtgaatccttcctcaggcctctgggactcctccttctgctcacctgaggccccactcctcataccacagccctgttcccattgacacccgatcccaccagccacaatgcaccacatgcggccaccgtgcccgggatcgcccaggccaagatccccactgagctggactccggggtcccctctgtcctccgtcttgttccttccctggtctcctagagggctgggccccacccctctgtggacctgagtctccatctgtcggattcccgaggctgaatgaggaggggcctcggtctcagataggggcggggtgggccccttgtcctggggtactgggtcccctcaggcctcccttgtctcccagcaggacctgggccctccctctgttctcccgcggccacgctaacgataccaagccccttccctcggtcagcccaggatgcagatatcacgatccgcttgcctgaccgccatgcccggaacttcccagggtccactgcaggggcagtgactccctctatggggcctcagccctccctcagggtcctggccctgatgcctggcagagcctggcccctgccctctcttaaccagtcctgccctggtcacaccaagctctgacccagagtcccctggggcttaagtggtggggtggcgaagggtggcccacagcctgagaagtccgcccccggggtggttcagggctggcagcaggggtgctgctggattatttggggccctctatctggagtgggggcgtcctcagtcctccctcagcgtctcatcttgcctcctcacagagcctgggcccgcttccctctgccgatcttcagccaccactcagaaccaagcccttgctactctctgacccccagtgcgcaagtcagaggccttacatccgggcacccggagcttccctgggttgacagcaggagccgaaccggattctgccacgggagacttgggggtggggtggagtgggggggggggtgaggatggaggtggggaacctgaggctgtaggtcatggtggtggtggctgggttaggggtgtggaggcgttcagccctccctcagggttctgaccttgatgccagtcagagcctgggcccagcctgatacgcccgaccccgcggggtggtccagggctggcacaggggcggcgctgtattatttggggtcctctatctggggcggggggtcttgagtcctccctcagggtctcaccttgcctcctcacagagcctgggcccgcttccctccaccgatatcgacccgcccctcacagcgaggcccccgctactctctgacccccagtgtgggagtcactggccgtacatccgggcacctggggcttccctgggttgacaacaggggcggaaccagattctgccgcgggagagttgggggggtggggtggagtttggggtggggtggggtggggtggggtggggtgtagagtggagctgaggatggggctggggaacctggggctgtaggtcatggttgggttgggggggcccagcctccctcagggtcctggccttgatgcccggcagagcctgggccctgccctctcctaaccagccctgccctggtcacaccaagctctcactccagagtgcccagcagcttgagcggcggagggagggggtcggcccagcctcacaagtcagccccagatcggcccccgggtggtccagggctgggagcagagacggcacttggttctttcgggtcctctatctggggtggggacatcctcagtcttccctcagcacctcaccttgactcctcacagagcctcggccagcttacctccaccggtatcaagccgcccctcagaaggaggcctctcccttctctctgacccccagtgcgcacgtcagtgacgtcacatccggcccccaagcctggagcttccctgggttgccagtaggggctgaaccgggttctggcggagtaggggtggggatggggataggggccctcagtcatccctcagggggtcctgaccttgatgcctgggtctcgatccccattctctgcccattgggtctgctcctctcggaccaagtctctgactcccagtcacatgaggtggcagtgaggggaggggtgtggtcggggtgacaacattgccagggtcttccagggctgacaggaagggctgagctggattctgtggcccctctatgtggggaggttggaccttcagtcccctctcaggagggttctcctcctggctcctggctctttgatgaagtgatgtgtgggagatgatctgtttatgtcacctttgagcatttgcccagctgcacgcgttgcagagaatggctgcgggtcccaggctagatgctccctggggggctgcagcacctgtgattgtaggacctgtgagagaagatgcacaccatcccatgggggctcctccccagccagagctagactttgcaaaccttttgtcctaaaagatttatttttacacggaagaggctgagcagcagcaagagatttggagaagccatgtgttttgaaggtatcgaacacagcagagtccagattagcgattttcatattttaattctcattcacatggtaataaattttacactgtatgtgtacattatatatggtattgtacattttgtttatatctacgtttatatacatacctgttttagacattatatacatctatgcttatatgtatacatacacgcatatatatctttatatcttatatttacttacatgtatatatctttagctacatattcgtttgtatttctagactttatactatatatatgcacacatattttattaatatctactcatagtatgtggccttcacacatacttactattctattcctagttcattctttatattccattaaaataataattttttggaaggctggtcttctcctactaagtttgtttcaggtggttgttagcagaactctggagccatagtgtctcaatcaactcaaatttcctggtgtcctgatattactccagggctactggcatcagattttgtggtgctgcctcagattgcgcgatgatgtggggtggaatgttaaacactttctcctatccatcctgtaatctgccatctatgcagggtacagacctcctcgatttccctgctgctccctggacccaaaacacaagtactagtttagcacagtcttcagtcatccccagggctttctctgttttgatgggtttttttttttaatcttttccctcctatattttttccggggttgatttggggagcagagcacagcaacctgagcttggttgtcactttggcaatgacagttaaggcactcactctgtatttaatttaagtagcatttacatctttgccatattctgttccccatcaaggaatatggtatacagatccatttacttgagattatttcctgagtctatcagcaactttgcacagttgcttccataaaggtcttgtcaggctcttcttatttacattttggattttaatgctgctgtgaatggtgcattttctattttctattttatatactaagttgcttttgtgtggcaaggctcttgattttgctttaatgaccttctgtatgatgttttctgaagtcttttattcatttgaatattcaatgtgtctattcctttgaattttctatgtagataatcatatagttaacaaatactctatttctttgcagtcttcatatctcattttcatcttgacatccatagctctggctctttttcattttgatattcactgcagatgtaggtggtagtggtgacagcatatgtcaacgacttgtcactgccgtgaatggcagagcttctgacatttcacatttatgtatgcttgc

SEQ ID NO: 1563825 - DNA, 4001 bp, Homo sapiens
ttctttttctctttaattcacatctgtcaattattttggtattcttcttgctctggttatgtattccaatccagtgtttggggtacagagacctcttctttcttacctgagacacactttggggttgtagaagaaaatgaattaagcaattcacagtaagcttcagtttgggaggagtggaacagtgtgggctctagaggaattcagaccagcagtctagttccagccctatcacttactagctgtgtgaacttgggcacattaataaactctatgagcctcaggctctacatctgtgaaatgagcttgataagccttgtcttgtaggactggtggaatgtggtgaaagtgtgcaaagccctggtgtgcattgagactttaaacaatacttgttattactaagattatttcaactacagaagaaatcatccaccctgctgattttctttaagtccaagagataacaaagaatatacagcattctaagacatggaacaataaaatcagcccaaaacgcagcttacaaagaaactctaaataacttttccatattaaatcatattttgagtgtggagttgtctttctcagctgaaagcaactcaaaccttctaggctttggttcaaggaccaactctgacctttcatccaaaccagtcttattttcattcattttaccaccatcaaaaatctagatctcccttagaatttgcaaaaacacatgaaaggaaaaaaaattccttttaatggaatgggttctggctccccagctgatagcagagtattagcccagtggcttatgagtttccagtcttaaaggagtatcacctttatttctcagaaacaccctggggactacgctcataaaacacctagtttgtgtactggattcacttcacttgcactgggacaagagcaccggccactttcaatccctgctccaggcaaagatcccctctggtttttccacaatcccaaagtaactgttaaaggcaatttttcattccagtctccatctctcaagtgtgagatccaccatctgagtgtgtgacccctgctcagtgcgccccatataggcactatgccaggacataaaattacctcctattgcagtatgttcagtttcccgaagtctcagttaccttgcttaggacatttacactagattccactgctggtaatacccccaccttcttttttatccccttttcacctgtctttaggtcttaaggagtatctcattaccttcgttatatgatagctgctgttggattctaaaattctgtgggcagggattggggtttttttgttgtttgtttgttttttgttttcttagcttatccggtactagccaggagccctccaaagtacagctgctcaattaatatttggacaattgaagtgtaagtgaccaggaagtcaaatgtattgctatttaatttcccccacattcctgaaaaagctaagcagatccgggtacatatacttcagttttacaaagaaagactaaaaagaataaaacaaagcaagaattgaccacattttactttttttttctctacttcctggtcccaccaactttattgcaaggtaatttccttttcacaaattccatattccaatgccatattatcttgttctagatcacagaaaaagacttaaaagatttttaaattgttttacataatgcaaaaattctcactctccaacctgatatattttaataaatgagtgattcatgccattcataaacttagattctgaaactaaataaatctacaatttaaaaaaagaacactgaaaaacaggaaaaagaaaagataaatcattttacatacaaatatgttatacatggtgttcccaccaactcccctttggctctccattaattagaaggttaagtgttttcttaatcaaaagtaaagaatatacctcagacttcacaaggagtgggagacactgctggacaccacactgaaacatgccaggcccagttgcaacactgtctctggctctctctccctcatctcttaaagtcttctcttaatggagggaagacaatggagacactgtcattgaccttggcccaggcctccacattcttgaataatctaagcaaaccaggtatgtaacttttaaatttatgagcaaaaaaagactgaactgagtaagacaaaccacgaataaagcaacttttacttttcttccctttctatcttcagattctacctattttactgtggagttattttaaatttctaaggataaccttactcccatgccgtgttattttgctctgtatcacaaaaattatttcaggattttctatttgtatttcaaaaacaaaattattatcactaaaccaacctgataaacagcaataaatgtgtgatgcatgccatttctaaatttatattctgaatctaaataaactttctattttaagaaacatcatggaaaatacaacaaagagataaatcaatgagttattcatgcatcacaggaacagagaaagcagcaggtctttcaaccacaaagtgaacaatttgccttagatctcacatgggttgggaagagctactggatgtggccctggaatacgcactagtcatggctgtagtgccacgcctggctgcaactctgggccgggctccagctctctcttcttcatctctcaaagcctcttcataaagcagtgggaagttattgggggtggtgtcattcaccttggccaaaaactccaggactttcatcttgctggtttctgcatgagctcttggaccccacaggaattgatagcgtgggggatcactgttgggcacctgctggtattccagatatttttcctgtaccagatcttgggtgatgagctttcggggttccccaaagataaggtgcctctttccatcatagatccccagcatattcaggaattcccagatttcctcttcacgggcacagttgccatttaagaagatcacactcagtagaggcatcagaagcccattccttggaagggtccaggcactgctctggtttccatcgttggggcctagcatgctgacgaggatgtaggagtgagtggtggggttgacctccttcaaggcaaggccaaagaccagctccgtgcgctgagagactttcctgaagatctcagggaagtgctccttgtactttttgctgatgatcttcagcatttctgcctttgtagtgggctctttcattttatacttgtacagcaggaactgcactaacatcttcgtcttcctggttagagaatctttgagtgatctctcagtggatgttgaggcctgggaggaacttgcattttcctcatcttggctctcgtcgcctttatcagatccagtgcatgacatagctgcagcagcagaggtggtgggtggctctctctgaggctcctggggaatgccaaaagcaagggagctggaggcagtatccctcaaaacagatgaggaagaggaaggagactcttctttctctgctgcagtaggctgaccaaccttgagatcctgggtctgaccacgggtccgctggcgtttctcacgggcacggagcttactcttctgaccccgaggcatgatggctgtggttaggcacagcaggcaggagtgtaggcagaagggcaggtgatgtggttcctggagaagagcaaatgaaatcctgagaacaccttcagcaggcagatactaccttggcttttcagaagccgcctctgcaggattccttgagaacactgctctaagtattcactgggctattgttcttagtcattctgtcccctgagaagccagctgaggaagttacaatgtgccttaggctgcagcttgccaaccctgcctggggctgactgggtgacaacaaggctcgcagtggggctttctgtgttctggcttggagaggatccactctgattacctttagaattgtcatgtcagctcttggcagggcctgagcctccctctattggtgttgtgaaattgact

SEQ ID NO: 1563826 - DNA, 4001 bp, Homo sapiens
tctaatcccacttgattcttccaggctcatacaaaagccttcacctctctgagtacccagggctagtcttgaggggatgacacatctgggtacttctgcctggggtttcccagagctgagagggggtagaacttggtgaagccccactctctaggtaaatgctcatctcattcctccctcagtgacttctctgtcttgatctaacgcctatccagtcatacaaagcaccccccgacaactccctgaggaagaagtgaaacttttcccatctggctacaattgtccatcatctcccaaggatgaaaatcaggaaggaattccgtgtttctttcactgttatgggatgagtggttcccccagttctcagggtcttctttttgactcctggaattacctaggaatcctctagctgctaacataaggctgccccctttgatgaagttccccacttccctgagatgctctaggaagaagtgagtgagactcatcatgtcaccatacctggatctcccaggtctcagtggggatagggctctatctgtgttacctctttcttggagggggtcccctcatactccctcagtgtcaccatcttttaggaactgggcctcctccctgtactaaacaagggctttcatgttaaaccaaagccattatgtacctgaaacagtacctgaaggaaatgaggggcatctcaacttgagagttctaaccctggcttctaaggaatgaacgccaaggtaagactgtgttcctgcctgttctggactagacggttacctcattcctcataaagaaattgtaccttgacacctgtcttggcgtatgactcctatctctctactgaactggggcagtgaggccttaaaccaaggccctcctctctctaagactatgaaggcagaagccagggagtacttgagcctgccagctctggcctgggactcccagggacagcatcaggcgcaattgtctccctcgtgtatagagtagccgccatttcctcactcagtgtctccacctccactcagcactctttctgggactccacccatcaactgctcctaacaccatgccccgtagacaaaagttctcatattccttggacctaagttcacagtcatagtgggccacatcccaccaaggctgactggggcctgcgtgtgccgacagcaggagcgggactttttttttttttttttttttttcttgagactgagtctcgctctgtcacccaggctggagtgcagtggtgcaatctcggctcactgtaagctccgcttcccgggttcacgccattctcctgcctcagcctcctgagtagctgggactacagcagcccaccaccacgcctggctaattttttctatttttagtagagacggggtttcaccgtgttagccaggatggtcttgatatcctgacctcgtgatccgcctgcctcggcctcccagagttctgggattacgggtagtagggtttaggactcctccctctattgacctgagtctataaggcttaggccaaagccttcgtctccctgagtcgctgaagagacagtcagggtgctacccatctggttacctgaggcctcccaggaccaaatgcagaagcgggacttagaggggacctctttgttacgggtgggggtggtctcttcaatttacactcagggtcctcaccttgactcccgaccagtcctgagaattcaccctccgctgaccagacgctgcaccccactccttaagctcgctcgggtcctcgccttcaaaagggaaatgaggatgagccacatccggcagcccagggcctctgagggctgacggcagaggcaggacgctacgggacgtcactgttctagtgtcgctggtccctacgtccccactagggttcctcaccttagtatctagcagcctgggacgacttccgcctgctgacccaaatccgccaggcggacactgcgcccttacgctcgctggggtcctcgccttcaaagcggaagtcaggatgagccacatccggcagcccgtggcctccgggctgacggcaggggtggtacgcttctggacgtaactgttctagcgtcgctggtccctacgtccccactaggggtcctcaccttagtatctagcagtctgggacgactccgcctgctgacccaaatccgccagcctcaaacaatagccccacctctctcagcccccaaggtggaaatctgagcgtgccacacaggccacccctgcctgggcctcacaggcctgacagcagcggcagggctctgtgaaagtcccgttttgggcagaggccttctcatcagctctcagagtcctcaccgtgactctggtttcctctccaggcagaactgaagctactcccttcaggccccacgctccccatcctccatgagaccttccaggcggaaatgagaggcaccttaggtagatagctctgtctgatgcctcaaaacggggtgaattctgtggggactcatctgctggtggagtcccctcttaacacttaaaagccctacattgattcttgttagggtctcggcctcttcgctctgtaaaactgaggctgccccaattagacggaaccagtcatctccctgagactttccaggcagaattcagcctgccatctccgccaaggcttcctagggctgacagcagaggggactttgtgaggccatgtgggtgctagctacccttagtccacattcaggtcctcaccttgacaagtgagcaaacctgtaacttaccctttgtttacctgaacctgctcctctcacatcaaggtcctgttttctgagaatttcgagttgtactcctggatgatcttcatatgatcacagtccttttgcaacctgcaaaaacagataataaggaaaggactccatagaaccccacagttttggctgggtccttccatcagtcttcatttatgctcctcgcctttacatgtatcagaacctgggactcctctatctactgaactgaggtcactctcctgagggtctggatgaacccttacattttggagtggttttctccccaccattcattcatgagggttctcatgttggcttctgtctcttgatcaaactcttccagggaaatgtcacatccctgcaaaaatttgaccagtttcctctttgcaaaccttgcagagaagaggtccctgtcccagaagtgatgtgatgttgggaaactgaaacggaaggtggagagcctaggacagatgttgtgctctcagggaaaaaaacatgctgatctattccttcacttcaccaaccaaagggtagttctaaaagttttactttctacagaaaagggtggagccagatgatttttgtaatcttttgatcttttgaagctatccaattttgcttctgtcggtgatcatattgtcaccgagtattatttctttttctctttaattcacatctgtcaattattttggtattcttcttgctctggttatgtattccaatccagtgtttggggtacagagacctcttctttcttacctgagacacactttggggttgtagaagaaaatgaattaagcaattcacagtaagcttcagtttgggaggagtggaacagtgtgggctctagaggaattcagaccagcagtctagttccagccctatcacttactagctgtgtgaacttgggcacattaataaactctatgagcctcaggctctacatctgtgaaatgagcttgataagccttgtcttgtaggactggtggaatgtggtgaaagtgtgcaaagccctggtgtgcattgagactttaaacaatacttgttattactaagattatttcaactacagaagaaatcatccaccctgctgattttctttaagtccaagagataacaaagaatatacagcattctaagacatggaacaataaaatcagcccaaaacgcagcttacaaagaaactctaaataacttttccatattaaatcatattttgagtgtggagttg

SEQ ID NO: 1563827 - DNA, 4001 bp, Homo sapiens
aaggttcttcacctccccactagattagctagatacagagtgttgacacaagggttctccaaatccccaccagagtagctggatacagagtgtccattggtgtattcacaaaccttgagctagacacagggtgctgattggtgtgtttacaaaccttgagctagatacagagtgccgattggtgtatttacaatcccctagctagacataaaggttctccaagtccccaccagtcaggagcccagctggcttcacccagtggatcccgcactggggccgcaggtggagctgcctgccagtcccgcgccatgcgcccgcagtcctcagcccttgggtggtcgatgggactgggcaccgcagagcggggggcggcgctcgtcagggaggctccggtaggacaggagggggggtgggtggggtgggggcggtgggcggggcggggcggggcgggggccggcggcggggggggggcgggcgggggggggggcgggcggggcggggggggggccggcgggggggtggtggttggggcgggggcgggcggggttggggggggctggcggggttggggggggctggcggggttggagggggctggcggggttgggggggtgggagaggctcaggaatggcgggctgcaggtcctgagccctgccccacgggaaggaagctaaggcctggcgagaaattgagcacagcaactactggcccaggtgctaagcccctcactgcctgggccggggggcctgccagctgctctgagtgccgggcccgccaagctcatgcccaccgggaacttgcgctgtcccgcaagcaccacgtgcagccctggttcccgcccaggcctctccctccacacctccctgcaagctgagagagccggctccggccttggccagcccagaaaggggctcccacagtgcagcggtgggctgaagggctcctcaagtgccaccaaagtgggagcccaggcagaggaggcaccaagagccagcgagggctgtgagggctgccagcatgctgtcacctctcaataggactccttcccctgctgcccgaggcagacaccgtggtccaataccctcatctccttgagaggttaaaggtggaaattccagctacccctacttaggatcacccaggcttgagagcagaggctgggctctgtggggaccggtccgctatggcagaaagggagttttatggaactcaccctttattgactcctggagggttctaagacccttatctcaggtggcttgatgccaacaccttagtccaatgctatcacttccctgactctccagaagaataatgcagagtgcgatacccaagaggatccctgcccggggttttttcggcttaaggcagaggctggacggcatggcgttctttcttttgcggtaggggttcccctcaaacattattcagtgtctttgccttacctcctggcagggcctggatgccttcctctgctgaccagataccaaccgcctcactgcaaggcctcacctcccacggacggcagaagcggaagtgtgtgtgacatccgggcatcctgcccacggaccgaagggctgccagcaagggcggtgtggcgtgactttctgtggcgccccctttgttatggagtagtagtaatattaagtcctcctctaggaagtatatccatgttttcgctcctaattcattgattaaaggccccttagggaaataataaccctttattgactactggagggttctaagaccccaatctctggtggcttgatgccagcaccttagcccaatgctatcacttccctgactctccagaagaataatgcagagtgcgatacctaagaggatccctgcccggggcttttgcggcttaaggccgaggccggacggcatggcgttctttcttttgtggtagtgggtcccctcaaatgctattcagtgtctttgccttacctcctggcggggcctggatgcctttctctgctgaccagataccaatcgcctcactgcaaggcctcacctcccacggacggcagaagcggaagtgtacgtgacatccgggcatcctgcccacggcccgaagggctgccagcaagggcggcgtggcgtgactttctgtggcgccctctttgttatggagtaatagtaatattaagtcctctcggaagtagatccatattttggctcctaattcattgattacaggctccttagagaaataatcaccaaacaataagctctggacagttttgcaacataaaccgttacggataatgggtttgcgttccaggcttgatgggagaagagaggccgcagcacaaaggtagggtgcccaagacagattctgagatgttggagtaagtgcattataactatggggtctcttcactggcgaaatgtagacattgcgaactttctgttctaaaagatctactttctatagagaagccatagatgtacacaattttgtgagacccagatctcttgactttatctaacattgcattgtattgtgcagtgaaattcattttaattatggtcttatttgttccaccaaatatattatatgcatgttctattactactgctttgtgtggcaaggcttttgattttgctacagtgatttatacaccgcttttcagaagtcatttattgatttggattgggtgtggtcttttcctttggattttctaaaatgatgatcacattttcaccaaataatttctatttctattaaatatttccaagttacatttgtttttatagtcttatcctctggccatgtattcagcatacatttatgtctggttccttgctttaatgagaatgcgtcgagcgttcagcatttcacatttaagtttgtttgccataggttttaggaaatgaaagttatcttctgatgttagtttgtggaatgttatcaagcatttgtgttgaattttttgttgaaaaatttttctgtacctcagtacatgatcgaatgcccatttaaaaaaatgtaatggccgagcgcagctactcgggaggctgacacatgacgattgctggagcccaagagatcgacaccagtccgcaacatagtgggagtcggtcgctataaaaaattaaaaaaaaaattagacgggcacggtggcgcacgcctgtagtctgagccactctggaggctgaggcccaaggatcttttgagtccaagcaggtcgaggttgctccagtctgggcgccagagcaagacccatctcaaataataataataataataatctaatctgttagtgtgagaatattttaggcaatttttttctaatgttgtattatctttacatttcatggatacagactttttttccattgaattaactgcaatattggacctgctatgtgtttattgaggatctttgcctctgtgtgggtgaacttggctcagttgttcccctccccgcacctaggttatcctcagctgttctttttgttttgttttgtttttttgttttttgtttttttaatcaaagaaagctagcctgggaaagtgagttgaacatcataagatggtggttatttttgtgtttacataagatggtcagcttttcactgcttatttggtagaactggtcccaaaatgcctggtcccaaaacatttgagggtggctggagctttgatcagtttcattttgcgtttcgcaattacagatttttatttctatttggattaattgggccattcatattttcctaaataatggtctgttttcatttggggtttcaaatttaatgattatatatattctttttattgtagaaattctcaaatatattctactgtagagagaatatacctggaactcagaatcatcaacacatggccaacctggcttcgtctatactcacacataacaccatgtctgccagtggaataatgtgaaacaaatcctaggcatcacatcatttcatctttaaatatttcagtatgtgtttttaaagacagaaatattaactgataaca

SEQ ID NO: 1563828 - DNA, 4001 bp, Homo sapiens
gaagatgaagacagtatggaaattcttcccactcctgccttggacttccaagggctgaactcagaggcagagtggagctcatggagatcccaaatgtactggaatgggtgtccccttcatctatactcaatgtctacaatttggctccaggcactgcgagagactcctcctctctgctggcctgatgttccctccttatgctaaagattcacccctcagtgactaccaaggatgtgaggggacacttcatctagatatccagcctcctatgactgacaccatgggtggagactgtggggccacctatgttctggggtgggttcttctctcagtcctaagtccacatccttactttgaatcatttaagcacccgggaatcttccctctgatggccttacttagctccctcaaaccaaggcctacacttgcccaaaaccaaaaaggatgacatgaagttgtctgactggtgggcccccatatcaggggtctccgagggctgaccaaagggacagagaacagccccatggtaacaccctgttccagaatatgtggcccagatctttttcatggtctgggacttatccttctgacttaagttttccctcacaataagacctccttctcactgaacaccatagaggagtgtgtggatgtctcatctggctatctctgtttgggtctcccaaacattccctgtgacttgtgggtctacagttttatgcagtgtattttcccttctgacagaactcaatgaaacctgccaaggcctggaactccttctgctggcctgatgtaatatactcagacaaaaccttcacttccctaagaccccaggagaaaattagcagtatcttcagtttgacacccctagggtgagtctcccagggaggggaaaagctccttggatccttctctgtcatcagttggctaatcccataattctcacacggggtccccatattggaaactagttggtaatgtgttccctccagtcggctaactgatgctgcccccttccaaccaagacttcatctctatgagatacccacaaaggaaatgagcaaacgcctcacgaacggacacccaaaaatgacaacatggcctaggcactgtggcacaacctcttttgtggagcctgcagaaccttaaaactcattcagaggccgggcgcagtggctcatgcctgtaatcccagcactttggaaggccgaggcaggtggatcacgaggtcaggagatcgagaccatcctggctaaaacggtgaaaccccgtctctactaaaaatacaaaaaaaaaaaaaaaaaattagccgcgcatggtggcgggcacctgtagtcccagctactcaggaagctgaggcaggagaactgcgtgaacccgggaggcggagcttgcagtgagccgagatcacaccactgcactccagcctgggcaacagagagagactccgtctcaaaaaaaacaaaacaaaagaaactcagggtcctcacctggactcctgcagggcctgagatgccttcctctgccgacacgacactgcctatatcagactaaagcttcacctccttcagactccgcaggcggaagtcagtaagcaacacttccggctgcccttgcccccaagccttgcagggctgacaaacaggccggccctcactcagtgtgtccgccaatgttctattgtgagtgatctctggtgatcgactcagcactcactcaagggcttttttcttttttaactctcggcaaatctaaggactcttacccttgcccaaataaggacttcaccttaatcagattcccgagggagaaatgtggggtgggttcagcctgaaagtccagcccacggcctcccagagttgactgcagggcctggggctcttatctgcagggcgctctatttccctcagtctcagagttttacctcgacacctgacagtgcctgcagcgactcgttcctctgatgactagggtgcaccttcctcagataaggtcgtcacagtcctcggactcagaagaggaaatccggggcgtcacatccagttaccccagacggaggcctcgcaggaccaacaaaaggggcggggcggggcggggtggaaagcgtgaagcgccctgttcactccgatattgaatatgctgttaatttagttaggatattgtctaattgtgaatagccttggttcaagtcccctttacttggaccacctttatctggtttttctatcaaaaaatgttcacttgtaaaaatattttgaataatttcaaatctttttggatcttttggatgagtttccataagatactatttttttttttttgagatggagtctcgctctgtaaccgtggcaggagtgcagtggcatgatcttggctcactgcaacctctgcctcccgggttcaagtgattctcctgcctcagcctcccgagtagctgggattacaggcgtgcgctaccatgcccgtctaacttttgtatttttagtagagacggggtttcaccatgttggtcaggctggtcttgaactcctgacctagtgatctggccgcctcggcctcataaagtgctgggattacagacgtgacccgtacactaatttttttcctctgaatagatagtgcaactggccttcaaacctaactggttttcaaactgtttgaggatggcttgatctttgactacagtttcagtttgtgttgtttgactatatttctgtatgttttatgaacctatttattcctttagattttgctaaaaattagttcatttcacttgggttttcaacttgaaggacataatatttatagtaaaatggtttatgatacaaattcttaaacatatgcaatagtagaaatgatagtacaatgaacccaatatacttgacatttcccatgtcatcagtagttaatggtagcagcttgttcagattaagaatttgttctttggcaaaaccactccaaagattattctttgtactttcattgggtatacccaatgcctgtgtacaggtctccctttttggtgacattggcagtgctgaagatcatgacttttatccattatctataatattaggggctatacaaggataattatctcattctattattcattcctagcttactaactgaaattctactataggtacaaacctttccttatccaccagttggttattctgagataatggtatacagttattttatatttgaatctcttctgcacctatattttgtataatatcattgaatataataatttctgctttttgtaattaatatttataaaatgatattatatatatatttcatgtaactagagcaagaaggagaaaattgctgacccctccgatttctgtgtactctaatctcctactgttgcctcctgttgcagaacccagttggcattcagatgtgggggagcctagggattgagaggctctgtatagtagagaaagagcagagcaagggtaaagaatggatctgagacaaataggttcagtattggcataccacttaacagattaaatgacaaaaattatatgcaaatttagagaaaaaatcgttcataaaaatagtcatcactcattcattataaaaaatatattttcttaaactagatcaaggacatctacaaaagagccctacagtaaaaatcatacttcatgtaaaaatattaaaaacttttacattaaaattgagaagtaggcaaagattcctgttatcaccatttctattctttattgtaatgaagataataaagtaatgggaaacagaggcaatcaaagagattgggattggaaaataaggaacagtgtttctgtcattaaacatgaatagaatgtatatgaggaaaatctactaaagaaaaactattaaagcaataaaagtatttttaaaggttcctgggtataatattaatatgcaaaaatactcttttttctgtaccaattgatagcatgaagattaaattaaataaaatataacttgtaagttacaat

SEQ ID NO: 1563829 - DNA, 4001 bp, Homo sapiens
cggtcacctcagctggccacaaatgctcatcatgtcccaagactgggagcagtggagattttctgtgttggccccacagttacaaatgggtggtccccttggtcctcagggtcttcaccttgactcctggcaagagcttaacaacctccagcagctgtcttgaggctgtcccttttacccaggctcttcacctccctgagatgccctgggaggaaatgccactcaccatgccaacgtgcctgggtctcccagaggtgacagtaggggtggtgctctatgtggcctacttctccctgggaagggctccctcttctcattcagtgttctccccttgactcccaccagggactaagtcctccttcccaccccaccatgaatggggcctcgcccattggtgcaaaagagccacttctctgaaacgccaccctgaccccttcaggacacgaggggtcaccaaatgctaatggctctgcccatggtttcccagggcgcacagcagagctgagactctatgtggtctcctgtgttttggaatggccattttcctccctcctcacgcagggttttttttaccttcactccccacagagcctgggactcctttctccgctgacctggggcagccagtcttgcaaccaaagccctctgctgaaacgctccgtgcagccctgtctactgagggctcaggatcttcaccttgctacttgaccagtcctgggactccatcctcagctcactacaggcaacacccttcaaagcaagatccttgcttcaatgggacctcagatttggacattcagggtaagccacatcctctcaaggctgtttagggccttcaaggcgtgacagcaggggtgggactataggggaccccactgctctgcctcagggttctgaacctggctcagggtgggacctccaactctttgggacgcgactcaggtcgctccactgacctgagtcagccaggcccaggcccaagctctcacgtcccaaagttgctagagggaaaagtcacggcatgccccgtctggctatgcctgcacggggtctcccagagctgacaacagggcagcagaaacctggctctctggctctccctggctctcttgctttttccttttttttttttttctttgtgacagacacggggtctcactctgtcgccacgctcatggcgtgaccatggctcactgcagcttcgacctgctgggctcaagcgatcctcctgcctcagcctcccgagtcgctggggccacaggcgccggccaccatgtcccgctagtttttgttcttttctttcttggagagagagggtctcgctttgttactcagactggtctggaactgctgggctcgggtaatcctcccgcctcagcctcccaaagcactgggatcacaggtgtgagctaccatgcccgcctcgtgggcctcccatgtttgggagaggtctcctcatcagcatcagggacctcatttcgattagggcctaggagtccatccctctgcagaatcgaagcctcaccctcacaccaaaccctcccctccctggtgccctctcagaagtcagtgccacagcctgactggagcctcccgcggctgagggaggtgggtacccgggggcgggggttgggggacacagggtggtcgccttggctgcgtgtggtgggcctttcagtccacgatcagggtccttaccttgatacccaaccagtcttggggttctggtagcctgaggtggcgtccctcagacgaagatcctcacttccggcagcttcccaggcgggcggatgtcggagtgagccacatccaatcaagtccctgctgggtctcccagggctgaaagcggggcggggctctgctcgggccccctttttgcatagaagtcctctccagtgtactcagtgtcctctccgggactccaatgagtgtccagttctcctccctcagctgaactgtgcttttgcctttagacagagtcactaccctcgttagagcatctaagcagaaaaaaaggggtcctcagctgaggtctttgctatggctgacaagattaagcatttttttatttttgtttttattttttgctgataaccattcccttatgtcactctcggtcctcaccttgattcgagtcagtttctggggctccactatgcacagctggggcttcccccaccagaccaagattctcccttccctgagaccctccaggccgaaatgacagtcacctcaacctgacagctcttcctgagcttcccaagtcacaggagaggtaaggatggtgtgacaggagtggggatgggatggtgtggcagcggcggtgcagggaaggggagatgtgggttggtggaggtaagagtttttgtgtcttcctctgttctagtatggatgtgtggttttctaattgctccctgaaattcctcaccttgacacctgactgactagtcctggaactcgatcctcatgggacttgaggctgctcccctctgatcaaggtcttcaccttcctgggactacagagttgtaatcaggatgagccaaatctaccaatgactattccagaacgacaagggctgtcagccagggcaggactctatgggaccccactgttctggcttgttccttcctttattcttaattcagggtcatcaccttggtatctatcagaagctcacagtccttcctctactgacctgagtttgtcttcctgaaatctctcatgctcctgagaaccttgaaggataattgtggagatgctcagcctcagccctgcctgtggccctctaagtctgagagcagccacaggctggtctctgttggacctccaatattctgggatgacggtatcctcagtcctcctacatggggcttcacatcttggttcctgtctcattaattcaaggcttcctgggaaatgccaaatccctgcaatctctttaacagtttttcttccgcaaactttgcagagaatggctccttgccctgaagtgatgagagatcaggaagttgtagctcaaggcagggggcccaggacaagtggtgggtggtcaaaataaagccagttggtctattccatttctttaccagccagactttgcctctgctgtaactttggttctaatagattggctttctccaaggaagggtagggccacatgattctgtgagtccccaatcttttcaggtgatctgacatcacatatgtagatgatcatgtggtcactgagtattgtctctttcttttccttattcatagctctcatttatttttgtattcttattgctctggctatgtattccaaaccagtagtttgtacacggtatttttcttcttattacttgatatacaatttggagtagggagaagaaaagtgaattaagatacacaaggtctgtctcaggctgagatgagtgtgacagtatgggaatagttttattctaaataaacaatactcgccgggcatggtgtctcacccctgtaatcccaacactttgggaggctgaggcgggtggatcacctgaggtcaggagttcgagaccagcctggccaacatggcgaacccctgttgctactgaaaaaatacaataattagctgggtgtggtggcaggtgcctgtaatcccagcttcttgggaggttgaggcaggagaattgcttgaacccgggaggtggaggttgcagtgagccgagattgcgccactgcactccagcatgggcgatagagtgagactccatctcaagaaaaaaaaaaaagcaatacttgcagatggttagcaagaaagtttatttttttcttaccatggcattcaccagcatgtttcatgcttcctagttaatatgagcccctatgacaagtttgaccactcacagtgatgtatgttaaagaactctcagaacgttcccctgcctttgactacaggccagagagtcatggttcctttacttcttgtctggagtgggcatcatttttaataatggtgaattaagtcagtgttagt

SEQ ID NO: 1563830 - DNA, 4001 bp, Homo sapiens
agaaagaaaaagatacaactccgagttactatagactattaacacaaaatgatatatgctgtgttccctccagacgcactctggccattcactacttagaatgttgactgctcttctcttccacaaagaaaacaatcttcagacttgaacatttgaaatgtaacctaggggaaacaaaaagatggaaaagtaaaactcgagttatcaatatacaataggaatgcaaagatgatatacacttatttcttccagccccaccatggccctccactattagaatgttgacagaccttttcgaccaaaaagtgaagaacaagcctcagatttcacttagcatgggagaagctgctagacgtggttctggaacgtgcatttgccatggcagcagtatgagccctggctgcagctctggcttgggttctctgttcctcatccctcaaagcctcttcatagcaggatgggaaggcactagggacggtatcatgtatcttggctacaaactccaggactttcatcttgctagtttcagcgtgagctcttggaccccacaggaattcatagcgtggaggatcactgttgggcacttgctggtactccaggtactttagctgcaccaaatctttggtcatgaccttcctgggatccccatagaggaagtgcttcctatcggcatatacacccatcatattcataatttcccagactgcctcttctggggcacggttgccattcagaaagatcacacccagtgcaatcatcaggaggccagtcttgggaattttttcttcatcactggttgtttcatcataggtgaggtctaatttgctgaaaaaggcatagtagtgcctgatgggatccacttccttcaaatcaacaccaagtgccagctccatgtgctcagaggctctcttgaggatctcattgaagtgacacttatccttcctgataacaaactttatcatatctccctttgtaattggctctttcgtttcatacttctgaagcaagaaatgcaccagcgacactactttcttgtttaaaggatcttctttccagccctcagcttcccttgaggaacctagacttttctcatcttggctgctggcaccttcatttgaactgcatgaaacaggtgcaatagcattggtggtggatggggctccctgaagcgcttcagggatgctaggtgtctcagcagcaggcaaattctggggtctgtcaccaaagagaagataggcaggggagggtgactctccttctgccacagtggcctgcgtagctcccagatcctgattctcacaacgagcctggtggcgtttctcacgggcacggagcttactcttctgacctcgaggcataattactcttgtcagggactacagacaatagtgcaggcagttgaattgatgaagagggcaccctagaagacggaggatgagatagtgttcacagccttggtagggagattctaccttggtctaagaatggccacctctcctggttctcttgagggtattgctttaggaacccataaggcaggagcggggtgggactgttctgtggggggttgtcacatcagttctaactcaggatattaattttactcctgactacatcagttctaacttaggatattaattttactttagtcttttgagtcctccgtctgttgacttgaggctgcctcgctttagaccatggcttcccatcccacagattcccaacaggaagtaagggtgttaggcctaacagctgcgctttgggacacagagagttgaaagtgggagcaggacagagcagagaaggatgggtctctgtgaggcagcctctgttctgggaagagtgtgtcttgaaggtcataacaaatgatactcactttgacacctgccggatcctgagatttatttctctggccgcatgtttcagaccaaggtttcgcccgtaacagcttgatgatgtggaagataggtcaagagaaacatgtccggccacgcccactttgctctcccagcttaacggcaaatggttctgcgttcgggggaggggcagttcttaaagaaatacatatatttctttcattgactttgcaggcactgggacttctctctttgctaagctgaatcagtcagcctcagaaaaaggatcatttccctgagtccagagtaggaagtaaggtggaacctgagcccagcagccacgcctggggactcccaagattgacagtaggggcggggctctgtgggggtccctcttcttgggtaggtaatgccctcagtcctcactcagtgtcttatcttgactttttgtaggtgctgggccacttctctgctgacttgaggccatcaaataaggcactaaatctgtaaataaagataattgacatctgtacaatattatgttcaccatatataaacatattgtattgctgtacttaggcatccacctaagtctatcaacacatttttatatttgctttgatagagtgtgtatgtttttgtgaatgttctttttaggtatattttgaatgttgctgctcttttgaatggtatatttttcattccatttttttttatttttaaagccctctcaaatttattgaaatagattttcaggatggtacattaggagaaaaatgaggatgacagaaacatcaaaggatctttcattcaggcactaaaagtaatccagaaaagaacttctcagagaaaatcttaagtagctaggatctttccttatttggaaccattactttcaatttaatgctttgtatattatgtttgttttgtttctactacactggctgagtcagctttgaatttctgaaaagctttacttatgcccctcgcgtaagatcctaatccagttcacagtgaatttcatgacttaaagtcttgaggtagcacaaatgtttttacaagattccttgaggcttctttttctttaacctttattttaagtacaggagtatatgtgtaggtttgttatataggtaaactcgtgtcatgggggtttgttgtacagattattttatcagccttgtattaagtctagcacctattagttatttttcctgaccctctccttcctcccaccctccaccttctaaaaggccccagtatccattgttccgctatatgtgtccatgtgttcccatcatttagctcccacttataagtgagaacatgtggtatttggttttctgtttttattttagtttgctaagaataatggcctccagttccatccatgttcttgaaaagggcatgatcttcttttatggctgcatagtattccatgatgtatatgtgtcacgtttttgttagccagtctaccattgatggacattttggttgagtctatgcctttgctctcttgaatagtaatacaatgaacacatgtgtgaatgtacctttatgatagaataatttatattcctttgggtatctacccagtcataggattgctgggtggaatggtagttttgttttcagctctttgaggaatcaccacactgctttccacactggttaaactaattcatactcccaccaacagtgtgtaagcattcctttttctccacaacctctccagcatctgttattttcttgactttttggtaatagtcattctattttttacattgttacattttctaattagttatttgttgtgagatggtatttcactgtggttttgatttgcgtttctcatcaatgatcaatgatgttgagctttttttcatatgcttgtggccatatgtatatcttcttttgaaaagtgtttgttcatgtcctttgcccacataatgggattgttattacattttctctttttttcttcaacttttaagttctggggtacgtgtgcaggtttgtcacatatgtaaacatgtgccatggtggtttgtgtcacataggtaaacacgtgtcacataggtaaacatatgccatggtggtttgcttcccagatcatcccatcacataggtattaagcccagcatc

SEQ ID NO: 1563831 - DNA, 4001 bp, Homo sapiens
ttccctgatatggtttggatctgtatcctcaccaaatctcatgtctaactgtaatcctcaatgttggaggtggagcctggtgggagatgactggatcatgagggcaggtttttcatgaatggtttagcaccattccccttaacgatgacttctcatgagatctggtcatttaaaagtgtgtagcgcctcccctggcctcttgatcctgctctggccatgtaacatgtctgcttccccttccccttctgccatgattgtaaatttcctgagccctgctcccagaagctgagcaaatgccagcatcatgcttcctgtacagcctgcagaactgtgagccaattaaacctcttttctttgtaaattacccagtcttgggtatttatagtaatgccagaatggaccaattagtacattacttctgttgacaagtgatcaccaccctcagattaaaactctcatttccctgttacccttgagtgggaactgatgggcacctctgtttcacatttctgcctggggtctctcagagctgacagtactgaggattgtgtggctcccactaatatggggtgggagccccctgcagtcgtcagagttcttatcataacatctggcacaacctggaaaccctccctctgctgacctcaagctgccttttttttttttttttttaagagacggagtctcgccctttcgcctaggccggactgcagtggctctatctcggctcactgcaaactccgcctcccaggttcacaccattctcctgcctcagcctcccgagtagctgggattacaggcgcccgccaccgctccccgctaattttttttttggtatttttagtagagacagggtttcaccgtgttagccaggatggtctcgatctcctgacctcgtgatccgcctgtctcggcctcccaaagtgctgggattacaggcgtgagccaccgcgcccggccaggctgccctctttaatggggtcgttcacttctctgagatgtcttggggagagtgagtacaactcaacatgccatgctcaggtctccctggtctgacaacaagagtgggctctatatggcacttctttctggttggagtcccctcctcatcactcagtgtcacatccttgcttcctgttagagactgggcctctctgtcgcattagacctaccccattacaccaagaccctcacctccctgagaccacctccagaggaaactagagagcatctcagcttgctagctttgccctgaccttcctattgctggcagcagatgtgggtcttggatgtagccctcaacttctttagtcccgggagaggaagtcaggttgctctgcatttgtcatgtcagcctgggaccatctaaaacccagtgtcacctcggcctgggaactgcccagcatgactcctcttttgggtagaggtccgctcattaatactcagagtcctcaccttaaccccagttaggttttaggttgatgccatatgagcagaagcagggctgcttcctaggttcaaggccctcccctccctgagactttccaggcacagctttgctggggcctcccagagccgtcttcagggacgagacttagtgaggccacctttgttaagggtaggagatgttctcttcagtccacatttagggccctcaaattgatttcagttagggcctacacccaccctacgtgcagaatgaggcctattccctgcgtccaaacctccttcccccgcgactgcccctccccccacccttcccctgccctggaactttccaggtggaacattgccggacggctttaccggagcctctcaggaccaaatgcagaagcgggacttagtggggccctctttgttacaggtgggggtggtctcttcagtttacactcagggtcctcaccttgactgccgaccagtcctgagaattcacccctggctgaccagacgccgcaccccctacactcgctcgggtcctcgcctccaaagcggaagtcaggatgagccacatccgctcgggtcttttttttcaaagcggaagtcaggatgactcacatccggcagcccgtggcgtctgagggctgacggctggacgctaccggacgtcactgttctagcgttgctggtcccttcgtctccactaggggtcctcacctcagtatctagcagcctgggacgaatatgcgtgctgacccaaatccgccagcctccaaacaatacccccacctccctcagcccccactgtggaaatctaagcgtgccaaacaggccacccctgcctgggcctcacaggcctgacagcagcggcagggctctgtgaatgtgccttttttggggagaggtcttctcatccgccctcagagtcctcaccttgattcccgtgaaagccaagactctctctctgcacaactggggtcaccctcttcagacaaaggcccttccttccccgagactatacaggtggaatgaaggggattcagagatacttattttggggcctctcggtgctaacaatggcgaggggctctgtttggccccctctgctggtgttgcaagggggagagccccctcgtaacacttaggatcctcaccttgattcctgttagggcgtgggttttgtctctttgacctagggccatttccactagtccaaggtcttcacctctgtgaaacacacgaggcatattgatgggatttctccacctcataattctcttctgggctccccaagggtgacagcattggtggaatttgtgggctcctctgttctggggtgggtggttttgaaactgcccctatgaactgtataaaattaatcagggaagagggaagggagataaatgaagatacgccaagcttgcagaacattcagcattaatcatgaagtcagctgctctctgacctgcttcctcatagtagtttggtgcctattatcccagaatcatgtagatcctgttactagattatagttgcccttaattgctctatagataacaattttaacataatgaaactttttttctttgagatattccttaaggtcctgcatactgatgattctaatgactcagctggtctgaaggaccccactgatgccagctgctctaaaggaccctactgacatcagctggtccaaaagaccccacaggagctgactaaaaaaaaaaaaacgcagtttccacattctgatgatttcatcccctttaccccaacgaatcaacaacctcagttctccagcccctcgccctccatgatctccttgcaaatcccagcccagaactccttggggagatgaatttgagagtctcttctcatctcctcacttggcaccctgcaatcattaaactctttgctgcaaactttgctgttttattatagtgggtctgttactttgcagctgacacagaaactcgttggtcctataacagttctcttatttctcttcagggtcctcaccatgacacctggccagtcttggggcactccatcctccactgacctgaggctgttcccatcagatcaaggtactcaccctctgccgacctctgaactggaagttgtggtgagctacatttagccagggctgttctggactttgaagggctgacagcctgagctggactttttgggaccccacagttctggctgggtccttccatcatcttcattcagggtcctcacgttcatatctatcagaggctgaactgcatctactgacatgaagttgaccttcttaggccatgtccatgagaggtctgaagattaaatgagtggatgctcagcctgacagttctgtctcgagctctctaggtctgagagcagatgagagtcagtctatgcataacctcatatattctgagatattggtttcccatgtcctctgaactggggatcatctttcattaaaggctttctgggaaatgtcacatccctgcaaacatgaccagtttttctactgcaaaccttgcagagaaggagccgtgttccgggagtgatgtgag

SEQ ID NO: 1563832 - DNA, 4001 bp, Homo sapiens
tgttgtcccggctggtttcgaactcctgggggggcccaaacagttcactcgcctcggcctcccagtgtgctgggattacaggcctgagacgccgtaccggcttggtcttcatcttgactctagttagggccaagagacctctgaagaactgaggctgccctgttagagaaagccttcccctccctgagacccgccaggctgaaatgagaggcaagccagttttatagttccgcctagggctttccagggttaaaaacatggattgtcccttcagtccccgctgagggttcttacctttactccggatcagttctaagactcacgctaggccacgaacctgactgaagctattgcacccgtcaggccaactgcctcactttcaaagcggaagtgaggctgagccacaccccgctcggggtctccgagggctgacagcagcgggtgacacgctgggaccccactgttctggagtcagtggtccctaggtccttattcagggttctcaccttgatactaagcggagcagagtaacacctctactgagcgaagtccgccaacctccaaaatcctcccctcccatagtccctagaggggaagtctaggcatgttatcggaccatgtcctggggcttcaaagacctgaaacagggttagggcttttggtgggcccttcttttggagagaggttccctggttagcaccggtgggcctcatatttctttctttctttctttcttttttttttttttttttttttttttgtgacaggggctctctctgtcttccaggctggagtgtagccgcgcaatcttgacttaccacaacctccacctcccagtcctcgaactcctgtgcttaagcgatgaggctggcttcgtcctcccaaaatgttgggattacaagcgtgagccagagccctgccttaaaattaaaaaaaaaaagtttatatttatttatttatttattttgagatggagtctcgctctgtcacccaggcgggagtgcagtggcgctatcttggctcactgcaacctctgcctcccgggttcaagcgattctcctgcctccgcctcccgaatagctgggactacacgtgcgccgcaccacgcccggctaatttgagacagtgtttctctctgtcacccaggctggagcgcagtggcgtgaccttggctcactgcagccttgacccctagggcttaagcgatcctcccacctcagcctcctgggtagctgggactacaggggtgctccactgctgccccgccattttttttttttttgtagagacaggttttcgccatgttgtcccggctggtttcgaactcctgggggggcccaaacagttcactcgcctcggcctcccagtgtgctgggattacaggcctgagatgccgcaccggcttggtcttcatcttgactctagttagggccaagagacctctgaagaactgaggctgccctgttagacaaagccttcccctccctgagatccgccaggctgaaatgagaggcaagccagttttatagctctgcctagggctttccagggttaaaaatatggattgggctccgagaagtccccttatttgtgggtttagttttcccttttttactcactcaagaacctcacttcgctgctggccagtcctgggactccacattccatgccatgaatcctgctcagatcaaggtcctccgagatctaggctgaagttttgatgagccacattaggccagggatgtttgggtcctgtgagggcagacagcggagtcgggtttctatgggacatcactgttctggctcctcctgttcttcattcaaggtcctccctgatatctgccagaccctggatcctccctctagttaactgaggtcaccttaggtcaaaactctcacttcactgagaactctgaagggtaaaagagaggatgctcagtctgactgcactgcctggggcattctaggctgagaagaggtttgggtagattgccccgttatcttttggtgtggttgtctttccagtatttatttatgggtgtcctccttattttctcttgcctctctgaataaaggcttcctgggaaatgccacatccctgcaaactcttgggcagcgttcctactgcaaaccttgcaagtctgtgccccagggctaatgtgaggtaaagaaattataacacaaagcagggagtccaaggtagctggtgggttgtcagagaaaaatgatgctgatttactcttttcaatagccagcactagcctcttatgtgacttctgttttaattgatttacttcttaaggggaaggagctgttcaagatgattgtgtggtccctgattttgaggttatctgactgtgcatatgtagatgatcatattgtcactgaataatatctctttctcctctttatttgtagctttcatttattttgatattctttattgctttggctatgtattccaatccaattctttgggcacagaatccttctttttaacccctgagatatatttggaagtattgagaagaaaagtgaattaaagaacacaaagtctgctccaggcagagaggaacagaatgaagagtgtgggctctagaagaattcacaacaggagtctagtcccagccctgtcacttactcaccctgtgaacttgagcatattaccaaactccaaacaaagaaattataatcaaacaaaatgctgcttagcaaggaaaattatataatttataaagtgtttgtggaagagccttctccaattggatacaactcaagtctcaaaatttttgtcaatgaccaatatttttttctaactcctaggcacccttctatgttaaccactcctgttttgatttttattatttatttattttttttttttgagatggagtctcactctgtcacccaggctggagtgcagaggcactatctcggctcattgcaacctgtgcctcagggctcaagtgattctcgtgcctcagcctccctagtagctgggattacagatgtccaccaccacgcccaactaatttttgtatttttggtagagacggggtttcaccacgttggccagactaatcttgaactcctgatctcaagagatccacctgcctcgcctcccaaagtgctgggattacaggcatgaaccaccatgcctggctgcacccctgttgaaagtccttttaatagagcgggctcttgattctccaacccaggacaaagagtgccagcacggtggcttctgggcatcttacctcccctgaagctgtcatctcccttatttctcagaaactcactagagatgatgtacatagaacacctaggttgtgcactgtattagactgtgctaggatagggacatagaacacttttcacttttgtcctaggtaggggttctctctggttttcccacaacaggaaagtaaatgttagggatagtttcccattccgggcttagtctctcaacactgaaatgcaccaactgtataaagcacctagtttgtgcactgtgactatgttctgctgcactgggacaagagcacagggcacattccattcctgccccaggtgcagattctctctggtttatccgtgagcacaaaataactgttaagaactacttcccattccaggctttgtctcacacctctgagaggcaccatctgagggcctggcccctcccacagtctcatccagcccaccatgtagtttcccttaaaattacctcccaatgggggacttgaggtttcctaacactccaaactgccttgcctcagggcatttacacttgattgctctcatctcaaacctcctctttttctcattcctcctttgtacttgttctttaagttttagagagcacctcatcatcttttttttttttatgacagctgctcccagactctaaaattaaatgggcaagaaattgatttgttttggggaaaacattcccagtactaacatgaagacttccaaagagctgatgctcaattaatgat

SEQ ID NO: 1563833 - DNA, 4001 bp, Homo sapiens
acactgaaaaacaggaaaaagaaaagataaatcattttacatacaaatatgttatacatggtgttcccaccaactcccctttggctctccattaattagaaggttaagtgttttcttaatcaaaagtaaagaatatacctcagacttcacaaggagtgggagacactgctggacaccacactgaaacatgccaggcccagttgcaacactgtctctggctctctctccctcatctcttaaagtcttctcttaatggagggaagacaatggagacactgtcattgaccttggcccaggcctccacattcttgaataatctaagcaaaccaggtatgtaacttttaaatttatgagcaaaaaaagactgaactgagtaagacaaaccacgaataaagcaacttttacttttcttccctttctatcttcagattctacctattttactgtggagttattttaaatttctaaggataaccttactcccatgccgtgttattttgctctgtatcacaaaaattatttcaggattttctatttgtatttcaaaaacaaaattattatcactaaaccaacctgataaacagcaataaatgtgtgatgcatgccatttctaaatttatattctgaatctaaataaactttctattttaagaaacatcatggaaaatacaacaaagagataaatcaatgagttattcatgcatcacaggaacagagaaagcagcaggtctttcaaccacaaagtgaacaatttgccttagatctcacatgggttgggaagagctactggatgtggccctggaatacgcactagtcatggctgtagtgccacgcctggctgcaactctgggccgggctccagctctctcttcttcatctctcaaagcctcttcataaagcagtgggaagttattgggggtggtgtcattcaccttggccaaaaactccaggactttcatcttgctggtttctgcatgagctcttggaccccacaggaattgatagcgtgggggatcactgttgggcacctgctggtattccagatatttttcctgtaccagatcttgggtgatgagctttcggggttccccaaagataaggtgcctctttccatcatagatccccagcatattcaggaattcccagatttcctcttcacgggcacagttgccatttaagaagatcacactcagtagaggcatcagaagcccattccttggaagggtccaggcactgctctggtttccatcgttggggcctagcatgctgacgaggatgtaggagtgagtggtggggttgacctccttcaaggcaaggccaaagaccagctccgtgcgctgagagactttcctgaagatctcagggaagtgctccttgtactttttgctgatgatcttcagcatttctgcctttgtagtgggctctttcattttatacttgtacagcaggaactgcactaacatcttcgtcttcctggttagagaatctttgagtgatctctcagtggatgttgaggcctgggaggaacttgcattttcctcatcttggctctcgtcgcctttatcagatccagtgcatgacatagctgcagcagcagaggtggtgggtggctctctctgaggctcctggggaatgccaaaagcaagggagctggaggcagtatccctcaaaacagatgaggaagaggaaggagactcttctttctctgctgcagtaggctgaccaaccttgagatcctgggtctgaccacgggtccgctggcgtttctcacgggcacggagcttactcttctgaccccgaggcatgatggctgtggttaggcacagcaggcaggagtgtaggcagaagggcaggtgatgtggttcctggagaagagcaaatgaaatcctgagaacaccttcagcaggcagatactaccttggcttttcagaagccgcctctgcaggattccttgagaacactgctctaagtattcactgggctattgttcttagtcattctgtcccctgagaagccagctgaggaagttacaatgtgccttaggctgcagcttgccaaccctgcctggggctgactgggtgacaacaaggctcgcagtggggctttctgtgttctggcttggagaggatccactctgattacctttagaattgtcatgtcagctcttggcagggcctgagcctccctctattggtgttgtgaaattgactctttagttttctgggacccagatgagggaagtctaggggcccctcaacccaccacccctgcctagaagcatttagtgctctctctgtcctgggctctttaggtcccaagtttgcactcaggatcctcatctggactccaagcagggttgtggactgtctcttctgctgactgataactgcaacttcagaccaagaatttcatcttttctagttctggtataaaatgtgatgggcatctatgaaagaaaataattgataatctggacttcgctaaattaaaacttctgctctgctaaagataccacaaagagaataagataactcccaggttgggaaaaaattattttcaaaagacatatctgataagggactgttaaccaaaacatacaaaaatgtcttaaaactgaacaataagaactgaccaaccctattaaaaatggacaaaagatctaaacaggcacctcaacaaataatatatatggaaggcaaatacgtacatgaaatgatggtcaacatcacatatcattagagacttgcaaattaaaacaataatgtgataccactacatacctataagaatggtcaaaatcaaaaaccctgataaccccaaatactgatgaggatgtggagcaacaggagcacactgtcattgctgatggacatgaaaaatgatacagccacttttgaagacagtttgtaagtttcttacaaagctatgcatactttcatcatatgatctagcaagtgcgctccttgttatttagccagatgagttgaaaacggtatgtccacaaaaaaaacctgcacacaaatgtttatagtagctttattcataattgcccaaactgggaagcaagcaatatgtccttcagaaggagagtggataaattaacagaataaaatattattcagcactaaaagggaatgaactatcaagccacaaagagacatggatgaaacttagatacatattacaaagtgaaagaagccaatttgaaaagtctatacattgcataattccatctatatgacattctggaaaaggcaaaagtatggaaacagtacaaagttcagtggtttccaaaggttggggagagtgagagataaatagatcaggcacagagaacttttaaggcagtaaaacaattctggatgattctatggtggtaaacatatgtcattatacatttttaaatattaaaaccacagaatgtgcagcaacaggaatgaatcctaaactacggacattgggtgataatgatgtgtccatgtattctcaattgtaacaaatgtatcaccctggcttgggaggttgatatgaaggaggctgtgtctgtgggaggacaggatgcctgtgagactctcctttctgctcagttttgctgtgaacgtaaaactattctaaaaaagaaggtcaattattaaaaaaaaaaagtgatggtgagtcctcagccttacatgttgccctggcaatttaagagttatgcaggggggtggactctgttgctctctctattcagaggtgagcagtcccctcagttctcactcggtttccttgatttggctcctagcagatcctagggctcccctcttttttgacctgaagacctctccatttaaaaggcctgcacctccctgagatcagataggaggaagagggtggccttatctggccacagctgaccatggtctcccaagagtggcagctgtggtagacaggttgaggtcttatggtggattgtcctactcaggtcctaactcaggatcctaaatctcactcacaggaaggct

SEQ ID NO: 1563834 - DNA, 4001 bp, Homo sapiens
atgttatatttgcttgactggatgaaaaaagcttcagacttcaatagggttgagagaagctgctgaacttcgccctgagacagtcttggccactgcagtagtgccagtttcggctgcatctctggcttgggctctcttcctcatcttgcaaagcctcttcatattgtgatgagaaggcacctggagcaatatcattgaccttggccaaatattccaggactttcatcttgctggtttcagtataggctcttggaccccaaaggaattgatagtgtgcaggataactgcagggcacctggtggtactccaggtacgttagcctcacgaaatcctgagtgatgagcttcctgggctctccatagatgtagtacttcttcccatcatatatttgcatcatatccagaaatttccaggtatcttccttgttggcacagttgcctttcaggaagatcacaaccaggaaagtcatgaggagaccagtcttgggtaacactttgccaacatgaatcctcccattgttggggagtttcagcttgctgacaaggtcatataagtgacaagttgggttgacttccttcaagtcaactgcaaagacaacctcaatgtgctcagaagctcttctgtgaatctcagcaaactggttttggtatcttgggttgacaatcttcagcatatcttccttcaaaatacgctgtttcattttgaacttgtagagcaggaactgctccaacaaacccaccttaatatttatgaaattgctgcatgaactctcagtggagggtgagacctctgaggaacatgggtactcctcatctctactgttagccctttcgtcagatcctgcattaaaaacacctgcagaagtcatggtgctggattcgcaaggctcctgggaagtgccacttgactcagcagcagatgagctctggggaatatccccaagaataggagaggaagtggggaggggatcatcttccacttattcactggcctgagctccactctgaagcagagagtcatcttggatctggtagtgtttctcacaagtgtggagcttactgttctgatcctgagacatgttgactctgataaaggacagcaggcaggagaatgagtaggagaacgggtcaagagagcccactggaggaggaagattgagagggtctgtgcaccttcaacgtggaaattctaccatggttataataaaaacaacatttgcagttttccatgacggaactgctctaggaacccactgggattctgttctcctgatcaatgtgccccttgggaaacctttggaggaagttagacggaaccataggctttagcctggcagccctgcctcaggcatattaaggtgacatagtggctgccagtcttctgagttgaggggtccttttacttcacattcaagacaatcatgccaactggtggcaggtcatgagaaccatttcctctgaagttatattacaaacctccctgggacccataagaaggatgtgaagggggtcctcagcttatcactgctgtctgagtgcccacggtgctgactgctgagtagattattttctgtcctggcctttctgggatcctcagtcctcacttggggtccttacattggcatatagggcctaggagcccaactcccttcatttgaatggtgactactgcaccttcagactaaggatctcacctcccatagacctgacataaagaggtggtggagagcttcaacttcacaaccctgccctggcccttcaagtactgaaaccagggtagggccagattcttttttaactcttctatttagtggtagattgttcctttagcacttgctttgacctctggtagggtgtggaacttctccttcccttcctaatgcttatcccctcatactaaagacaaaacaaccctgaaacatgccctatggggaacgtgagggtcttctcacctgttctcatttgttcttacctgtcctcgttgtcccaaggctgagagtaacagttgaattctgtggtgttcccactcatagtgtatgtggtcccctcagttattaacgtacttactgtggcctctggagaaacctggaaatcctctagctgctgaccttaactcacaatcagaccaacttccttacttccttgtgacatcatacgaggaagtatgtcacatcatgtcaacaatgcccatgtattccagggctgccagtaagggtggggctccgtgtggttctcttagttctgagggtagagggtttcctaagtcctaactagggaccatcaccttaactcatggcagggccttggactttttgttgacttgaggaccctcccctcagactaagccctcatatctctgaaacccttcttgcagaagtcagcctgacagccctgcccaaggcctctcagggttgatggcagggggaggtcctgtgccacctccctactatagggtctgtggtcccctcagtcatcactcatgcatttgattcctggcagggcatggaacatttccctctactgtctaagtctcaaaaccttagaacgaggttcccactccttgaggtcccagaatgaaaacaggaaatgccacctgtctgtgccctcccagggatgacatcaagattcaggctccttggggctatctctgtggagggtagaggtctgccctcagtccttactcagggtcctcaccttgactctttacaggacttgagtttcttctttcaactttaggtcactcatgtagactaaggctcttatgttcctgagaacactgaacaataagtgagaaatagcctaacagtcctgcttcagtcttccaggtctaaaagcagacacagtctgatctctgttactccatttactatggggtgcttgtttctttacttctcattcgtcagagtcttcattttggtttctacactttctatgagaggcttctggagaaatgccacatcattccaaactcttcattagttttccctctgcaaacgttgcagagaataggatgtgtcctaagaatgatgtgagatgggaaatctgaagcacaaagcagaaagctctggacaggtgtgctttcagagagaaaaaaaaaaaaaaagaaaaccattgctgatacataccttcttgtcactaggcagacttagcttcttatgtaacttctgttcaaatatatctacttgctacagcgaagaggctgagccaaatgattttgtgagtccctagtcttttgaggtttctgacattgactttgcagataatgatattgccaacacatatctctttctttattcacaacttgcatttattttggtattttcgttgcttattccttgggctgtgtattccaaaacagtatttggggtttgaagtcttgctttgtatcacctgagatatattttgaagtagtgagtagaaaataagtaacacaaggtctgcctgaggctggaagaagtgggacagctgtggactctagataaattcagagccagggtctagtctaattctgtcacttgccagtcttgtgaacttgagaaaattgcaagtttttaacctgcaaagtcaatttgataaaccccatcttatcaaatatatatatatatattctatgtaaatcacctgacacagtgttaggtaaactttgggtctttaatgaatggtaattattactaaacttagtttgacccaagatgatgacaatcttcccttacagaattttatttgcagaatatgttagagaatactccaaataacatagaaatccacatctgctgaaatgctgcccagccagtaaaattgagtagtgtttcctcattaaagcatctgttatttggctgtggagttgtctcctttagctggaggcaactcaaagttcttgtttcgtgttagggaccgaaaacttccccggtcacttttccatccaaaccgcccctattttcattcacttcatcaccaccaaaaaccaaaccctcccttagagtttgacaaattatactcaaa

SEQ ID NO: 1563835 - DNA, 4001 bp, Homo sapiens
cttcttctttacagcatctttgcttaagcgcttaaaaatgatggctttctgtgaggcgcttacactttcctcatcttcaccctcggcagccacatcatattttgagcctgaaacacctgcatcaggcgagccagtgggtgaagctccctgagactcctgaggaacggagacatcatgggaagtgcttggacttttctcatcttggccgttggcagccacatcatattttgagcctgaaacacctgcatcaggagagccagtgggtgaagctccctgagactcctgaggaacggaggcatcacgggaggtgcttggacttttctcatcttggccgttggcagccacatcggattttgaatatgaaacaactgcatcaggagacccagtgggtgacactccctgagactcctgaggaatggaggcatcagaagacctacgacaatcacccagacaagcgcgagaagaggatgaggaagagtgggactcttcctgcttctctgcagtggcctggggacccgtgagaccctgtggctgaccattggtctcttggcgtttctcacaggtacggagcttactcttgtgaccccgaggcatgatggctgtggcctgtgacagcaggtaggagtgtgggtaggaagactaggaaggctggcacctggatgggagagagtgacgtcacgtcaatatcttcagcagagagcgaccatcttggctttaactagggccccttctgcaggtttccgcagaacagctgctctaggaacccacaggactccttttctcctggtcagtttgtctccttcaaactcaggaggaagttagagtattagactatagcatgacagcccattttggggcttactgaggtgacagcaggggctggcagtgggggcccctctgttcaggggttggatcctctctgtttacattcaggatcatcattaaaactggaaaccatcattctcagcaaactatcgcaaggacaaaaaaccaaacaccgcatgttctcactcataggtgggaagttaacagtgagaacacatggacacaggaaggggaacatcacactccgaggactgttgtggggtggggggaggggggagggatagcattaggagatatacctagtgctaaatgacgagttaatgggtgcagcacaccagcatggcacatgtatacatatgtaacaaacctgcacattgtgcacatgtaccctaaaacttaaagtataataaaaaaaaaattgttgacaagacccagaggcccatttccttgtgccactctgaaattgacagtaggaattttaacccggaggaaataaggaagcacttctgcccaacacttcattccggggacacccagaccacctagggctgacaacagcggaggcatttgagtgctcttccagttatagtgagaatgctcctcacagtaattagactcctcaccctgactcttcccacaacctggaaatcaccctcactgacctgctgccatctccttacaaccaggggcctacctctctgactctcacagggacaaagtgagaatgcacctcagtctctagagacctgcccggacccccaggctaacgtcaagggcagagttcggtgcaacccgttacgggacatggaatcccctccctcaattctaaggagggtcctcttaactatgtagggcctgagatttctccctctactgacctgggtccacaagccttggaccgaggccttcatgttcttcaacacgacggaaaaaaatgaatggactttgggcctaacagccatgtttggggactcctcagggaccaggtcggggcaggttggggcagggctctgtggagccgcctttcttcgggggaagggggttgaagttgtcggggaatgccccccgttctaggtcaggatacccaccaagacagctgagaagatctgggacgcctccttccgctgacgtgacagcacttttcaggctcaggcgaccggctcagacccctttattaggtggaagtcaagaggaaccacttccggccacgcccacctggcgctccctgcgtaacagtagctgcagggctctgttactcccccttgtgttctgtgggtgcagcagattccagggaactcacgtaaagttctttcaggggctcttcgcggacccttggacttctctatctgttgagctgaatcagtcaaccggagatagaggctctcattccctgagagtccagagttggaagtaaggtgcagcctgagctcgggagccatgccgggaccttccaagactgacagtaggggtggagctctgtgagaccccctttttggaatggactttgccctcagccctcactcagtgtcgtcgcttcattcttgccatgtcccctctactgacttgaggacaccctctcagactagacttcaacttcctgagactcctcatgtgcaattcagttacacctcacctggccactactgcctggggcctcctaaacctggctgctgctattaagttgtgatgcaagatcggggaatgaagggagatttggggggcactcttgtctcttctgatatgtggagcccctcagtcctcactcagggtcctcacattgactgctggcagggtctcagttttctccattttctgatgtaaattcatccccttcctctgactagatcctgtaaaattcataaggagaaagtgagaagacttcttagcctgatagctatgtctgggacttctctcttggctgacatcagtgtctgtattcaacaccttcatgaatgaatttctaccattatcttgtgtgactcactgcaatatttgctatcctaatttagtccattctttatattatattaaaataatacgaatttaaaggccagtccacttccactaaagaagtttcaggtagttattagcacagtgtctggattcatacttcttcagcctacccagatgtttttgctgtggcaatattaccccatggaactggcacatagggtccaagtttctgactgaatttcctttagtgaagcagaaaaaaaaatgcattgtccaatggcacagtgaaagaagcaaagaccaaagttttaaagcttttcctctagccaattccgttatctgcgtctgttgtaggccacagacctgtctctacttcagctcatgcccctacctgcccacacacccattcttgttcaatacaaactgaccatctctcaaggttcgcatttttgttgttttgctgttgttaatactgctttttttttaaaaaaaaattcttcctttaacttttctatggttgagtttggtcatgggaaagaaccacccgggtttggttgtcatcttcacagctatggctaaggcaatgaatctgtaaaaaatttaaggagaatcaataactttacaatatctcctccacagtaaataaacatagtacactgctttattggagatttatttttcctaagtctttcagtaaatttttatagctgtctccttaatgaacatgtacatttctatttggttttctgttagatatattttggatattgttgctgttgtgaaaggcatatttcacattacatattataattagttattgattttgtgtgactatactcctgacttacctatggtgatcttttgtacacacgttttctttatttccttatacatttaaatatttttgcaccaattacgttgttttatttttaaattaggagattatattatcacaattatctccttttgttattgttacctctaatttactcggtattattattatagttgtgaactatagatgtattttcatccagttgtcagcagtagggtttatactatacaggtgtatattcttctggactctattcgggatgtttgtaatgtttcacatttagtatgtcaattatagattttacaagatggaaattctctcctaatgtaagtttgctaaaagttactatcatacactggtattgagggttttttaaggcttctccttt

SEQ ID NO: 1563836 - DNA, 4001 bp, Homo sapiens
gtactctcaggggaactctggaaaatactcaataaagcagaggagaagaaggaactcgcaggattctgcagaggagactggacatcctcaccctcaggagggctctgagaaatctctagaggagacagggagtccttcccctcaggagaactctgagaattctggagaggagactgggtgtcgtcgccctcaggagaactctggggaatctggagaggagactgggagtccttcccctcaggaggtctctggagaggatccgaggagtcctccccctcagaacgactctgaggactctggagaggatacagggtgtcgtcgctctcaggagaactctggggaatctggagaggagactgggagtcctccccctcaggacaactctgaggactctcagaggaactctggagaagactcggcatcccagcagtaggcatatccttgtcccctggagaacgcagaagcagagaggaggatgaggatgagaaagaaaaacaggaggaggacgaggggaataaaaagtggaaagaggaagagaaaatggaggaagcttcctcctcttcctcatctgggggatcctctgcatctaccaactccagtatgaaaattgccttctggaagccttgctcaaagctggggcgtggaaggtttagaaagagaggcatgatgaatattgttcaggagcagcaggtaaacgtgtgaacacgaataggtatgatgggatcccacaggactgagggagagagggacagtgccagtggcctcagctgagaaactcacccatgatggctctgacaaaggccggcttacagctcttcttctcttaaggtggtgctctagggcctcacaggtcgcctgtcttcctagggggtttgtcttctgggaacctgtagaaggacgcgagaaagcacctcggggcacagctggcaggcagagcctgaggcaccaggaatgacagtgggtggctacaggccgggtgctgccaggtctgccctgtttctgggggtagggcccttggtacacagtcaggtcgtgcactcaccttgactcctggcactgcctgggcctcctctgctgtggtgcttttaggatgtatgtgtccctcacacccaggtcttcaactcctgctttctggagcacctgcaagaggaagggagggagcccctccagctaagacggcagctggggctggccagactcccagagtcccacaattctgaggttcgtgaccccctcagaattcaattagcattgtcacattttctcagacagggccaggcccccaccactctgctggcctgaggaaaaacctcaggaaaactccacatcactgagagcagtgggaggtagtgaggtggcagccacctcccagcactctaccacgggggcggtccctgtggcctcacgtctgttctgacgcacatgtgacccctcagtcctcactcttgttcccagcagggcctgggaatcttccctctgccaactggaggcagctccccatgctgacttgccatgggacccccagaacaaggcctcctcctccccctcccctacacccctcacccagcagtgagagggtggccgctcagcctcagccacctggggagctctatgggggctgatttgaggagcagggtgggaatctctgggaatctgtcctctgaggtgggggttcccccggtcctcctcaatgccttcctatttattctctagagggccggcatttcctcccttcttctgccgtgaggacacgtccctcagccctcggctaccatcttcgtttccgccacctacaagtgccaccgcagggatagggcaggccagggctgcttctctctgtggtggggttgtccctcacttctccctcggggccctcaccttgaagactggataggtctataagtctcctccctccgctgacctgagacgatcctcgtcacaaaatgcctcaggtccttcagactcccaagatggccgccgggaaagcacatccggcaaagcacatccgggaactctgtcagggttgatcagggctgacagcccggatagcgtggggcggggcctcctctcagaggaggaaggcgccccccccccgccgcccgcttgtcagcctcctttccatcccttccttcccacctccaggatgtgctccaaacctttctgctcactccctaagccctgctgacctcttccctcccacctccccagtccttgacactcacaccccacctttttccagggctgacagcagggagtggcagggtgcagcctgtgcctcccccgtgttcggaggtcactgtccttcgacagagttctcttcttgttgagtggccagccctggggctactccctctgtttaactgaagctgccctcctcagagaaaatctcccctctggctgactcccaaaatggaagtcagaaatttgtaaatctggggaccctgatgggctcctccatggctggcagcaggcacagggacaggacaggcagcactaccagtcatgggtgttcccttcctgccttcctgagaggctgttcctggactcctgacattgtctgggctccctgcctctatgcatctgagtctttcacctccgaataagcccctcccatccttgagacctgcaaggtgcaagagaggtagaatcacatccatccacagtggggtatggcctcccagactccaggtagggctccactgccctccgtctgaaatggcatgggagggaccctcagtcttcctcaacctattattcctgatacggcctccactccctccctcttctctccagggactgtttttcagatcaaggttcccatttccatgaaccccccaagagggactggagcacgctagcgtctctccctaatggccctgcccaaggcctcctagcagtgaaaacgggcaggtttttggggatcctcctgtgtccgtggtggggtagctcaccagtccatcctctgtatcagcctggggatgcctagaaggcccccctcctgatcttccgctctcatgatctgaagtgagactcacctaagcacagccttctcctctttctacacgctaagacgtcaggggacagcactgtgggtcaacatgcccctgggcctcccagggatgacaacaggtggggagctggtttctgtggatcctcttctttgtgggcaggaggtttctgcagttttccctcagaggcctcatctgactactggctggtcctgggtcttcctatccttcccaagatgacagtatgacacagggaaaaaagtaatgtgactttaccctgaagaaaactgacaaacactaggtcaccatggtgatcaaagtaacatcatcagtgacaaattgtgttggtattatgtgccgtcggtatgatatgataagaatggcacttcacttctctgttcatcttccgagaaaacgtaacctacatcaaatcataaaaaataatcacttaattcccaatcaaaggctattttacaaaatacctgaccatacacctccaaactgtcaatgttttcaaaatcaagagaagtctcagtgaactggcacagccaaagggcatttaaagagacatgatgaacaagtgtaatggcgtatcctcagggtatcttgggacagaaaatagactttcgtgacaaggaaataaatgtgaataaagtatgtttattaataaacaaaggatgtttgcataggaatagtaccagctcttctttaataaccacattttaacttccttgcctctgagataatcccgtctccaaataatgccacatgttaatttcaacataagacttcagtgggggtgcaattgaatctataatagtggaaagggaagtggcagacctatatgtatattattacccatgtgtagttataaacacatacataagctcatatatgtataaattttactttaaaaaccacatcaatcttctcaaaattctaaatcagcttttaaatttaaacaccacacggttaattgtggaaacttctgaa

SEQ ID NO: 1563837 - DNA, 4001 bp, Homo sapiens
taataatcaggaggctgttctcgggcatgccctcatcatcactaccctcatcggtgaggcctactgtgtttgcaaacacacagaagtggtcagggcccacttctatcagggcaaggccaaaaagaagctccatgaactcacgggctctcttgagtatcacaggaaagtaatctttgtacttgatgacaatcatcagcatctctgcctctgttacaggctcctctgcttcgtatttgaggagcaggaactccactaactcggccaccttttcatctagtgtatatgtgaaagaggactcactgtctggcaggccctgacaggtgcctgtatcctcccctttctggctgctggactcctcactgaatgagctccatgaaaaagaggagcagcaggagctcagaggactctgggaaggaccctgtggaggaccctgtggaggactactgggaatgctctcggtaagatttggtatcacaccagagggcacctcctcctcctcaggaccaccaagaatcagagaagaggatgtggagaaagaagagggggaaaatactaagtacaaagtggaagaggcggaggaggcttcctcctcttcctcatctgtgggatgctgtgcatctacccagtcttctaactcaactgaggtcggggagtcgttgtcaacgttgcggaatggaacgcctggaacgggaggcatgacgacttcttcaggagcagcaggtaaacgtatcaacagggatatggatgatgagatccaacaggcctgtggaagagagtgacagtgtgagtggcctcagctgagaaactcacccatgatggctctgacaaaggccaccttacagctcttcttctcttaaggtggtgctctagggcctcacaggtctcctgtcttcctagggagtttgtctgctgggaacctgtaggaggatgtgggaacacacctcagggcacagctggcaggcagagcctgagaccccaggagtgacaataggtgggtagggccgggtgctgtggggtctcctctgtttctgggggtagggcccttggtacacagccagggtgtgcactcaccttgactcctggcactgcctgggcctcctctgctgtgctgactttaggctgtgtgcctcacacccagttcgtcaccacctggttcctggagcacctgcaagaggaagtgagggagcccctcaggctaaagactgcaagtagggtcttgggcctgctagggctgacagctggggctggccagaatcccagagcctcatagttctggactgcatggccccctcagaatttaattagcaacttcacggcttctcagagagggccgagcctccaccactctgctggcctaaggcaaaacctcagagcaaccgccacatccctgagagcagtgggaggtagggcggtggcagccacctcccagcactctaccatgggggcagtcggggtagcctcacgtccgttctgatgcacatgtgactcctcagtcttatccccagcagggcctgggaatcttccctctgccaaccagaggcagctccccgtgctgacttgccatgggaccctcagaccaaggcctccgcctcccctacgccactcacccaggaataagatggctgccaccccgcctgagctgactggggagctctacgagggctgatacttgaggagcagggtgggaatctctgggaatctgccctctgaggtgggggttcccccagccctcctcagtgtcttcctatttattccctagagggccggcacctcctcccttcttctggggccatttccctgtctgggacctaccagtctcacggcagcgcagtacaggccggggtttcttctctctatggtgggaggtccctcagttcttcctcagggccctcaccctgaggactggccaggtctaagactcttccccccgctaacttgattcgcgcctcctcacaaatgccttcgatccgtcagattcccaagatggccgtcgggaaagcacatccgggaaccctgccgtggttgtccagggctgacgcagcgtcaatgtggggcggggcctcctctctgaggaggaaccaccccccacctctctgctttttttccatcccttcctccccacctcccagctgccctccaacccttcctgctcactccctaagccttgcggacctcttcactcccacctccccagtccttgacaccccactctcctttttccaggggtgtcagcagggagtggcttggtgcagtctgcgcctcccctccgtgttgggaggtcaccgtccttccacatctctcttgttttttggccagttctgggacttctttctctgcttaactgaagctgccctcctcagagacaacagcctccccttctgctgactctcaaaatggaagtcagaaaattgtacatctggggaccctgatggggtcctccagagctggcagcagggacaggggaggggcactaccagtcatgggtgttcccttccagccttcctgagaggctgtgcctggactcctgatactgcctgggatgcctgaccctgtgcatctgagtctttcacctccgaataagcccctcccatccctgagacctgcaaggtgcaagagagggagaatcacatccatccacagtgggatagggcctcctagccctaaggcaggcctccactgccctctgaaatggggtgggaatgcccctctgtctttctcaaggtatgactcctaaaagagcctatactccttccttctcctgtccagacagcaacatttgttccttcgacctctaaattccattccaagtttttccactttactgctgtgagtgaaattagtgtcatctctcccataccctgtgttaaaggcttccttattgttgcttcttttcctatcctagtccctgaaaaaaaccactgtcttttcagcaacccgtgaccctttaaaaaaccaatacgtgattaaagttttaaatacacacatcagatttaactagaatgtgaagttatatgtattttggaaaatgcatggactcccatatctaccaaccaagtatcatactgaccagttccacctgcctaaacttctcctgtgcatcccttttgaggtcaatcaccgcacttctacaaagctcctagcaactgtcttctgttttcagttcctatacttttaacttttccaatttgtcatatgattagcttcataaaatactgacttaaaagtgtgcctgtactattttttatcacaactagcaaggaatgagaatttctgttattctatatcctctcttacattgagtattttagattttcaggttttagccattctcataagcatgtattggaaccttctttggtttttgtttgcctcttcttaatgacatatgacattggtcatctttttatatgctttttttccgtttgctatattccctttcgtaaagtgtctattcaaatcatttgcatcgttttatagatgaataaacttcatttttagagcattgctaattcaaaaatacaaagagaaatcttcatcagaattagagttcctacataatctacaccacccgccctgccctgattgctgcacacacacacaaagtctatctttttatttacattttgtattattatgacatgtttgctacaactgatggaactgtattgatacctcacacttaagtccatggtttacatcaggactcactcttaacgatggggatattatacatttcgataagggtgtaatggcaagtattcatcattgtattgtcccacagaattgtttcaccatcttagagctcctgtgtgttccacctaatgaatcaattccccttgccccaaccccagccctcagcccctggaaaccagtaatatttttagtgtattcatcattgcatgttccagaatgtggtatgctaggaagcctttttagattttcttctttcatttagcaatatgctttcatgattcctccaggtctatcccactaacaatgac

SEQ ID NO: 1563838 - DNA, 4001 bp, Homo sapiens
tttatttagattgcaagctaaaaactaattagaaagactatacttttgctgttaactttctcagaggtaaaatatcacttttctttagtggtttgtgatgctatgaatgaatactttccaggttgggtatttcctggctgttaaatatcagttaagttttggctgacttcacctccatctatcaacctccctgccaatcatttaacagctatagaataggtctcctcacacaaatccttcaggaagaatttccattgtgcacattctgaccagaagaaaaaatgcagcaaatttttggaaagtgaatcatttttagagttctgagcaaattatgttaaactcagggtttctcactgtcagcaccatcacattttaggcagtataattctttcttgtgtgaggtcgtcctttgtccaataagacgcttagaagcatctctgtctctgcttattaaataccagtagcattccctgctgccaccaattatgacaaccaacaatatttctagatattggcaagtatcccctaagtggcaaaatctcttccagttaagaaccactgagttaagaacagtaagtaatgatccagggaaaatggatataaagatattaaaaagctagtaaagcatttgacatattagaaatgcatataaacaattcatatttataaaataaaatctactgaagatataatgaataaacacttgttttggtgagcaagcttgggattgcagctgtgggcctggaagtggtaggagctgcaaagcctgcccaggattagctgtagccagagccggcagccaagacaatagcaaagatcaatttgacctcaagatataatcaaatatgacagcagagtgaatgaagcttttattttgctccgttcttctccataatccttcttatgcccataatcattataattacataaaatatttaaaaacctttaaaaattatttcttggaaaccatgaatatggcagactagaggcattttgtactcactttctccattaaaaataaccaaacggtgagtcgataatcacactttgaatatataattcaaaggaaatcactggaatccattagaaaagtgataggcaatacttaaagcagagatggagagggaatcaaggcagcctgctcatccaggatcagctgtgagctgagagactccaaatacagagaaaggataggtgagagagcctcagtagtttacattctcactatagactcctataatcccagccacaggagatcccttcaaccatcatgggccccgaaactaacatagaaagctgccaggagattgtatgatggcactgcttcagggagaaagctcccgctgggtccctcacacttcttgagacttaagcagctacaacaaagtaccattttagagccctgccctcaacagactgagcactgtcctggagcccagtagcccagggctgaggtgcaagagaagcacgaactgctgccccagggacataggcatcagtgactacagactacagcatctggtgcagaggtgggacgaaggcgtgggctgctgcttttaggactgaggcacaaatgaggcaccactgcagagcctcacccccgatgaactacatactgtcctggagcccagtggcattgaggcctaggtgcaaactaaatgtctgatgtttccctggagattcagacatgagcgaccacaggctactgcaaccaagggaaagacatgaacatcaaggctgggcaagatagcatcttagagcctcacccccaacagactgcacactgtcttggagccaagcaacactgaggctgagatgcaaaagaagagctggctgttaacctggggcttagacatgagcattcatgggctaccacacctggggctgaggtgggagcaccactggggataaggcatatgtggcacatgtgtttttcacccactggcctagactgccatcactgaaggtggcatccaacacccagtggcagggcagcagcatggccactgccaccctgtctttaccaaagagatagagaccataaaaaaggaacgaacagaaattctggagccaaagaatgcagtgaataaactaaaaaatacacatgaaagcttcaacaatatactcaatcataactgacttatgttaagatcacattttgcttgaagacagttttttttgaaataacgctgtcagacaaaaataaagaaaaaaagaaaataataaaataaacctttggaatctatctaacaacataaagtgaccaaatataaaaatcactgatagcccagaaggcaaagagagaaaacatgttttcaaagacctatttattgaaataatagatgacacttcctaagtcgagcaagacacttagacattgagatacaggaggcccatcaattcctaaacagatacaatgtgaaaaggtctcttccatagcacattacagacaaaatatttaaagttttttttttctttttttccaagatggcagattggaagcattataagcatacttatcccacttggtaagacaaaatggcatgtagagattcatgctgtaaaatttattcgaagaaacaatgtaagaacttaacagaaaaactgaaagaaaccacagaccctttgaatgaagtggcaggcaacagactacatcataaaacagatggaaaaccattagtccccagagcatgagagagggatagattgctgtcatgacatatactcccacaggcgagccaggcaatacaagtcatgagggaggacttcaaacctactcagctctagaggtgattcagtgaaaagtaaggaatatataagaaggagcagcatcgggacatgctttgtgtgcagacccagattccagcaagaatggagggaagccattcctgatcccacctcacgggacgttgcagaagtctaactcaggctgcagtcacagtttgagagaagagcccaactgggatttgtgatataatccttagtaaggacaaagctgattggccagaaccgaggggcaagtgagaagtgtgctacggcaacaaggcacatgagctgcatggccctgcttcacaggtggactggaaaggatgcagcctgaaagatatggtttctgtgtccatagggaaagcttatggcctgggatggttttaaattctgagcacgggccacttgaaacccagttagctgctgctgctagcagaacactgtgggtatgaaaactgacttgccaagtgtgtgggagctgagtggggcttattacaacctgctgcctcccacttttcaggcagattttttgtgcagcagaggcagctgtgttcctgcctggaacattaccccaccagccagggaactgccctcggatccccactggggccactgcttgcacctgcacatggggagccagagtgcagacttgcctgactcagtttaataacttctgaggcacaatgaaatcatcccaatgcctccatgttcaatttcaggcactaacaagtccctgaggtattaaatgcattgcttttctgcggtcttgccaccttcaggagcttactaagaaaatgaagaagagccacgatcactcctctcaattagcctcttcccttggctgagaaatgtgtttccggtcttgagaacacagaagttttgcatttgctcatgagagatctgaaaccttctgacactgccctgcatcttttccattccctctaaatagagaagactcttctcctgtctcctaccttctgctctgacatccattcactaacacctaggcacaaaaagcctagttcacccaatggcagaaacggctaaggtgggcctcttccaagctatgaacaacatttcaaagcttaagtccctaccctcttccaacacaatgtccttttcattcctctagctcagtagtgctcagattgggggtgattttgcaccccatcccaagaagacattttgcagtctggaaatatttttggttgtcacaactgggatggctcttggtg

SEQ ID NO: 1563839 - DNA, 4001 bp, Homo sapiens
ggaaagagaggcatgaggcctgttgttcaggagcagcaggtaaacgtgtgagcagggatggggatgatgggatcccacaggcctgaggaagacagtgacagtgtgagtagcttcagctgagaaactcacctatgatggttctgacaaaggctggcttacagctcttcttctcttaaggtggtgctctagggcctcacaggtcgcctgtcttcctaagaggtttgctccctcagaacctgtaggaggatgtgagaaagcacctcggggcacagctggcaggcagagcctgaggcaccaggaatggcagtaggtggctatggccaggtgctgccaggtctgctctgtttgtgggggtagggcccttggtacacagtcagggcgtgcactcaccttgactcctgatattgcctgggcctcctctgctgtgctgactttaggaagtgtgcctcagacccaggtcttcaactcctggttcctggagcacctgcaagaggaagtgagggagcccctcaggctaaagactgcaagcagagtcttgggcctcccaaggctgacagctggggctgaccagactcccagagccccacagttctggactgcatggtcccatcagaatttaattagcatcctcaccttttctcagacagggccatgtccctaccactcttctggccaaaactcagggcaaactccacatccctgagagcagcgggaggtagcgaggtggcagccacctcccagcactctaccacgggggcagtcggggtggcctcacgtctgttctgatgcacgtgggacctctccgtcctcactcttatcaccagcagggcctgggaatcttccctctgccaactggaggcaactctccctgctgacttgtcatggaaccccccagaccaaggcctccccttcccctccacccctccccctcccctccacccctcccccagcaatgagaggactgccgctcagcctgagctgactgaggagctctacgagggctgatatgaggagcagggtgggaatctctgggaagctgtcctctgaggtgggggttcccccagtcctcctcaatgtcttcctatttattccctagagggctggcacctcctcccttcttctgttgtggggacgcctcggtcagccctcggcggccatcttcctgtctgtggcctgcaagtcctatggcagcgcagggcagaccggggcttcttctgtccttggtgcgaagtccctcagttctcccttagggcccttaccttgaggattggccaggtctaagacgcttccctctgctgacctgagtccagactcctcgcaaaatgcttcaggtccttcagactcccacagtgcaagtcgggaaagcacatccgcgaaccctgccaaggctgaccagggctgacagcagaggcagcgtggggtggggcctcctctccatggaaaaaccaccccccacctctccgcctccttccaccttttcctgaccacttccccgcactccacttcttcctgccctcctcagcgccccccgacccctttgtgcccacctccctaccccctcccaccctcctccctgaccccttcctctccttaatgcccacctccccgccccttcccaccctttcctgttcacctactgccccctttcaccttttattgcccatattcccaccactcccactccttcctgcccactttcccactccctcccaccttttcctacccacctcccaacttcctcccaccccttcgggcctaccaacctgccccctcccaccccttcttgcctacctccccactcccacctgttcctgtccacttccctgcccttcgcccacctctccctgcccacctctccgttttcacctctccatctgttttgtccaggggtgacagcaaggagtggctgggcgacgcctgggccttccctccgtgttgggagatagctatccttccacagagttcccttcttgcttgttggccagccccggggctcctttctctgcttaactgaagctgccccgtgtctgaaatgaggtgggaaggcccctcagtcttcctcaaggttttactccttccagggccggcactccccccttctcctgtcccgacagcaacagttgttctgtcatcctctaaaatccattccaaaaccttctactttaagtactaccgtgtgtgaagttaatagaatctctctcctgacctatgtcaaaggctcccttagttttcttctttccctatccttgtcccagaaaaatccattgtcttttcagcagcctgtgcgtgatcttttaaaaaaattatttttaacattttattaatttaatgtcattaatttttattataatttttattaatttttaaaatacactcatcagatttaactattatgtgaaattatatgtattttagcaaatgcgtggagttccatatctacgaaccaagtgtcacactgaccagttccatcacccgaaaagtcccctgtgcatctcttttgaggtcagtcaaggcacttctccaaagactctagcaactatgctctgtttgcagttcatatagttttaactttcacaatttgtcatatgagtaggtccacaaaacatggatttaaaagtctggctgcatcatttttcatctcaactagcaaggaatgagaattcctcttgttgcatatcccctcttccatttagtattttagattttcagatttcagccattctaataagcctgtatttgaatctcctttgttttttgtttgcatcttcctaatgacaaatgacgttggtcatctttttatatgccttttcctgattggtatattctcttcaaatcatttgtgtctttttaaaaactaatagacatcatttttagagcattgctaatccaaaaatacagagagaaaacttcatcaaagttacagagttctcacatatctacgcccccccccccaattcctgccctcctgccctgccctatgcacgcacacagacacacacacacacacacacacacacacacacagtgtctcctattatttatattttgtattattatggcatgtttgcaacaactgatggacctgtattgatacctcattattaggtcaagtccacagtttacatcaggaatcactcaacgttggggatgctgtaggttttgataagtgtgtaatggtgagtattcatcattacagtatcacacagacttgttacaccattttaaatctcttgtgtgctccacctatcaatcccccttgccccaaccctaactcctcagcctccggaaaccactgatatttttagtgtattcataatgaactgtttctaaatattgtatgattggaatcatacattatgtagccttttaagattttcttctttcacttagccttatgcttttatgattcctccaggtctgtcctactaacaatgactgaaagctcctgttgctcaacatacaggtcaacatttgatgtttcagtgttttggacgtcagccattctcctgggtgtagagcgctatctcctaggtgctttaatttgcacttctctaaaatgccatatgacattgaactctttaatatgctcattttaaattcctatatattcattgtttgtgtacttatttatagtttttgtccactttaaattgggttttctgttttcttatgattgggttttcagcgttttgtgcatatttaaatatacatcttttatcagatatgtgtttcacaaaacttttatgccagtcgctggcttgtcttttcaagatcttaacagtgacttttcagagcaaaagtttttagttttaattaagtccaatttatctcttttttcttaggtagctggtacttttagtgttgcatctgaaaaagccgtcatcaaaaccaaggttacctagggtttgcacccataagtttaaccaaattttggtgttacatctaaaaaagtcatcaccaaacccaaagtcacctagggtttgcccccataagtttgacaa

SEQ ID NO: 1563840 - DNA, 4001 bp, Homo sapiens
ggtagcaagaagctagccaggaggaagagaatatgagaaattaatgtgaatggatcaggttatttgagtatgcagagcgttgaattaatgctatgcagaaaagtgaccactaggggaatgggaaggtggccgcgggttaggaaacagagtgaacaaatgcaaagactatgacataaatcctgttttcccattaatatctgcatagtgtgtgccctcagttccttcaggttcctgctcaaatatcaccttaccagtgaagccttcctgcccatcctatctaaaatagtagaacccgtccacattacaacctattacatatttatttctttttttgtttttttcttttttatttcttcatgtatttttttgtttcgttcatttaacaccagtgccacttgccaatatatattgtttatatattaagttattgtctgtctcccagctatagtttaaaagactttgtttttgttatccactgttgtatctccagtgctgagaacactgtctggcaaataaaaattattcaataaaaaattattgaatgaatggatggatgcacagtgggttgaaacaagtgtgatatttaaatgctgtgtaataatgatttgaatagagtataaagagacatcagcaatactctttcctaagtgttttggtgtcacaaaagctctgcctcattgtttattcttaaataaaaactatacatggcctagaaaagataatcaccccttagtctggcaagcataacacacaggaaggagtccactgcttattcaaagagaactttggttaaattcctcgttagatcctgatagagcctggaaaactctgattctcagcataaatttaatgatcatttcggtactgtgattattatttaataactaatgttctcacaagataaatttgacatggtaacaaatgtaatagaaaagtacatttcacattgcaacaaatagattgtgtaatacttgcaaagctctcagaaaaagtcttcgtctgcaaaatgtcagcttgctgtttaatgttgctatcagagaccagaaaagaaattgcataataaactcaactcatataaagtaataaatttgtgactggatgccattcctgtcaaccatttcactgctaagagaagttttacaggggatgggaaagcttacgctgaagctgaaaccaggttacaggtataatccactatgtttgccccccaaaatctgaggattcaattctatggcaacataaaaaaataaatgcaatgtgtagaagactgaaacctgtgcaatagtatctaaatgatgtgtaattttgtttagagttaaaaaaaaaaaaaaaaaagaacatcatttggacaagtgcctatgcctcttagggctctaaggtttctgcttctttgcttatactttaaaagaaccaaaaaaaaaaaaaaaaaaaagccttgaccttgaagtcacacctactgttgcaaagtacgtaatttactggtctccgcgggaggggaacaggaaagaccaaaggccagcagggggagtaaaacagagggtaggaaggggctcgcaaagagtcgcaggttaacaggatggggggcagaaggcggaggtgagaggtaggaggtaggagtgacctgtggtagagggaatgacgctggctcagaccagagaagaggatacgggataaagaggagaggtgaagcatgaccaggagtcaagcggttaaagggaccaccagagtgaggaggtgaggcaggagcgggccccccatctccggaggagaagggaggagatagcgaggcgatcagaaccacaggcgtcagaagcatccttcatacaacgcacgcggggatgaattctcctttccaccccacgttgaggcacaaaaggaggtttccctggagtgtatggggatttatttgtgagaattaccaagtccccttctttacactcaccttgacgaagaaggcagcaacgatggcgtgaccggaagtgctgtcctcttttgtttggcggaagctttagcttctgcagccgctaccccctccttcacttcaggcaacttcctgtgcctctctagcaagctctgcaatgctctatctcattgactccctccctagatcaacacctacgttgtgatgtaaaccggcagggagagagaatcactaactttttacaaatcctaattcttgtcgtgccaggagctgcagtatctctgccaaatccctcatgtacaattcgccacctctccttgttgattcgccttagaaatatctcccttcatcttagtcccttaactcaggcctcattttctctgtcttggatgtctacagttacatatttaccaaactgatttactgttttctggcacaccacttttaaaaagttcatttgtattagcggtatacttcaatttcaagctttttacaaaaatcttcaatctaaatcatttttgctttgagatcgtatccagagttacataccatattcaaatatccaaagaataaacgtggactcatttagaaagcattcttgcattattttacatactccccaagaaaaggaagaaaatgaaaactgaaaaaaaatgtttcaataataaaaatccgtactctggttaaatactttcagaacaagtttagaactgaattatttattgccactacctccagaaagttctcctggcccccaaatctgcgccacaattctcaccacaggggaggatctcttgtggttatttttagtcagtccacaagtatatactgagcacctaccatgtcccaaatactatgctacacccagagacactacactaggatcccagagcctagagctaaagatgacatttaaacacttaagagcctagcataaaatacgtgtttatcaatgtttgttaaatgaataaatgaccaaaatgtggtcagagcaaagaaggaaactagcaataaggtcggtccttagttttgctggtacttttacaatttatttcaacaatttgactcacgttccccactaagcactgctttagctgcatcccaccaatctttatattttgtattttgatatttttgtatattgattctaatttagtgcaaaatgatctctaattttacctttgtagttcctccttttttttttttttttgagacagggtttcactctgttgtccaggctggagtgcagtggcatgataatagttcactataacctcaaactcctaagctcaagtgatcctcctgcttcagtctcccgagtagctagactacagaagcacaccaccatgtccagctaatctttttttattttttgtagagatggggtcttgctttgttacctaggctggtcttgaactcttgggctcaagcaattctcctgcctcagcctcccaaagtgccgggattacaggcatgagccactgtctccagtgtgtacttcctctttgacccatgggttctttagaaatgcatgtttaatttccaagtatttggagattttcctgttattttccactattgtttttttaattccattatgatcagcaaacttacaatatatgatttcagttcttttacatttgttaaattttgtcttatgactgaagatatggtcaatttggtgaatgttccatgtacacttgaaaagaatgtgaatatgcattctcctgttgttgagtgaaatgctctataaatatcagctagagataattgataatattcagttattctgtatccttggttatttactatgtaaaatattatattaattattgagagaggagtgtttatgtccctgattatatttgtgaatttgtctatttgttctttcagcctctgagattttgctttatatatgaggggtcttcaaactgttcatggaaatacatattataaaaaaaactatgcctggatttcaaaaattttttgcaccaaaataaacactaacatgtccgaacaggatctagcttgaagcgctatgaaggataggacatcagtttgaacagagcgcctgtgagag

SEQ ID NO: 1563841 - DNA, 4001 bp, Homo sapiens
tctgggtctgggtatcagctgttggggccttagtggtatcattccaagccttgaaaggggtcttaggcctgctgttggccaggtcattggcattgagagactgagagaaattgtaggtggcatttgggcccactttagtagtggcattctgggccttgaaggccatctcagacttgttagcagctaactcaccagtggttgctgcctgggaaaaatcataggcagcatttggaccctttggggtagcattttgggacttaaaggctgccttgggctgcgtgttgggcacatccttggcattatgagcctgagagaaatcatagacaccatttgggccttttgtggtggcattctggactttaaaggctgacttaggcctagcggcagctgctgaaacctgaatgtcagccatctcattggcagttgggggctgtgaactctggggactagcagctgcggtggcctggttagtaggtggagcctctgagatctggatggcctccatcaaggtctgcataagcaaggcgctgtcttctacggaggcctcagcctgcaaacacaggggggaaaaaattaaatctctgggcctctgaggcaggaggtggggtgggaatagggagcccgggtggcagcgcagcagcggagctgcaggcgggcggtgggtgcaaaaacaggggggctgaggcagagatctagggggcccgcgaggggcgatgggggaccaggcgggtactaaacatgtggcaggggtgaagtagggcaagggcaaaatgaggggtggggcggtatgcggaaagtgggcacgaacaggagccggggacgctccaagaggcgtgcagtagcagctcaggacggcaggcggatcgcggagttgagaataaggggggtcgcacagagtggggaatgcagaaagagggagggtggaggcaggaggctgggggagggggtgacagactgctctacaagcgtcaggattctggaaaaaaaaaaaaatggttccttacccaccccgcattctctgggcagattgccctgactactaacagggtctcccctctctctgagcagggactgatggctgaaaagagacgcccctcccccccttcgataaacgatgggaattcgaaaagcccacggagtctagtcactaaatagggtcaaaccggatcccggcgtttgggagaccaaagaggcccgcggggaggggtgactgtcggctggggaaatggtggggtggggagtggagatctcacctggaagccgaggaggcccgcaccacagtccattttctgagccatggctcctgtccctctggcaagagcggagcctgggggctgtgggagaggggcagggcgttatactacagagggcaaatacgaaggacctaattgggaggggggtgactgtggtctgactgtgcgggcggataaggtgaatgtgaggaggaacggatcggagcggtaaaagtgaatgggcgtccagatggaggttctgaaccccgagaagctactgacagggcgaagcttcaaatggggatcgggaagcagatgagttctgaattcggagcgggggtgcggttgggttgggattcgcatttgggaagttgcatggaggttttgagtcaggaggaatcatctaacagtacagatcgaggtcaaggaatctgaggatttcgaacgatgggagggatcggacaggggttttgaatcaggaaggatcgggaggggcattgaattggggtttggggggtggaaggggattcagaatccagggtgaagggatcgggataaaaaaaaatgggggcccgcaccagggggcagatgcccagtctgggggctaattctcaccttgcctcaggccccaaccccaaccccctcgctgcctcccttcttcacgactcagaggatcgggattgctgggctcggctctcagcagccgcactctctccttgtccaggagaaaatgccagcgcggcagcttgggcgaccccgcctcttcgcctaatataccacccaccgcctcaggacgttacgcgcatgcgcaaacactgaagagccaaagtcagtcccgcctgctttcccaacaaaagcttcgtcctggagaccatgatgcgcatgtgcgctggaaggcggtcccgccccctttgccaacacaccaccccaccaccaaccaggtcgacactatacaacagcacctccccttcctctacgccccctcccccacagatgcgctgtgcctcttggtcccaccccttgccccacacaccggccccctaccttttccgcaatgcgtctctattccgtccctcccctattcaaggcccctcctgtcaggccggcttgcatctccacccccttgtccagcatgcttaggtctctgtttggggtctctaattgcaacaagtgttagacctctgctgaggaaacggaatggcctgagaggatacactattggagctaacaaagtagtagtagtaagtctgtggctgccacgtgactccatgatttctccctcaccccctgcccgcccccacaagctcccagacgcagaaagaacgttagtttcttccctttctttctgcagctccggtgatggactcattttgtgtgtgttgggggaggaaaggagggaagggcacagcttgtacatcacagcaggatttgtgctggggcttgtcttcctgtcacagcagccctgggaagtggatgtcagcacccctattttgcagatcaggaagctgaggcacagatacattgcatgaactagacaaggccacagagccaggaaacaaaatgcaaaatttgggtctgggtcttcctgactccaaagcccacattctgctcatgctggcctggggactaagggtacccctccctcctccatttgagcaacagaccacggcaccccatttgtaccaaacaagcaaagtttgtgttctaggaggcccaagctcatgctctgcattcaggaggacacaagcagaggcccccaccctccccctgccctgtgtgggtccatccaggcgtgggaattgctccttggggtccactctgtgctcagaacatcaggcctcttccttatcagggatacaatcacactgtccctgaggccttcctggtgcccactggagcagccaggacaatcagacctgtgtgtctgagccatggcaagccctggttcctttcagggctggggcctggggcagctgtggttttatggagagaaactgggctgggcttcagaattccaggaatggagtgcccagcctgtctgtctcgagctgtgtgagcccgcacgggtcactcaattctctgggcctggtttctcaatgtgcaaagtggaatgcacagcaagtgggtcctacccaaggacacacacgctgctatgcttccaggataactggagaaactcaaaaaggcagaaaattaaatacagatgtgaggtgactcaaattaaactggtacagttccaaaattcaagacagatctttgtgcagttcacatttgttctggcatcaactcatgccagaagcctgaacatgaaaggaagctaatgctaggaaggactgcagcatttggtccccaagggccaacatcagttctgcctggctggatgactttcctcatctgttgcatagcaacctcctctgtcagctgcctgtttttcctcagcacttcctctgtaaagtgtctgcagtgagacgtgatcagactcaggaaaggaggtcagaaacaccattttctatgctatctgtttccatatctgtatcttcggtcatgacttggcctatgaattctagatccatagtaactacctacctcacttctccaaatggatatctctcagtattctctaaattaacaggtcccaaaccgattccttcatacgcctcctccttcccaccaacacagtgtttctcctctagttatgcctttctcccccatttagagtgtaaacctcttagggagacagatttttgttttattcattgttgtttcccc

SEQ ID NO: 1563842 - DNA, 4001 bp, Homo sapiens
tcacattactctcagtgccccccacagccctgatgagcacagggatctttctaaatgtttgtagaacaaatgaatcaactgagagaggagtagaaaaccaagggtggtgactgcagaggtcttacctttcgggctttcttggctttgaccttgggccgagtatcctgattctcctgagactgggcagctgcactctcaggctcaggttcatctgctggggcctgagagggtgcagcctcagtctcctgagcctttgtattgacctttgtatcagccacatggctgacctttttggtctcagtggcaggcattgtcacagcctgcgggtcagcattctgtttcttggtgtcagctgctagactcttgttttcagctgccagaacctgggtatcagtcagctgagtagtagatgaggcctgggtggcaggtgcctcccgagcctctggggtctttgagacctctgtggcctttgagaccccagaggcttttgagaccttcacatcctctgagacctccagtgcctttgaggccttcggtgtctctgggacctccacattctgggtcactgtcaacagagtctgcatcatcgagctactgtccttttctgaagcttcagcctgcaagaggaagcagggaagttcatagaccttctcctcacccccaactaagcaaatggctccaaaattccaaggccacacttctctgacctgtactgactcctacctgcggtgtgctctgaccacctcagcccaacaaggcctccctttcctctgagcaagaactgatggcagaagaggggcccgcccaccttctctccctccctccactgggcagggggacacccaggcaggaaagtaggtggagaaggacaaggatgggaggggaagagccaagggacttgggggcagcaacaagggctggagaggaaaagcagctggggaaaggacagaaagaggccttacctggaagcgagttagacctgcaccactctcgcttgtgtcagacatgtctcaatttggcctggcaagagctgagcctgaaggggagaaggcctgggtcaagttgaagcccactgaacgtcctctcccctgttgtgcctggaggctgatcctcaccttccgtaggtccccaattccaaccccctccaccacccccaacgactccgttctcagatacaggaattcaaagcttctaagtctcaattctctgcagccgcaccctccccttctccaggaagatgtgccagcgcggcagctctgaggaccccgccccttttcccagtgcaccccccacccagccgcaggtcgatagagcgcatgcgcgtcggctgcagggccgctctcagccccgcccgctttcccagcacgagccctttctttgatgtccaccgtgcacatgcgcattcagcagctggctcttctcagtgctggcccttctcaacacgcccctttctagcgaaacatagtgcgcatgcgcaatggtcgtggtctcagtctggcactctgccccaacacacgcccctctccaggtccgcagtaccattcggtcccgccccctgcccaacaagccttcctccaaaattgtcgcagtgtctggtggacccggcccctcccctactcacgccctacagagtccagtgtctcttggccccgcccttcttcctaacacgcccccctccaaacaggcgcatcttggttccgccccttccctattacaccccctcctcaaataaatactgagctagtgattccatcttgggcccggccaaaccgggtccagtcccctcccttcccagccggatggatccggtacgatccggtccttaaggcaggttttctccagatcccagagggtggggccgacccctagcggggctctcatccaaaagccgacccggctgctcacctcgtcctcctacaattcccgagtgcgtccactcactccaagcccctccgaaactcggagactgccctcccctctctaggccggaagtggtcccgcccctttccgcctccctagggggcctccgtcccagcctgtctgcccctcccccgctccctgctcctcattccttatgcccccctccgtattcccttagcctggctccctactccctattcctacctcacatttcctatttactccagaattccttcttcccatttcttacatcctcctccgtgttacgtttgcacaccctgcccctcagtattccttaatccctctctgcatccccgattctcttctctggatcttcactccccctcagtgttcccctccctccttgtattcctcgtccccctcccaacattcctggttccccgtttttctcccctcctccctccgctagtctctgctcccagtctgtacagcctactactttctcagtcgtcctcattgcctacaccccactccaggtcacctctgcttcagctgcagtggtgcagtaagaattgctcatctgcctggctatgggttcgaggggtctggaaccactgtctgacctccataaaaccccaatatcaacgcccctcaccttgtcctccagcgagttcgggatgcgtctgccttctctaagtccctctcgaagtctcagcctcctggactagagctgcagacagcccaacccagcccagcccctttccgcagccccctgccaccccccctcgccttcctcgggggtggggcaatggggccccgctcagggctgtctgacgccaaagcccatgtttatgccactgtaccaggctcagtctgaagctcttccaactcaaaccgccccctgaaagcaagtcattcattgaatttatttttatatcttcattttttcttattacaaaggtaatatgttgttcttttgttgttgttgtaaaaattcaaacaatgcagtaatatataacacaccaatgaaaggccactcatctcccagaaataaccactattaacattttgctatccagattttttttctattcgtatactaattattcaggttctctctccgacaaatggtacactatacataccttctgttctgcgacctgtttttttccagttatatataaaacatctttccgttagtgcacatttttctaaacagctgcatgatcttttcttgcatagatgtcccataatttattgaaccagtccagtacacatgtacatttagattgcttggtgcactttttgttatttatggtattttttgctagctcaaatgctacaaaaaagtcttccattttgatgcaaaatttgtcaacttactcctaaaaagtaaatggataacattcccgccagcaatgtctctcctgtacatgtcacatattacaaatatttttcatgttatttatgataatttttgccaaacaaaaatgtttaattattatgtagtcaaatatatccatttttccttcatcacaactggattctgctgcttgcttaaagatgcttttcacactcctataacaaaccccgttttttttttcaagcacttttgtggctttattatttacatttagatgtttgatcatttcaaaatttattttctatacggattcagcttgattactcttcaaaatcatagtctcttacctctacatcatgtgcaaactaatccatcttttccctctctgctttgaaatggcacctctatcacataataaattcacataaccaattggatctgttcaagagaacaaaataagatgtaaaataataggaaatagacaaatcatcattaattactgaatatataaatgcagacctggaaaacccaagagcatcaactaaaaagttattagaaaccataataaaattcagcacaactgttagttgcagaaataatattcagtgcctttccacatataaatgtaattcaaatggacacaagtcttctgctttatgtggtcaccttttactatgtaaataacatataatgaatccctgtgttccatggataattcaagatagacaaacacacaaatttcttgcatattcaaggc

SEQ ID NO: 1563843 - DNA, 4001 bp, Homo sapiens
ccacctcagcccaacaaggcctccctttcctctgagcaagaactgatggcagaagaggggcccgcccaccttctctccctccctccactgggcagggggacacccaggcaggaaagtaggtggagaaggacaaggatgggaggggaagagccaagggacttgggggcagcaacaagggctggagaggaaaagcagctggggaaaggacagaaagaggccttacctggaagcgagttagacctgcaccactctcgcttgtgtcagacatgtctcaatttggcctggcaagagctgagcctgaaggggagaaggcctgggtcaagttgaagcccactgaacgtcctctcccctgttgtgcctggaggctgatcctcaccttccgtaggtccccaattccaaccccctccaccacccccaacgactccgttctcagatacaggaattcaaagcttctaagtctcaattctctgcagccgcaccctccccttctccaggaagatgtgccagcgcggcagctctgaggaccccgccccttttcccagtgcaccccccacccagccgcaggtcgatagagcgcatgcgcgtcggctgcagggccgctctcagccccgcccgctttcccagcacgagccctttctttgatgtccaccgtgcacatgcgcattcagcagctggctcttctcagtgctggcccttctcaacacgcccctttctagcgaaacatagtgcgcatgcgcaatggtcgtggtctcagtctggcactctgccccaacacacgcccctctccaggtccgcagtaccattcggtcccgccccctgcccaacaagccttcctccaaaattgtcgcagtgtctggtggacccggcccctcccctactcacgccctacagagtccagtgtctcttggccccgcccttcttcctaacacgcccccctccaaacaggcgcatcttggttccgccccttccctattacaccccctcctcaaataaatactgagctagtgattccatcttgggcccggccaaaccgggtccagtcccctcccttcccagccggatggatccggtacgatccggtccttaaggcaggttttctccagatcccagagggtggggccgacccctagcggggctctcatccaaaagccgacccggctgctcacctcgtcctcctacaattcccgagtgcgtccactcactccaagcccctccgaaactcggagactgccctcccctctctaggccggaagtggtcccgcccctttccgcctccctagggggcctccgtcccagcctgtctgcccctcccccgctccctgctcctcattccttatgcccccctccgtattcccttagcctggctccctactccctattcctacctcacatttcctatttactccagaattccttcttcccatttcttacatcctcctccgtgttacgtttgcacaccctgcccctcagtattccttaatccctctctgcatccccgattctcttctctggatcttcactccccctcagtgttcccctccctccttgtattcctcgtccccctcccaacattcctggttccccgtttttctcccctcctccctccgctagtctctgctcccagtctgtacagcctactactttctcagtcgtcctcattgcctacaccccactccaggtcacctctgcttcagctgcagtggtgcagtaagaattgctcatctgcctggctatgggttcgaggggtctggaaccactgtctgacctccataaaaccccaatatcaacgcccctcaccttgtcctccagcgagttcgggatgcgtctgccttctctaagtccctctcgaagtctcagcctcctggactagagctgcagacagcccaacccagcccagcccctttccgcagccccctgccaccccccctcgccttcctcgggggtggggcaatggggccccgctcagggctgtctgacgccaaagcccatgtttatgccactgtaccaggctcagtctgaagctcttccaactcaaaccgccccctgaaagcaagtcattcattgaatttatttttatatcttcattttttcttattacaaaggtaatatgttgttcttttgttgttgttgtaaaaattcaaacaatgcagtaatatataacacaccaatgaaaggccactcatctcccagaaataaccactattaacattttgctatccagattttttttctattcgtatactaattattcaggttctctctccgacaaatggtacactatacataccttctgttctgcgacctgtttttttccagttatatataaaacatctttccgttagtgcacatttttctaaacagctgcatgatcttttcttgcatagatgtcccataatttattgaaccagtccagtacacatgtacatttagattgcttggtgcactttttgttatttatggtattttttgctagctcaaatgctacaaaaaagtcttccattttgatgcaaaatttgtcaacttactcctaaaaagtaaatggataacattcccgccagcaatgtctctcctgtacatgtcacatattacaaatatttttcatgttatttatgataatttttgccaaacaaaaatgtttaattattatgtagtcaaatatatccatttttccttcatcacaactggattctgctgcttgcttaaagatgcttttcacactcctataacaaaccccgttttttttttcaagcacttttgtggctttattatttacatttagatgtttgatcatttcaaaatttattttctatacggattcagcttgattactcttcaaaatcatagtctcttacctctacatcatgtgcaaactaatccatcttttccctctctgctttgaaatggcacctctatcacataataaattcacataaccaattggatctgttcaagagaacaaaataagatgtaaaataataggaaatagacaaatcatcattaattactgaatatataaatgcagacctggaaaacccaagagcatcaactaaaaagttattagaaaccataataaaattcagcacaactgttagttgcagaaataatattcagtgcctttccacatataaatgtaattcaaatggacacaagtcttctgctttatgtggtcaccttttactatgtaaataacatataatgaatccctgtgttccatggataattcaagatagacaaacacacaaatttcttgcatattcaaggcaggcttctgttttcctgtcttttctctttctctgaattattgctttctccaagtgtgtgatatcagttcaccatgttcttgcctcctagattttctcccttatccacactagacatagcccctccttttcttctacttctggcatctcaaattccccaccccttccaaatcatggcaagttggcaagtttagaatgccaagatgaggactttggtgttgatcctgagagcacccaggagttactaaagaattctaggcaaggatacagcataggtttgtgttttagaaagaacacctagctgctatatggagtgtggattaggtgttgtcttggaaacagggagagtgcttatgacttttgtagtcatctaggtaagcaatgattgtgctttggcctagagtggtggcagatagtgagaagtgattgaatcgaggagatagtaaagaagtaaaaagtaactggacttgagtaactggattgtgaagagaagggcaaggaggaggggagtgtcaaagggaactcttggcgatctgatttgagagattgtgtgaatggtaacccctttcactgagatcaggaatactgaaggaagagcgggtttgaggagcaggttagacaagaactgaacattgcttttgaggcacctgtggcatgtccaggtggaaatgtaccacaggcagttgaatatacatatctgaagctcagagaagtggtctaggctgaggttatagatctagg

SEQ ID NO: 1563844 - DNA, 4001 bp, Homo sapiens
agctctacggcgagccttgcccctacgggctttaggtgatctcagggagagcaaggctctccgggcccaagcagccaaccgagtccttgatgccctgcgggcccaaaaggctatgggaccccttgaagccctgcgggccattgaggccattagggcctttgagacccttcggccacctgtggttccagaagcctgactctgatcactgctgccatcctcttccccatccagatgcttcacctgcatcaacagagaggaagctcaacgtcaccagatgaagcaagtggtccttttcctctccctatctcttccaggaagcacccgctaatcccacccctgtagtaacagcctgactcaatagatgttggccatgctgaaccctggatttgtttctcactgacttccaagcaggtgtttcatctgcctagcaggccaggagcaaaccaagggtgggtggaggctgagtcttcttctctttctgtgcccactactggctctgcttgaaccatcctagacaagccgcttcacctctctggaactcagcttccttctccataaaattggggctatgagaattactttcaagatttaatgagataacctgcataaatgtgcttagctcaaggcctaatacagggcagctactatgtaaacataaactgcattacattcagattgcacctccccatcagtctgcaagctctctgaagacaggaattacatcacattactctcagtgccccccacagccctgatgagcacagggatctttctaaatgtttgtagaacaaatgaatcaactgagagaggagtagaaaaccaagggtggtgactgcagaggtcttacctttcgggctttcttggctttgaccttgggccgagtatcctgattctcctgagactgggcagctgcactctcaggctcaggttcatctgctggggcctgagagggtgcagcctcagtctcctgagcctttgtattgacctttgtatcagccacatggctgacctttttggtctcagtggcaggcattgtcacagcctgcgggtcagcattctgtttcttggtgtcagctgctagactcttgttttcagctgccagaacctgggtatcagtcagctgagtagtagatgaggcctgggtggcaggtgcctcccgagcctctggggtctttgagacctctgtggcctttgagaccccagaggcttttgagaccttcacatcctctgagacctccagtgcctttgaggccttcggtgtctctgggacctccacattctgggtcactgtcaacagagtctgcatcatcgagctactgtccttttctgaagcttcagcctgcaagaggaagcagggaagttcatagaccttctcctcacccccaactaagcaaatggctccaaaattccaaggccacacttctctgacctgtactgactcctacctgcggtgtgctctgaccacctcagcccaacaaggcctccctttcctctgagcaagaactgatggcagaagaggggcccgcccaccttctctccctccctccactgggcagggggacacccaggcaggaaagtaggtggagaaggacaaggatgggaggggaagagccaagggacttgggggcagcaacaagggctggagaggaaaagcagctggggaaaggacagaaagaggccttacctggaagcgagttagacctgcaccactctcgcttgtgtcagacatgtctcaatttggcctggcaagagctgagcctgaaggggagaaggcctgggtcaagttgaagcccactgaacgtcctctcccctgttgtgcctggaggctgatcctcaccttccgtaggtccccaattccaaccccctccaccacccccaacgactccgttctcagatacaggaattcaaagcttctaagtctcaattctctgcagccgcaccctccccttctccaggaagatgtgccagcgcggcagctctgaggaccccgccccttttcccagtgcaccccccacccagccgcaggtcgatagagcgcatgcgcgtcggctgcagggccgctctcagccccgcccgctttcccagcacgagccctttctttgatgtccaccgtgcacatgcgcattcagcagctggctcttctcagtgctggcccttctcaacacgcccctttctagcgaaacatagtgcgcatgcgcaatggtcgtggtctcagtctggcactctgccccaacacacgcccctctccaggtccgcagtaccattcggtcccgccccctgcccaacaagccttcctccaaaattgtcgcagtgtctggtggacccggcccctcccctactcacgccctacagagtccagtgtctcttggccccgcccttcttcctaacacgcccccctccaaacaggcgcatcttggttccgccccttccctattacaccccctcctcaaataaatactgagctagtgattccatcttgggcccggccaaaccgggtccagtcccctcccttcccagccggatggatccggtacgatccggtccttaaggcaggttttctccagatcccagagggtggggccgacccctagcggggctctcatccaaaagccgacccggctgctcacctcgtcctcctacaattcccgagtgcgtccactcactccaagcccctccgaaactcggagactgccctcccctctctaggccggaagtggtcccgcccctttccgcctccctagggggcctccgtcccagcctgtctgcccctcccccgctccctgctcctcattccttatgcccccctccgtattcccttagcctggctccctactccctattcctacctcacatttcctatttactccagaattccttcttcccatttcttacatcctcctccgtgttacgtttgcacaccctgcccctcagtattccttaatccctctctgcatccccgattctcttctctggatcttcactccccctcagtgttcccctccctccttgtattcctcgtccccctcccaacattcctggttccccgtttttctcccctcctccctccgctagtctctgctcccagtctgtacagcctactactttctcagtcgtcctcattgcctacaccccactccaggtcacctctgcttcagctgcagtggtgcagtaagaattgctcatctgcctggctatgggttcgaggggtctggaaccactgtctgacctccataaaaccccaatatcaacgcccctcaccttgtcctccagcgagttcgggatgcgtctgccttctctaagtccctctcgaagtctcagcctcctggactagagctgcagacagcccaacccagcccagcccctttccgcagccccctgccaccccccctcgccttcctcgggggtggggcaatggggccccgctcagggctgtctgacgccaaagcccatgtttatgccactgtaccaggctcagtctgaagctcttccaactcaaaccgccccctgaaagcaagtcattcattgaatttatttttatatcttcattttttcttattacaaaggtaatatgttgttcttttgttgttgttgtaaaaattcaaacaatgcagtaatatataacacaccaatgaaaggccactcatctcccagaaataaccactattaacattttgctatccagattttttttctattcgtatactaattattcaggttctctctccgacaaatggtacactatacataccttctgttctgcgacctgtttttttccagttatatataaaacatctttccgttagtgcacatttttctaaacagctgcatgatcttttcttgcatagatgtcccataatttattgaaccagtccagtacacatgtacatttagattgcttggtgcactttttgttatttatggtattttttgctagctcaaatgctacaaaaaagtcttccattttgatgcaaaatttgtcaacttactcctaaaaagtaaat

SEQ ID NO: 1563845 - DNA, 4001 bp, Homo sapiens
agagaaagcacaggcgctactagggccctcagtagcagcctcctgggccggggagcctgtctgggactgtgcggaggttgccggagcctcgggggcagccatcttactggtgactaacatctgggaggtctgcggagaagcaaggggtggctcaggggtgggcccctgagcctcggcggcgtaggtcgtgggctgggtatcctctcctgagacctgcggcgtggccacccggtggctagcgaccacctgactgaaggcggtacgggcagcggcggcagcggcccgagccgcacggttggaggcggcggcgcgggctacgttggcagcacgggcggccgtctcattggcaagtgtttccggatccagctgcaatgcctccaccagggtctgggccagcacagggttttccagttcccagggctcattctgcaaggccagagagaggggttggggaaggcaggccactcgacgacatacttgtgttagcttccctgtgctggccagcctcttcccagcagtcagccctgaacaccccaagaccttcccaaatcttcttcttccgagcaggggagggaaggcttgggaagctgggcagtcctttcccacacaaccctcctggctcccccctcctccctcccccattcacaggggaaaggcccaggccagcaggtgtccaggaaggggcctcaccgataagatgcgaaggcctggacccaagcttccgaaggctctgaggatatggatgtcaaagctggtgagggtgccatagccaccaaacgcaccgaattcttcatagtcgttgccttcaaccatctcttcctccccgacttcgtcgctaccctcatccatgtcttcaacactgtagctttccgattgcacgctgaagcttccctcagccatgctgcgggtcccagggagatgagagctcagcctgagagggagggtgaagcagctgcagggggagggggcgggatccaatgggaggcgggatctcccgggaggtgaggggcgacaatcatcaggttactaggcaatattaggcagtagggggcggggggggggaggaggagcgggggggagacggtttggctttctgatggggtagacctggtcagggacagagcccaaggaaagggacagaggaggtcgcaggaggcgccgcactgaaagcggagtttaggatgggcaggctcgccatcccagcggctagatttgacgagggggtgttctggagggctggggtccgaagagtcccaaagggaatgcattggggaagagagaaacaaagggtttggatttacgggccagagaaggggaccgggatgaagggggagcagatgggagagctcagacaacagggacagtggcaagccgcaagctctgcgaaacagaaccccagggacctttggctaggtccgggcggggggcctaggtggggctcagactcgagcactagaggcggatggagtgggggcctcagacctaggtgaggctccaatcggagcgctgcagatctcaaacgcgaggactgggcactccaggaagggggcaagcggtcagctcggttcgagtaatctaggagtggttggggtgggggtggggcctcaggtccaagggagctcagctcggagcacacgggtctgctaaaggggtgaggatcctgggctccggtttcagtagggctcagatcggggcgcctgggtctgatggtgatgggggctcctatctagaccttgggtctaatggggttccggttctgagtgcttgggctttgttcagatccggaggcggagggagggcgcagcgtgtcgggttccactcgccctctcccggtcctgtctggggctggatccttaccttctcgggaactccaatggcgtccgtcctcagcaccaggaaccccgcagccgcgccctcgcctactgctgccagcacagcagcccggaccaccccgccccttttctccgtgcaccccccgcggctgggtagcctgcgcatgcgcggacccctccagcccgcccgctttcccaacaaaagccctttcctccaggtctccagtgcgcatgcgattccgcgggtgggtgggcggtggggtcgaaggtagggtgcggggggctcttcccgccagatccacttcacctctcctcctcctcctcctcctaccgcgggcgcgcacactcataccctgcagtgcagctcgacccacccaatcatctcttctcagtccccccacttttgcacaatgcttctctgtcctgccctgccctttcacccaaactcctccagcctggtctgggatacactatgccccgtttccccggcaagaccccttaggtcacaattagtgaggtctcacaattaataagctgggtctctaactgcaacaagtggaaatcctcaacctgcggggctacgaaatggacatggccagaggatggcacttcgctttgtgtgcttctccactagccaactctctggcccccagacatactgggaacatctgcttcctcagctaccctttatgcagcttgtatgtcacagagggatctgtgctggggcttttcttcctctcacagcagcgctgggaagtggatgtcagcatccccatttggcgtgtcaggaagctgaggcacagacacattgcatgaactagaccacagagccaggaaacagaaaatgcaaaatttgaacctgggtcttccggactccaaagtccacctcctgctcctgctggcctggggacagaggcaccgcctcctccgtctgagtgacaggcctcccccaccccaacatctgtcccaaagaagcaaggtttgtgctgtagaaggcctaagttcatgctccgcattcaggacacagggagacagagcctccccccgcctcgcccccagcctctgcggctctatgtgggtccatccaggtatgagaattgctccaccgggtccactctctactcagattgtcaggcctcttccttatcagcgatacaatcacgctgccgctgagaccctcctggtgtccgccaggacaattagacacctgtgtgtctgagctaattactccacaatctacaagcccagttcaaacttcacttttgaggtccaagtgcatagtacattcacctgcctacgtgacatctccacttggatgtcttttgaggcagaaaatgctgtggtctcatctgcagtcgaacctggactgtttgtaaaattcgtagtagatttttatatttgtttttatgtcagcctcaccaggacccctgtgtatgaatggaaggtattgctaggacagcagcttttactctccgctgaccagtatccattctgcctggctctgtggttttctccagctgttatatatcaatctctcctgtcagctgcttgtgcctctttagcccttcccctgtaacatatcctctgcgggagaggaacacaccctacaaacgaaagccttcagaaagtgctacgtgctaatcactccaaaaaatctacaaccccagtctgaacttcacttttgaggtccaagtacatacattcacccacctacgtggcatctccacttggaagtctcaagggctcttcatggtttgcctgtccaaaactggtcacttggtatactcactcctcccatacactcacacatccccatcgctcctgttccccccccccccaacccatcttcacagtctcagtaaatggcgccattatccacacaaccactcactccagaaactgggagtcatcgatcaccactccccgtttctgatacgctgcatccagaagggcaagctctgaagggtctccagagctgcctctctgtgcagctgtcttctctccattactcccggcaaattctggtcctatggacctcttgagctctcaactctgtctccttcactcagacggtccaccgggctctgttgtgttcagctcccctgtgctgcagcctgcaaactctatccgggcaagaagttggtggaattgggcgatcagagggctcac

SEQ ID NO: 1563846 - DNA, 4001 bp, Homo sapiens
gagagaaagcacaggcgctactagggccctcagtagcagcctcctgggccggggagcctgtctgggactgtgcggaggttgccggagcctcgggggcagccatcttactggtgactaacatctgggaggtctgcggagaagcaaggggtggctcaggggtgggcccctgagcctcggcggcgtaggtcgtgggctgggtatcctctcctgagacctgcggcgtggccacccggtggctagcgaccacctgactgaaggcggtacgggcagcggcggcagcggcccgagccgcacggttggaggcggcggcgcgggctacgttggcagcacgggcggccgtctcattggcaagtgtttccggatccagctgcaatgcctccaccagggtctgggccagcacagggttttccagttcccagggctcattctgcaaggccagagagaggggttggggaaggcaggccactcgacgacatacttgtgttagcttccctgtgctggccagcctcttcccagcagtcagccctgaacaccccaagaccttcccaaatcttcttcttccgagcaggggagggaaggcttgggaagctgggcagtcctttcccacacaaccctcctggctcccccctcctccctcccccattcacaggggaaaggcccaggccagcaggtgtccaggaaggggcctcaccgataagatgcgaaggcctggacccaagcttccgaaggctctgaggatatggatgtcaaagctggtgagggtgccatagccaccaaacgcaccgaattcttcatagtcgttgccttcaaccatctcttcctccccgacttcgtcgctaccctcatccatgtcttcaacactgtagctttccgattgcacgctgaagcttccctcagccatgctgcgggtcccagggagatgagagctcagcctgagagggagggtgaagcagctgcagggggagggggcgggatccaatgggaggcgggatctcccgggaggtgaggggcgacaatcatcaggttactaggcaatattaggcagtagggggcggggggggggaggaggagcgggggggagacggtttggctttctgatggggtagacctggtcagggacagagcccaaggaaagggacagaggaggtcgcaggaggcgccgcactgaaagcggagtttaggatgggcaggctcgccatcccagcggctagatttgacgagggggtgttctggagggctggggtccgaagagtcccaaagggaatgcattggggaagagagaaacaaagggtttggatttacgggccagagaaggggaccgggatgaagggggagcagatgggagagctcagacaacagggacagtggcaagccgcaagctctgcgaaacagaaccccagggacctttggctaggtccgggcggggggcctaggtggggctcagactcgagcactagaggcggatggagtgggggcctcagacctaggtgaggctccaatcggagcgctgcagatctcaaacgcgaggactgggcactccaggaagggggcaagcggtcagctcggttcgagtaatctaggagtggttggggtgggggtggggcctcaggtccaagggagctcagctcggagcacacgggtctgctaaaggggtgaggatcctgggctccggtttcagtagggctcagatcggggcgcctgggtctgatggtgatgggggctcctatctagaccttgggtctaatggggttccggttctgagtgcttgggctttgttcagatccggaggcggagggagggcgcagcgtgtcgggttccactcgccctctcccggtcctgtctggggctggatccttaccttctcgggaactccaatggcgtccgtcctcagcaccaggaaccccgcagccgcgccctcgcctactgctgccagcacagcagcccggaccaccccgccccttttctccgtgcaccccccgcggctgggtagcctgcgcatgcgcggacccctccagcccgcccgctttcccaacaaaagccctttcctccaggtctccagtgcgcatgcgattccgcgggtgggtgggcggtggggtcgaaggtagggtgcggggggctcttcccgccagatccacttcacctctcctcctcctcctcctcctaccgcgggcgcgcacactcataccctgcagtgcagctcgacccacccaatcatctcttctcagtccccccacttttgcacaatgcttctctgtcctgccctgccctttcacccaaactcctccagcctggtctgggatacactatgccccgtttccccggcaagaccccttaggtcacaattagtgaggtctcacaattaataagctgggtctctaactgcaacaagtggaaatcctcaacctgcggggctacgaaatggacatggccagaggatggcacttcgctttgtgtgcttctccactagccaactctctggcccccagacatactgggaacatctgcttcctcagctaccctttatgcagcttgtatgtcacagagggatctgtgctggggcttttcttcctctcacagcagcgctgggaagtggatgtcagcatccccatttggcgtgtcaggaagctgaggcacagacacattgcatgaactagaccacagagccaggaaacagaaaatgcaaaatttgaacctgggtcttccggactccaaagtccacctcctgctcctgctggcctggggacagaggcaccgcctcctccgtctgagtgacaggcctcccccaccccaacatctgtcccaaagaagcaaggtttgtgctgtagaaggcctaagttcatgctccgcattcaggacacagggagacagagcctccccccgcctcgcccccagcctctgcggctctatgtgggtccatccaggtatgagaattgctccaccgggtccactctctactcagattgtcaggcctcttccttatcagcgatacaatcacgctgccgctgagaccctcctggtgtccgccaggacaattagacacctgtgtgtctgagctaattactccacaatctacaagcccagttcaaacttcacttttgaggtccaagtgcatagtacattcacctgcctacgtgacatctccacttggatgtcttttgaggcagaaaatgctgtggtctcatctgcagtcgaacctggactgtttgtaaaattcgtagtagatttttatatttgtttttatgtcagcctcaccaggacccctgtgtatgaatggaaggtattgctaggacagcagcttttactctccgctgaccagtatccattctgcctggctctgtggttttctccagctgttatatatcaatctctcctgtcagctgcttgtgcctctttagcccttcccctgtaacatatcctctgcgggagaggaacacaccctacaaacgaaagccttcagaaagtgctacgtgctaatcactccaaaaaatctacaaccccagtctgaacttcacttttgaggtccaagtacatacattcacccacctacgtggcatctccacttggaagtctcaagggctcttcatggtttgcctgtccaaaactggtcacttggtatactcactcctcccatacactcacacatccccatcgctcctgttccccccccccccaacccatcttcacagtctcagtaaatggcgccattatccacacaaccactcactccagaaactgggagtcatcgatcaccactccccgtttctgatacgctgcatccagaagggcaagctctgaagggtctccagagctgcctctctgtgcagctgtcttctctccattactcccggcaaattctggtcctatggacctcttgagctctcaactctgtctccttcactcagacggtccaccgggctctgttgtgttcagctcccctgtgctgcagcctgcaaactctatccgggcaagaagttggtggaattgggcgatcagagggctca

SEQ ID NO: 1563847 - DNA, 4001 bp, Homo sapiens; identical to SEQ ID NO: 1563845

SEQ ID NO: 1563848 - DNA, 4001 bp, Homo sapiens; identical to SEQ ID NO: 1563846

SEQ ID NO: 1563849 - DNA, 4001 bp, Homo sapiens
tctcttctaacccttcaaagggcacaggtcccagtttgtttaacagaatgtaggtgtgtgcctcagggtcaagttctctcaattcaaacctaaaaatgcactccaggtgggctgctgctcgcctgagtatctcaggaaactggttgcgatattctttaacaatatattcccgcatttcagactcccggatagggtacttgctctgatccttcaccagcaggaactgcaacagctcagctacgttctgttccatagggtcttggggcttcagggtaattgcaacccgggaagtattgaggcccataatactaatggagttggggctctcacagtctctcaggacctcgaattctatagggccttctgcacccttaggaccctcagaatctgagtccacggaggccttggttaccctagggcttggcaaaacaagggaacacttggaggggttccggtccacagaagcactagagctaaacaatgtgctcgggccctcaccagggttaggcagcacggagcttcccggtccgtcaggggcggtgggctgcactaaggtgcttgcgccctcaccaggagtgggcggcacggaggtgtccgatccatcagaggcggtgggcggcacagaggtgctcagtccctcaccggggattggcagtacggaagtgcttggtccctcaccgggagtgggcggcacggaggtgctcaactcctcagtggcggtgggcggcacggaggtgctcagtcccccaccaggggtgggcggcacggaggtgctcgatccctcaccagcagtgggctgcacggaggtgctcaggccctcggtggcggtggggggcacggaggtgcttgatcccttaccgcgggtgggcaccaaggagatgctttgtccgtcagaggcggcgggcagcacggaggtgctcggtccctcaccaggagtggccggcacggaggtgctcggtccctcatcacgggtgggtggcacgggggtgcttaggccctcagtggcggtgggcggcacggaggtgctcggtccctcatcaggagtggcctgcacggaggtgctcaggccctcagtggcggcgagcggcacggaggtgcctggtccctcaccaggtgtaggcagcacggaggtgcttggtccctcatcaggggtgggcaccacggaggtgcttggtccctcataggctgtgggcggcacggaggtgctcgttccctcaccaggggtgggcggcagggaggtgctcggtacctcagaggcggtgggcggcacggaggtgctaggttcctcagaggaagtgggcggcctggaggtgttccggccctcagaggcggcaagcgtcacagaggtgcacagccccttagagatggtgggaggcccggaggtgcttaggccctcactgggggtgggcagcacggaggtgccaggtccctcagagatggtgggctgcccggaggcgcttgaggcctcagagatggtgggcggcacaaaggtgcttgggccctcagcggaggtgggcagaacggaggtgcttgggccctcagaggcgcagaggccctggaggatctgggaatcgctgggaccctgggggacgtctgagcctggcacatcagcggggagaccgggggcattaggggcctgcatttcgccccagctgctgttgtgcgcagtagcctttgcaacgcggcggcggcggcggcgcgaattctggcttaccagagacatggtcctgcccaccggcgttggcgtgtaggagcagacaccgacaggcccgcgatctggcagagaggacgggaggtgtgtaggtgcctcggcacaaaactgccgctagcggtaatgatgttgctgctgctgccagaaccaaagttccaagcaactgctgaagctgaaattagaggtggtgaaaaaggcaggcactggccagcagtgaatgctagtctcactgtactctgcttctcacaccccgccctctgccgcagtccgcgcaggcgcagactggctctgcggcaaggcgaaatcgccccgccccgcccctcccctgggcctgagaaagtggatgcggtggttctgcaccaaaggagagcactagcagaagggaaactttggtagggtgaagcaaggagcttagagtagatgcattagggagtaaaaatggaaataataataaatacttctcagatttagggtacgattggagggcttctacacagagtgccaggcacttaatagattctcaaaattggtaaatatcattgagatttgcagttttcccgaagctgtttcaaagaaaatgtgcattgtctctggaagggtagaacccccatccctgaccatgtctcttctatcactttctccatttatgtgtctaactcctcccctaatgttgtgagctagaaagaactctttcctagagggtctgaatgcctgaaatttagtaccaattagggagcttcgaacacgcttgaaaagcccaacattcccagcccaaactttcccagtcacccaggctttagtgggaaagccactaaaactcttgaaaatttgtttaattctttcactccacaatcacctgctcatttaatagagcttttgtgaaagtcagttgagataccgagtgttaagggatgtgttacctgctctgttttgctctattactctagcacttttgagcagatccaaccctgatccctttattcattcactcaacaaacactggtcatctatcccgaagttacagttaatctctttgtcatcaaggagcacccgatgtaaaaatgggagtcagagaaaaagtaaagctaaattttctagaagtttgtaaagaatgcaggggatggcagggtcagttctacctgtagatgcagaaaaggcttcataaaagaggagatgtttaaaaagatgagtgggtagatatttaccaaaaggacaaggatgagaaaatcattccaactgagagtagcacggcagcagtgagtaagaaagaaaacactgaagaggacgggcaggctgtttttagaagtaggggagagagagagaggaagagagatagagggaaaacactaactttctgacactcacacaaccactacaattcagcttaccactattgaccctttattgatatgtttatatcttgctgcaaacatttattatatgttgtctttctttatatcttctcaaaaatctgggagtatacttttgtctttttttctttttttttatactttaagttttggggtacatgtgcagaatgtgcagatttgttacctaggtatacacgtgccatggtggtttgctgcacccatcaacccatcatctacattaggtatttctcctaatgctatccctcccctatctccccacctcttgacaggccctggtgtgtgatgttcccctccctgtgtccatgtgttgtaattgttcaattcccacttatgagtgagaacgtgtggtgtttggtttcctgttcttgtgttaattttctgagaatgatggtttccagcttcatccatgcccctgcaaaggacatgaactcatccttttttattgcatagtattccatggtgtatatgtgccatgttttctttatccagtctgtcattgatgggcatttgggttggttccaatacttttttttaatacgtctttaggaaagggaaaataactggctacagtcacaatgtgtcaccatctctgtctccaattggagaagcaatcccttatatgaataaccagtttcggttctgtgaagtccaatgcagtttttatgcctggggcctattcagaatgggaggcacaaaaaaacctaagatatttctaagctttagcaacagatattcctaacctagggtacagtgatttttaaagaccctgaagttgttcaaacctataaactaaaaatttttacctctagaaatatattctaaagaaataataagatatatgtgcaaatatttagctaaaataacttttattatataatttgttctagtataacagagct

SEQ ID NO: 1563850 - DNA, 4001 bp, Homo sapiens
aacaagaccgggatggcaaatgaaaaattccatttataaatattggtcattaacctaatccaagagtatattaaaaggaaggaaatactactagaattggaacacagacagcaagcacaatttgtacttcccacacaagccctacctggattctaatttagagccccaatgcctattttaccaaggcatctttaacttatgccactcagctgaagtgatacatattccctagacttcacgtggggtcaaggaaaaacatgatagttgcctcagatttggctctggcctcctcatcttccacagcctccctatattgttctggccagttctgtggtcgctttctgtagagcctggccatgtactccaagactttcattttgatggtttcatggtgagctcgaggaccccatagaagctcatattcaactggattagagtaggacagtggcctgcattccagatagcgctgtctcataagcttacgggtgatggaatgctttctccctacatccacactaaatcttcgaagcaagttccagacattggcctctttgacacggttgcccatcaggaagatcaaacctaggattggcattacatattcttgagtgggtctccccaggctctctagcatcacttgctcttcctctgattctggttgctggacaaggaggtagatgtgctcactggtatcaacctcaatcagagacaacccatagaacatatcaagaattagagtagctctattgaggatatttgggaacacatcctcaaattctttgccagtgtgagccaatagctcatcctgatgtataggcagcatctcctcagtgacactaatagccaactggaccaaatcatttgccttatcattcatagtgtcctccgaccagaactctaagccagcagtcaggcttctttctttggttttgtcaccttccagggccttattatattcttctggccagctccagggttcttcatcatgggcatctgacacaaacttcagggcttccatctttgtgatttccctgtgggctctagagccccacaagaactcaaactcaaggggattagtgccatacaccggccagtactccaagaatcgcatgcacacaaagtcagtagtgaggaggttccttgtgttcccaaagaggttgttgatcctctgaggcttatcccacatatcaacttttagcagcaagtcccaaatggaggcctctcttgctcggttcccattcaagaggatgtggcctaggactagggccaggagacttgcttttggcatgtccagggactccgctatcctatcggtgatctggaaaccccgtttgctgactaaattgtaggtgtcagcctgaggatcaataactctcaggttcaacccaaagacctggtccaggtgagctgaggctcgtctgaggatctcagggaactgatctgagtactctctgagaaactccagcatctcggactgctggatagacccctccgtctggcttttcattctcatgaaattcaccaaagcaatcgacctgtcttctagagggtcatggaccctgagcgcccccaaacgtctggactgctcgtcgatcaggacctccaggtcattcgggtcctgaacggcctgggaagtgttgacacactgagagttgattggcgcctgagggcactggggggcatcaacgactagcatggaggtgggggacccggaggcgttagtagcttgtatttcacctctgccgtcgccgtaatctgcagtgatctctgcgctacagtggcgtgcattctggcttaccagagacatggttccaggagacaggagcgggaacggtgagatcagcgatcagtcggagagaggaccgcagcagtgttggtgcctcggcacaaagctgaagcccgagaccctggagctggaaggatcaaaagtgaaatctggtgtgaagagcgatctttctacacaagtgctggccagcaacgactgcaagcctcagagcgttattttgccgcagcctacgcaggcgcagtcagtctttgcattgtggtggccacgccccactcctcgtcttccatgctttgtctctcattcctgccccctcacctctgaagggcaggctaggctggttgaagtggttgctgctgaattcgaacttgttagagaagagaattcgagaaatggagtaacagatatagcaaaagggtcaagggatgaggagccgttcagtgatgctccctccacttgaagtttttctgtggggcttaaagcaccatgctatcaggcggtagaggattcagagaggaggaggaggagcagaaggtggaggaagggaggaggaggaggagggcgctaacgattagaattatttcacagactcgttaaagcttccattcactcaacagatatttactgaccacatgccacatgccaggcacagtgctgtacatcagaatacaaacatagtgatttttccctttttgtgtggagcttacattctggggtatgttcaaacaatggtaataataatgagagataacacttatggagcactgactatgtgcaggcactctttctggtgctttcattttcctcatacttattcatataatgctagctcttagatagctactcttaatgatcctcattttacagatgaggaaactgggtcatggaggtaaatgtacctgtccaaagtcaagcagcaataaatgaaagagaccactcaggtctgtcagtctcaagcatattactttctctcacaccatctgatctttaaccttatttattaaacatgactcataaaatagatgaaaataggtgctctgatggagggtgaattaacatgtgatacaaacacagaggtaagtattgaattacagcttagtctggggtatgttaaattgcgggcagtttccaataaagcctcaagaaggagttgagctctaagtgatgaataaatgggaagggtttatagtagtattctaacctgaagtaacagcaacaggaaaggcctagaggagtgtaggtacaagtttgtgtaacagccactcaccacggtgactagagccagagtgcactagaatgggtggtagatgaggatgaaggttgctagacagtaaggattggattttctgttcttcacttagtatgtcaaagcttgttgtggccccacagggcaggaatggcagcgtcagaatagaagctatttattcagagggtttatgtatgtgtatgcgtgccagcacacgtgtgtttggggaggcataatccaaacacttttgccaggaagaggtgagtcagctgctttattttctgagagctctactaaaatagttgggctaaaacataggtgtaatcctagacttcaatcatcaagttgaagactatgatggttgcatttttcagtgcggcattggaaagggaaaagatttatatagggttgccatctgcagttacaattgaaattcttccttaaattcttgatggtaatgaatactgttacattccacagaacattacattcagtaatcttatgccctggaattccttcagaggctactgtcttcacatgtgggggttactcacctctgaaattgtctacatcccaggtgctttcttcagtactgaagtaggtaactcagggccacgaatttagtcaaactaggctaaagagatcaatgtttacacaaatgaatgtgcatgttctagacggtagaaatgtgtggtttgtatgctgatccttttttcggggagagtgttgtagaaaccagcactgtcttccaagctgctacaaaggtatgattaaggccagacctgatggggcccttcaccctggtctttaaccttccccagaagggctcctgttccttgtcttagataggtgcttcccagggggcaaattgagataagatctttaagctctctagttataaacaaaaacaaacaatttggtacattttccccctgaaattcagctcacagtttgtcgcgagttgaacctcct

SEQ ID NO: 1563851 - DNA, 4001 bp, Homo sapiens
tctgacggtctcatctttttttatttctgaagtaccccatgacaaccttttcccctgcaaccaccccttctctctgccctcctcctctcaagatgatttttgtgtattttctacttccgtggcaggcaccctgtgatgtcctcttctttttgccagtgctccctcccctatgctgggtggagtatccaatcaaatatctaatacataatattttcatcatatattctgatcgtatatttcagtcccccccaaacttatttaagtgtctcttgaattttcacacatcctatggtgctcccttccccggcccactccccaagacaggtcacataaggttttttacattttcatggcacttcaggctcgttctctatcccagcatttactgcactgccagtttacctatttttctttcccacataatctagaacattctttggacctggaggatgtgtactagggagtatccctagaatctagactggtgcctcacataacaggtggtcagaaaatgcgcaagatgtactattcgttaggcttttatttttctctatgttctgcagtaactaaggaaaatcatggtaaatgtcaatcttcacacaacagcagacacaaagggtttcagaaacgtcagatatgaagaaatcctccatccttcttcaacattttactgggtatttcaacttcaaaagaacagcttatttctataagtgctgtacaagatcatagattatgatggaacgacttcattttagaacgttagcaaaactgttatactaaatgtcaatgacaggaaacaaagaaaaaaatttgttcaattatatttttaaacatattgttattctcaacaaacggaattttaaaacgaatacaattttccattatcaaaagcaaacactctatttcgcagttgaacaatgatcactgatcacaaatatcaaatacagtgtcccccgcccccaatcgacatcattttcaacttaggaccctggcatctactccttggggtacctgtgactctcttttacacccccaagggtctgcctcagatctacttaaggggcggaataacccctagcacctgaattgaggatagcctcaacctctgcatcatcgtccgaatcccagtcataattacaaggccagtctttagagcatcggttacgaacccttgccacaaaatgcatgactttcagtttgctcgattccacgtgtgctcggggcccccagaagaactcatactccaccggactgctacggggcaccggtttataaatcaggtaccctctgcgcacaaactcttctgtgacgatcttcttcggatctccaaagatgctgtgctgacgtccaggctgcattcctaacttccccagcactttccagaccagagcttccttggcgctgttgcccatgatgaagatgagcgctaatatagacatcaggagacttttcttggtgccctgaaaattgctccggggcactgaaggcttttgtgcttgggcagtgctcgaggcttcttcaggggtggtagaggcctcctctggagtgctcgggtcttcctcggggccgctcaggtcgtcttcgggggtgctcgctaccacagaggcggccataggggtctcggaggcctctgaggcctggattttgcgattgttgcggttctcttctgcggctctcgcattacggcggcgccgactctttcgtccccgaggcatgtctcctgctagaggctcaaagcttacagcagtcctagggaaggatgcttgtagcctcttcaggaagcaacagctttataccgtaagaagctgctgccgctgaagctaccaatgtcaatagagtctttgtagcaataaacaagccgttctcagctacaaagggtagttcccacgccagctgacttgcgcgagcagccgccgccagcacttgccgcagctgcaagcccgcgagaaagctcagcaaaattggccccgcctctcctgccacgcacactcctagcaccaaagaggaagtaggctggtcctccacagggacttccgctagcagataggaaaaggggcaggcagcgacaggggtgggacaagggcagaaatgacagctagagattggaggggcctggagtttgcagaagagaaaaaaatagcttaaagtttctgtattttcagcctactacaaacattccaagattggctcgacggtctagggaaggagtgcgtcggctccattcccactgacgacgggctgtgtgtgtgttgggggttgggaggccaggggtggcgggagggtgtattcttggaaggagtcagctgtctccagccttcctttcctgtcttggcttacacagcgcgttcattcactcgccctgttttcagaaggcatttgtgtgtatactaatcaatttgtggtcccatgtaggacccggataatattgttatggcagatgtgctggatgatgtgaggagatgggactgcagaaacaagcagggtgaaagaggtgcagagcctttaaaatgtggtagatatatgcacgatatatatactgccctgcttttatacatacatacatacatacctatatcgtgcatatatctaccacattatgtttatatacagtgcatatatctaccacacatatatgtatgtatgtatgtatgaaagcagggcagtgacaggatcagaggaattgcatttgtgcagcctctcagaaaagcaaactgtttcctggcagaccacataggaagcaattggaataagaagcactgggaactaaagtatgccttaaggctgttgccatggggatggagaggcagaaagacattttaaaggtgaccgttgaagggctttgcagacagaatggatgaagtggggaatgtggaggggatgatggagttcagattggctccaaggtttctaggctccagtcttcctggactcctgatttattttgcttctttcagagcatactctgaactttatccactgcttgcttttgctcactgtttgctctgcctgacctgtcttctcagccttctccaactatctaaattccatttgactgctcacagacctgtttctccctgaagcttgtcttgatctgcccaaaagggtaatgagtccatttttactccattgaggaaagccctataactagcactctatatctttcttatgtcattcaaggtattagtttaagcaagtcacttctctctaagcctgttttcccatctataaagtggggctaaagtacagccctcatagggttgtgagaattaaatgagataaaaaatgaaaagcatttattacatggtaagcacagattttgcctctcaaggttttccaagcggtgtgtgagtgtggcatttaataaatgcgtgctgaaggaattcatgatggaaaagattttataggtgttcttaactgaactcttaagaaacaaatgaatactttatgcctgtcttgctgaaattttctttataattagagcccaccgagacctcctgttgggtaagttagcaataaatcaatttggtcaagcaaagaaagcacctctccaggacacagagcactcttgagccagccctccgtttgggataacctttgcacgcgttctgggacatgacctactcaaaacagtagtctggctccatctgctgtcccacattctgagaattctcgcagtttctggtccattgataattgctctgaattgtttttcagtacaggtatgaacttattttactgtttccaggaatttgggtcttgcatggaagtctatagcatgtacaatcctaccctcatgaaacaaaaatgggaggattacttttgcagtttatttgcttgtttttagcatgaatttttttttactgcgacttaatctcaaacgtagggcaaagaagagagattaatattataaacaccaatagctagctgtataaaatttaaatattaggccctacttactgtttatcttttatatattggatatggcaaaaccctcctattac

SEQ ID NO: 1563852 - DNA, 4001 bp, Homo sapiens
tgtacatagtttgccctgaggcaggaggcctccgatagaaggatgagatggtacctggggccggtgatccacaatagtggcatgaggcaggcgactgtctgtgacctctatgtccgcagagtccagcacgctaacagctgggagataaaagcagtggagagggctgttgggggacatgccatggaaactacctaggacctgttccctgagttaacattctagcctcatctacttgtcttgcccctgcagctcatatacaaactggcccaccatttacgcaccatcccctcaagtaatcttaaaggttctcagcccaaacaaattaactgttctgaccccaccttcttaataaacaatcctgggctcagccatgtgaataatcttccaggccttcctatctccctctaataacacgcagaacacatccctcaaacaacaccattcggcccaccctggagaatgctactccaaaatttggctcctgaaccttccatagcacgccctctaattagcctctaaccctcatcccattcctgacatctcaagccccgcccccatgggactataggctccacccccgtgactcacatttcaggcctgccccttcgctgcgtgcccgccccccaagcactctccaggccctgcctcctcaaaaaggaccgccgccagaacgggggtccagttccgcactctcatctaatctagccctcgccgactgcaataaccctcaaggaatatgctagaataaccccaaggctcctcccactcgaagcaccctccgatccccgccccaagtcgcgccccttggccccacccaagacagggcagtagctgctgaccccccaggcctgtcccactgaacccaactcctctccgaaccctcccccagcggaggccctgcgccagtcactcaccctccttccggcgcaggcgcaatgtggcgcccgccctgcgtaccagcgctgccacgtcgaccgcagctcgcgccgccagggggcgcgcgtccaaccgcgccaggagctgccgggcgctagggcccgcgagcggggaggggccgcggcctgcgcgcaagaggggacaggtcaacgccgaccctcggcctcggccaacccctatgcttccggacgctcgaagacctagaaatgcccctcaggatacccggcgacccctggccactccctcgatagtttcggaggtcactgctgtccctcccctcacgcgatccccgaccgtcgcgggtagccggtgcacccccgcttgctcccacggtgtccctggagatcgctgtttgactgcaatagtcctagacacctccgaacaccccgtgaggtcctcgactgccccctaatcaccctggatgcccaactcttcgcccgcgatatctcaggggaccccatttccccagatatcctgggagaacacggcctgaccccatagccccggaacccccaattccccgtctaagtatcctaggcaaccgctgctacccccatgaattccctcagagggcccgttccccccatggcccacatacctccagagtccccctccacaggtccccaggggcccccagctcccctccccccagttcactaagaccctgagtgcccaggtgtccccagtgaccacgggcagacccctccccgcacatctgcacgtctccctggagactcctgagagcccctcccctgctctggtgcgcggccctttccctcgtgtgtgggtgtgggtaggggacctccagcccagcctccatcgctgggcccctgccccctgccaccttcacttgggcgccagagccgctctgtttaccacctgtcagaaggaaaaggtgtggagcagacaggcgggacggggatggcggcgactcgccctgtccttccccaacgaccccaatccctgtacctcctctgctccccctagggtccgcggcgtcccctgtgcgcggctccatggccagtagtccgccgggtggacgcagggctgccagctacgaattttgagctctggggcgcgctcacctggcggcccgcccaggccctggaggctgaagctggcgggtcccgtgcctggctcccggacccgcgcggtgacctacctggcggccagcaaggaggcctggctgtaggagccaggaggagtgcttggcctcactctgctgcaggcgccgcactctgttaactaaaggtcctagttagaatttaaaagcctgacaataccaactgttgctgaagatatggaggaaatggaactcctatacctccggtggaaatgtaaaatgatattgcaactttatttatttatttagagacagggtttcgctcttgttgcccaggctgaagtgcaatggcacgatctcggctcactacaacctctgcctcccgggttcaagtgattctcctgactcagcctcctgagtagctgggattacaggcatgcaccaccacgcccccctaattttgtatttttagtagagacggggtttctccatgttggtcaggctggtctcgaactccctaaagtgctgggattacaggcgaggcccgcctcagcctcccaaagtgctgggattacaggcgtgagccactcgtgcccggcctgcaactttagaaaacagtttggtagtgtctttaaaaactaagcgtacacatatgagccagccattccactcctgcgtatttatctaaaagaaagcatacatttacacagccttgtcttacaaatattcatagcagctttatttcctgtcttattcatttagaactactgtaacaaaatatcgtagactgggtggtttaaacaacataagtttctcacagttctggaagccggaaagtccacgatcaaggtggtagccaatttggttcctggtgaggtctctccttttgggttgcagatgcttgccttcttgctgtgtcctcacatggaattaagagagtgaaggagagtaaaggcgtgagagaggcacacacagagagagggagagatctctctcttctgtttcttataaggtcacagtcctatctggttagggctccaccttagtgacctcattttaccttagttgcctcctaaagaagctatcttcagatacagtcacattggaggttagagctttaacatatatatttatggctgggcacagtggctcacgcctgtaatcccagcaccttgggaggccaaggcgggtggatcacctgagttcaggagttcaagaccagcctggcgaacatggtgaaaccccatctctactaaaatatacaaaaattagccaggcgtggtgtcaggtgacttaatcccagctacttgggaggcagaggcaggagaatcatttgagcccgggaggcagaggttgcagtgagtggagatcgagccattgcactcaaacctgggggataagagcgagacttctctcaaaaaaacaaaacaacaacaacaacaacaacaaatatatatatatatatatatttatgggtggacacaattcagtccataatatttgttaatatccaaaaactggaaataacccaaatgtccattaatagttgaatgaggccagtaatcgcagcactttgggaggctgaggtgggaggatcgcttgagctcaggagttggtgaccagccttggcaacatagtgaaagattgtctctattttaaaaacatagaaacattgtctctattttaaaaatgctaatgcctgtaatcctagcactttgggaggctggaggtggaggcaggaggattgcttgagcccaggagtttgagaccagcctgggcaacatagtgagaccccatctctcaaaaagaaaacaattttcaatgaaaaaaatagatgaataaattaacaaactatggtatacacatacagggtaatacaactcagcaataaaaaacaatgaaggatttggatgaatctcaaaaataattatggtaaaacaagccagacccacgctccaaaaaagcacatgctgtatgatttcttttatataaaaatctaata

SEQ ID NO: 1563853 - DNA, 4001 bp, Homo sapiens
ctaagttttaaaaagccttcactttttaattaaaaagaataagtggactaggcacagtggctcacacctgtaatcccaacactttgggaggccaaggcggaagcaacacttgagcccaggagtttgagactagcctgtcaacacagagagactccgtttctacaaaaagataaaaaagtagccagggatattgtggcacatgccggtagtcctagatattcgggaggtggaggtggaggtgagaggatcactagagcccaggaagtcgaggctgcagtgagccatgatcccaccactgaactccagcctgggcaacagagcgagacccggtctcaaaaaaaaaaaaaagtggtcatcgtggaaattcaggtaataccagcaataccagcatgtaaagtaaaacgtgaaaacgttcccctcatcgataatcccaactgcctagagatagccactgttaaggtattgtcatgtatccttacagagatttctctatacatacacatatacttatatataggggatgctgttgtttttaacataaaaaatttctaagacataaaattatgcattgctctgcatcttcttttccacataaccatagcttaggatcctcccaaagaaggacatcaatttctagtttcagtgtctgagcctgctcacttcacgatacttttgacaattgtatatttttattgtactctttgccaatctaataagcaactcattaagtttaacttcctagcttagtttttcttcttatggaatagttcaaatacttagaaacatagagaagatagctttctttcttaattcagctcaagtagacaagtatctgaagtgcttaactggtatttttagagtatgtgcacagtttttctctattagaggaagcacagaatgtacaggaaatagagttagaatgactgacgtagggtttgagtcctcgttcattttctaaatttaagactctttttctcatctataaaattagagggtataagtaattgctagtagtcttaaagtcctaagagtataggactccaaatcacaaacgtttgaaaacgcattgttaaaattcctctacctggattgcttaatggtgagaatactgtatctcctccacttcctaaagcctatgagttccacaagatcttagttttgttcatttatgtatatcaagtgcctagaacattgcctagcatgcttacatttgtggaatgattgaaaatggttaggagctttcaatctggtaaattgccttgaaacaattatttggacaaagtaataaatctggcataatttcactctttggtctaactctcacactcctgaaatgaaaatgctagaaaatagagaactcttacacatcattcagggagttacatcggccagcagtatagagtctcagatatcctactcctgggatctaaagtcgaactccccacccccaacacctgacggggcccacactcaaaagtgtcaaaactcatagctatgcacattcacaagactgtagaagtcgggctgtcacctacgctactccactctcagattctacatccccagaagacaaagagttacagttccttctctcacgaattccacaactccgaaaaccgcgtaattgaagccaccaaaggcatagaagcggcagggaaagggggctgggaagaggcgaacagaccctcttaagccccagtcattgggaaaagcccatgctgctggaaaccgcgttctcacctccttctttctttgggcagaggctgagggaacgtcgcaaacgatgagcagcgccaccaccatggtcacagagacacaccaaaaccgccaacgcgctgccatgttcgctcctctcccttctataagtgaaactttgctccggctaggtctgagggtggggcgtgagaacaggcaaatcggccccttgcctttcctcattggtccagctcagccctgccgggagacccctcacattacgtcacagcgcgctggcgctacacgcccgctaaaagaaggttgatttctaattggccccggtcggccaatagaaaaaagataatctggagcgttttcattggtccgctaaagataatgacccgcccctttctcgatacgtaaacatctagcgcgctgacgctttccaagcacgcatgcgcagttgtgaaatattgcggagttttcggagtccaaaatggcttgaagttgctagaacagaatctttcaaagactcatttagaagtccttgaaattcgccgccttcatgtaatattctagaaaaatgggacctagccgcgtgagggataagagctatttagtccgttatcctgcctccaaagtacttcaaagtgaaaaaataaaagtaggaaagcaaaaatatacctaataccactgagggaaatttttaaaggtaaatatgaacaagagcttgttgaatacctattgtgtcctagaaactgccaggagcgctgaaaaaagaggacatcaaagattattttttaaagtttttgtttatttatggctttttttgagatggaatttcgctcttgtagcccaggctggcgtgcagtggcgccatctcggctcactgcaacctacgcctcccgggttcaagcgattctcctgcctcagcctcccgagtagctgggattacaggcgcccgccatcacgcctggctaattttttgtattttagtagagacggggtttcgccatgttgggcaggctggtctcgaactcctgacctcaggtgatccgcccgcctcggcctcccaaagttctgggattacaggcgtgagccaccaagcccggccggctttttttgtttgttttttcagttaaactccttgacttaatatttaaagcaccaacaaggactttaattgcaggttatagacagcaaattccttctttttattcattattttgtttgggggatgggtacaaaagtaaggttgtaaagaaggaaaacaccaacaagataaaatcaatctgcctacaatttggatttattttgatggtgtggaaaatattatatgactattattttaggcgctactggataaaaaaaccaggaaattaatttcagtatgttggagagacaaggagatgggatggaaagaaaaatagctggttccgaagtgaagagatgtgaaatacagatgtgaaaaaaagttaaatcatttatggaaacttatattaagaaaatgcaggccgggtgcgatggctcatgcctgtaatctcagcactttgggaagtcgaagtgggtggatcacctgaggtcaggagttcaagaccagcctgaccaacatggcaaaacccccgtctctactaaaaatttaaaaattagcccggtgtggtggcgcaggcctgtaatcccagctacatgggagtctgaggcagaagaatcgcttcaaccctggaggcggagtttgcagtgagctgaaatcgtgttatcacactccagcctgggcaacaagagcgaaactcaatctcaaaaaaaaaaaaaaaggaaagaaaaaagaaaaaatgcaaaataaaagtacactgagacatactgtatgattcaatctatatatgacattctggaaaaggcaaactcattggtacagagaacagattagtggctgccaggggctaggggtagggaaaagggttgatcacaaagaggtcaaacaagggtgtttttatgatgctagagctattctgtccttaattgtggtggtggtgacacaattgtatgcatttgtcaaaacgcatagaactgtacaccaaaaagtgaattttactatgtgtatgttttaaaaataaaaattttaaagtttaaaagggatatcttacctatcatattggcaaaaatccaaaagcttgacactacatgctattagcaaggctgtggggagtcaggcaccctttatattaatacgttgctggtgggaaggcaaaacgttacaacatctataatttggcaatatctaaaaaaactacacatatatttatccttta

SEQ ID NO: 1563854 - DNA, 4001 bp, Homo sapiens
cccatcgcctacacttgccctcctgtcccgagcggctcgaaaccacttggagacagccgcccccgccctctgcctctgcgtcccttttccccttccctctctccagcctcctgggaaacaaaggggctttttataaagcggattgttggcggcggcggcggcgggggtgggagggaggggggatctataaagacaagaagaggtgggagggagggaaggaaagaagctgcgcggcctccaggggcccagagctgcggtggcggccgggaagccccggcgggtgcacggtcgaccccgcccggccggtgggcactcgggcggcaacccacgcctgccaagagctgggccgcgccgctgcgatgtcgctcgccggctcaccgcaaccagggaacacaattccccaggcgcgggccggggccgctgggggcggcgcaattcccgcgggggtctaccccgggagacccaggccctctccctagccaactctttcaaaattgcttggtctcagggagactttgcgcctttgttccagcgcagccgcctctagtaagctcggctcgctcgcccttgcagacaatgtcccggagccggcctgggtttgcctacccgtgagcagcacgttcaccgtggggaccgcgcccccggggggcaccgtggtgccaaacaacaacgacaagccaccccagcaaaagcagccccttctccccacgtcccccagccacgctgtgctcccgcccgctcacacacacccacactccgggtgcccaggtcagccgcacccagctgcagaagcgcggcggggcgggagtgaatgctccagcccgaggcgcgtgtttgcacaggttccgatggcttcagggccgagctttctggcaggctaatcctattagtgtctgctcagtccgaatttaatcacggatcagaatcagacgacatctccagctttccaggaggcttcggacacactgcattgggacggagcctggccaagccaactggccgagaaaagtatttggcggcgctccggggggcttcccgcccgcgctagccggcgccgggcgcccagctctgtcgtcgcgcggatgctggggaacctgaagcgcggactctgacgcaggggcgccggggctgctccgcaggaacccagtccgggctgccctgaacaccagctcagctccgggctgcgcttcccaggagttggcaggggagggagtgcagggcagcggattcggcgcgcacactccacactctcgctcagaggcggcaaacagcgttggggtggggaaatccttcatccagcgcccactgcctactggcctgggctcaggcagctggcatgtgaaggcaccgtcgccggtgacacccaggctgcaagcgacccgggggtgctgggacagagtgggagcctcccagtagcccagcgtagcccgaggagcttgcgcccttctacctttcctccccggtacgtggctgtccccgccggatttcagacgcccgacgggcgccgagccaaaggccgtggtctccggcgtttcgagctgcgcccagcccagccgggctggttcgagaagggggtggccgcccgcagcgccaggtgggccgtgtgctcagagcaaactttagggtctaccgactcgaagcacccctgggaccccgatcctcagcgatggggaccataactgggggctacaagtgtaccccggaacccccagaacagtcagacttcctgcacccgccctcagccttaccgtgctgcagagctccggcggcggcgggggcagtgtccgaggggcgggcggccgccggcgcgggcagcctggactcaggcggccgccaaggaacccagccctgttgcagatcaccccctggctagcggccggtgcccccgcgcccgcccgccgccggccgcttcagctcgcggccaagttcatgctggcggcgctgcagtggcggcctcaatctgctcgctccattcccaccgcccggctccgcgccgcgcgcccggaaggtggagtttcgggggtttaagttactgataggcatttctcactgctgtgtcactcggggaggaggagacacgcacgccgcacactcacacaccctcacactcacggcgacgagcggctccggccttaaaggggaagccgcgctgccctgcccgcgaccccgccagcccgaagcctggaaactcagggtttccactccgggatggggcagcgggcagccaaagagctgcggccgcccgaggggcctcccgggccctcccaccagtctttagaggagaaagcggccgcaggctggcttcgctgttgcagcctcatttctccagtcggctcgaaccagggcagctggggagggatcggaggggcggaaggggcatcggtgcactcaccttggctgctccgcactcagtggagggtggtctgtgcccccggcgtcagctggcttgcctaggcggtgcgctggtggaaagaggcgacagcagggttagcggagcgcctccagcagacagagcccgccggagggccgcaggcggggcccggcgcgcttgggaaacccgcacgccgaaggtagactttccgcgtctggggaaaacgagctggtgagccgtgcgtggccgggacacacgaagagcgagcacggagagccaaaagccagcggtcatcagtgacagggcgagagagcgctcaggaccgagagaccaagaaagacaggagaccgtacgagacacagagaaggcagagactgagagacagataccgagagaggcaccggcggagatagaggtagagacacgatgaagggagaggagaggagaggagatgagaggagaggagaggagaggaggaaataaggagaggaggagagggaccagagaacaagagagcttgcaagaggaatgacagatccccagaggaccctgaagtgtcacagggacgggagtctcatcacaaagtagcctattcagcccccatcccccttcccattttcaccagagcctgaccctagggctagcggccaggcccttctcctcccctcgccctgggaggggcactcacctgcagtgggtggctgctgggtgggtagcgccagtccctccgcccacgcatccgctcaccagctcgcgccctgactgccaaacagacccgctgtggcggcagcggggaccagggctctcaggtggcagttagtgaactgcattctctccatcccggccgagtgccccactccccacttcccagtcccccacccttagcgcggacgctgtcggcgtcgcccgccagtacgcttagctcagagtccaggctcgctggccagtctcccgttccactggaccagggcacgcgatgctcccgcccaagctgggctggattggctccctccgcagttatcccaagacggacacctgcggcttctgcaggaacataggttccttgggaactgccgggcgggccagcgcgccctgtccaccatctgccctggcgccgagtccagcgactcccctcccacctatcccacctcccgggtatttggctgcgccccttctctaggatcccctccccggatgcgtttcctaacctggacttctccagccgatggcagctgcaggggctgagcacaacccgggaacgccgcgtctgctccgacagcagcagcgctcagctcctgtccgcacctctgagtagcaacctgtcaccaacacatctggtcacgctcagcggagccgcaggccacgaataaaggggtgggcccgccgcccactaggcccctccttccctccacgcccacgctctcggccctcggaaagcgctggggccacctccgagaacccagcaagatcccttcgtgggctacgtaggcgcagtgaggctgggcgattgcctcctagcgtttcacgaagttacctggaggaagagcggcgtccaggcccaaccgcgaggcacatgcaggggctgtggcttcgcagccccagcgctgccaggatgcgcccagcccaacag

SEQ ID NO: 1563855 - DNA, 4001 bp, Homo sapiens
caactgtgaagaagaccatctgagagagttgcttttggaggctgaggcaaatttttaaaattctttgttctcctcaactggggtgaattcttggtcttctaggacagcttgaagttttagaaagagtcaagccactcagaaccaacagagaactctttcagagaacaaggtgtggcatagaggaggcagagggctgatcttgatcaaatccaaagtgtgactctaaagcaatgaatgtgaatttttggcaaagcttacaaagggctctaaaggccatctgcaaagagaagccaagcctggaaatgacgtaagcaatgacaacttttccagagtaaatgcacagatggccactccaaggacctattctaaggacaacccccactggaatctgtgcattcaactgtacactgatcaaaaccaaagcagttacttactggccacactttttaagagtgttgatggagttggggagaaggggaagaggacccctgcatccacaatccatcaacactttcttctacaatttggcccaagtgaatggaaacaagtgggaaataaaagagaaatttaaagtcatgctaaaactgatcacggactctgggagcattatcaggtttttctttactgactcaattgttgatcataaaagagaagcatgaaatataaagggtaattaggatggaggttagagatttctttctagaagaggcctaaggcctggcaatttggacaggctgctggccaagtaatgtctccatctctgccatcccacctgactgcaatctctgtgagagctggggagtgcagtaaacagttttgtaaatgtctacatgctcaacttgatagcacattctcaatacattgttggtggttgacaatgaggaaacaaagagaaaacaagatttcaatcacctccatccacatctgtgcacatatcagaattttaaaataaattgaaagctgacttgctgaaagtggattgccctgggaattggagaagacaggccctctagttatgtgaaatggcattacctcagagcccagggcttccagttctatgaaaaggaaggaagccgacccacggctctataagagccatttcctctctgctctattaattccagagattaagcaagccactcctctgtggccctaataccctgagataacagctattgtgtttgctgcaattcctgctaacagagctaatcttggtagattggtggtgttgcaggcttttattgtcaaattaaactagtcaatggctctcatagtcccttctatcatcatcctgctcctagaactaccactggaatccctaatcctgaggttcagaacacttggatgatgtctgagttcccagggaggaaagtagaagtgtgtcagatgagtttctaaaaggacaacagggccagaaagttgaatgggaagacctctctgtgcctactcactagctttttgttctcagtcatactaggaagctcatgcaatatatctagtgcttgccattctgactggcttctattaagagaaaaagtaaactcgtcttccctctctcatccttcctcatttttcttattgaatgggtgcaatgcagtgatcactactagactgggaggctatatggaaccttagactatatttccagctcttctagaaacccacaaggggtgggatcagctcatctcctagatctcttctagatcacatttgaattccttatattttgagttggatccctgccaccaagtttgcacagaaaatttcaataacacatcttacgttcaagtttaagattagaagcattaaatacccccctccccccatggcccattgtctgaccgattcctggagctttctgggctcctgacgatttcccaccatggcgaaatggggaagcatgctcttgattacaagccgacttttccagtcatccattgtttgacctgcaaatttattcttgactctccaaggcgtttcccaaacgacctagacacagggcttagggagacaaaaagtacactgtctttcagatatgaagatgagaccactgaccccgtgaatcacagactttcactctgaagacaggtttgtgtggagtcagccacattccttttcccttcctcccacccaccaccctcattgagcacccccacccccaagaatgaggggcatttttgtgagacagttggctgggataaaatgacagtccttgaccagaggaaagaacaaagttcactggaaggtagaggggtggatggaggagcagcttcatgtgactaaaataacactgggcctacaagtatgatatctgggtcctacgtctggatttgcttttgtgtgatatgcagtgagatccaggaaaacttcctctgttctctgagatgcaatttccttatatgaaaacatggtggctaaattaggtgatggcttagggcctcttcagctctactagagtaagccttatggttcatagaagaagcagccaccaactgtggcactgttaggatacagccaagtgagctaacagttcaaagcctgacagacacaggaagggagcaacagatattgaaagggggctcatgaaaccctggtgcactgatgtaaaggaaactgactgagcaggttatgatcatggctactcctccagtgacagataagcagacatatgcaaacccaggtaaagtttcatttctttttgtttttcatgatgtagacatgaaataagagctccactaagacattaatatataaggacagctctacttcccataaacctccttggcagtacagcatcagcctctaaaatctcaagtctaaacctctgcctctggaaatatggagaagtacttttccccattctctcactgagtatcactaaaacctctgggcattatatataaaacaaacataataagacattaaaaggtggaaagaaaaaagtatactggttagggaccttgggacctgagcaatgatgcagtggcgagttctctggattttgtttctgcctcatatataccagacttggagctgaagaagccagaaacccagaatgccaatgggcactaacaaagaagccccaacaaaagcctgctctttctagccaaaagaccaggaaagaggtaacctagcaagacagaaaacttttagacaataactgctctactccagccaaacaccatagaagaaaatgcagtcccattatattccatcaacaaaagccaaatgaggagcctagactccacccccacatagcagtaatgaggtgcccttccctatccgcactagagtagtatcagtaaaagcctagtagggagttggaatcctcacccctgtccagcagtaatgaggagctccatcctccctgatgtcaatgaagaataagatggtgcccgccttccctgccagagcagtgtcagaggaagtcagctaaaacagaaaatttaaataagatccagtcttataatgcaatatccaaaatgcccaagtttcagtagcaaagcacttgtcagaccaagaaccagtaagatatcaaatggaatggaaaatattatcggcagatgccaacagcaagatgacacagatgtcagaactgcctgacaaggattttaaagaagtaatcattaaagtgcttcaaccaacaattacaaccatgcttggaagcaaatgaaaaaaatatagaaagtctcagcaaagtaatcagaattctcagcagagaaacagaacatataaaaaagaaccaaatggaaattttagaaatgaaaaatacaataatggaaataaattcagtgaatcaaatcaagaggataatggtaagaacagaggaaagaattaagatagaacaatagaaacatcacactctggggactgttgtggggtggggggaggggggagggaggagggatagcattaggagatatacctaatgctaaatgacgagttaatgggtgcagcacaccagcatggcacatgtatacatatgtaactaacctgcacat

SEQ ID NO: 1563856 - DNA, 4001 bp, Homo sapiens
ttagggcaaaggatatgaaatcagtgaggcaaagcagccacctcaggaattagtactgcaggtcttaaatgggagaaaatcgttcagccacttacaagctaggtgattcgacctcaagagagttattgaaactccccagacctcagtttcttggttttgcaaaacggggatgaatttagttcccacctcacaggactgttgaggactgagaaaatccacgtaaagtgctaaatacaactgcacagcaagagctaattaaatattagtatttaatagtagtagtagtaaaattattgtgtctgcctcccccagtcacaccaccagcaaaactggcacaacccccactcctacctcgcaggatatggggccaagccatggctacactacactctcgcatgcatgagagacccccaaacaccacaagagctactgtaggttcccctacccctcactggccagggtcccccaggccaccgctacggtccacactgacctgaaatgccacctccgatcacgactacgtcgaacatgtggcccgcgatactcgccttctcttgattctccatgctttggctgacacgctcctgggtcgtaggcacaggagtggggacggcaaagggtgggaaggacccttctatcaactcccccggggagcccgggggcggagccgatccttcttttgatacccggggggagccgggcactgtgggcggggcgaacccttttgctgatactccgggagcgcccaggggcggagctgatgtttcagctgatacccggggggagctgggcactgagagcggggcggacccttgtactgacactcggcgagagttattaggtttagaatgtccttgtgtcggcagctggaaaggattactgggtgcaggaggttcttgtattgaaccccgcggagtgtcaggcactgaggtgggggtagacgcctgccttgacactggggggatgttatggggtgcaggaggtgcttgtggcgacactggggaaatgttattgggtagaggtggtcctggtaccaaaccccaggggaagctggacactgaggatgcggcagacccttgtactgacactcgggggtgttactgggtgtaggaggtgcttgtattgacacttgcgaaaggtcattgggtataggaggtccccgtacaaatatccaagtgtagtcggacactgaggtcaggttggaatccgggggcagggtcggtccttttaccaaaccccgtggggtgctgaaccctgaggagaaggcagacccttgcaatgactctacgggggagtttacgggcggggtaggtcctgttactaatacccagggaatgccggtgtcctgattggaggctgtgacggccccatcggaggagttcgagctggtggtagacttggggatccgactgctcgggttgtaagcgctgaaaccccggaggccactcttggagtcggagtcagtactctcgctaagaccggtagtgctgattggggagtgtatgctggagctccaggaggcggcctcggcagttgaggacgtgctccactgggaactggctagcggatccgagacggaccgccactcagaacggacgctccattcggacaggctgtaggaggtgtcgtccaagctggagtccgggttcgggacctgggcagttgtgcccccggcttcgggcgggccctccgccttgcgctcggtgccggtgccggtactggtgcgggtactggtgccggtgccggtactggtgcgggtactggtgccggtgccggtactggtgcgggtactggtgccggtgccggtgccgccggggaaggaggctgaggcgtttgtgctcatgtttctggagcacgctgggcgctgggggcggtgttctgcttcccgcagcccttctccacggtcaggctgttctcggtacccactcttagagaccagccccgggctcccggcccagtcaggggcggggagaagtgactctaggccggcctggctccgccttcccggcctgcctgcaggctcgcgctggaaaccctgccactgggcgtggccggacgatgccactgcaggcggggggcgcggttgcctggcgagagtgggggagtagacgtgggtgtagccgcgtgggctctcaacctagtgctttcattctttagttttaactgaaagctatctgggcaagagtggacttaaggaagcagatatatgaaggcggctgagccaggcaggatcgcagggtcgcagggtgctgccccacttggtctggcccctttgtgacgtcatgtagggcccgtcgaggtctgcgcagcctccagccctcactaggttgagggcggggcggggaggggcggggaggggcggggaggggcggggaggggcggggaggagcggggaggggcggggaggagcggggaggggcggggaggagcggggaggggcggggcgaggcgagacgggacggggcggggcgagaaccgtcacttgggggagaccaggcaattgttggttctctgtggggtttttcaagctgaggcgcttaacccaaatcgaagcaagtaggcaagaaaaataactcacctatcatgtattaagtgggactgcattttaaaaggtcaaagggatggctaaggtgcagaaacaaatgaaataagaaaacatgtgtttccccatcctactgaaaagagtgctatttagtgcacatattttactgtgcagccagccttctgtttgctagttttatccctttcttaattttccactttttgttatcctgaatttgtcatcaaaagctgaatttgtcattactggaactctcaaagataggtgaaatctggccgggcgcggtggctcacgcctgtaatcccggcactttgggaggccgaggcgggcggaccaactgaggttgggagttcacgaccagcctgaccaacatggagaaaccgcgtctctactaaaaatacaaaattagccgggtgtggtggttcatgcctgtaatcccagctactcgggaggctgaggcaggaaaattgtttgaacccaggaggtggaggttatgatgagccaagatcgcgccattgcactccagcctgggcaacaagagcgaaactccgtctcaaaaaaaaaaaaaaaaataggtgaaatcgtgacgtaaatttagagaaagtgatgagaactcgaggaagctaatgatgtctgctcccacctataaacattcctcctgttgcccctcgccccattctgtatcaaacatcttgttgaataaactgtaaagaaatatggatttagtcttttcttcatcctgtttcaataacttttacttcctagaaaaggacttgagacttatgactaaattgaaatcatttttatcttggtagactttgagcatagagagaagaaaaactagatatgaagaaatcagctctttctaatgtgattctgtccacctttctccttattctcattgttttcatttattttcgttcaaatacttgatttcacagtatgtgctaggcacagggcatggtactgggatacacaggcaacacaagacagagaccatcatcatcgaacacacagtctagtggatgagttaatagaggacatagacaactgtctatctgatgtgtaaatacaaactctgacaaatgttatattagaaagatccacatggataagaaagtgttagggtgtcctgagtcctgacccctctggagattaactttgggacagagagtgtaaaaatgttttagaaagaagaaacaatgtgtgcaaaggccctgtggtagaaaaaaagcatagttcattaaggcaactaaaagttactctgtggagctctgggcaagggggagacaacgctgctgaggccgactgggccaaggtagcatccttggcctcgatcctaagagcaacaaaagccactgcaagactttaggcaagtcgcaatatacctagattgcaacttggagaggtctatctgcctgccatgtgcataatcgggcaa

SEQ ID NO: 1563857 - DNA, 4001 bp, Homo sapiens
tccagcagtgactaactggtgttatccccatgtagcagatgaagcaattgagtaagactgggccttggaaggctgctttcttggttcttagaacaatgcctattccgtggaatgttcttgagaaaagtcagatctactcatcagtaccttgttttgatcagagttcgggaggatgaatgcagaggtttcaccactgcttgcaaaaatagttaaacccttatctaccttttccagatgagtctaacatgagtaatgtgattgaacctgaaggtgtggagtatgaatcagaaagggacaaatcatgaagggaaaatagaaaaatctgaatccattgggcatactttagtgagaaaatgacttcgggggcctgaaaagagaaacttcagcttctgtaagatggggtgctatgcaaggcagcatcaagaggcacttagtaatattttctaaaacacctaagtaggtatgcttttaagtccaacttcctctaggagagaagatgtcaaaaatactgaaagaaaactgaatttatacacagccttggccaacctcagcatgttgtgattacgcatctatgtacctgcaacaccaggcacagggcctggcatgggcgagctcaccagagcctgctagacagatgtggtagcctgagatcccacccaaaggggagaaaggctggagcagaggcaggaggactggaccatggtcagcaccaaacatccaatgccttggttttttctccagccacaggagagtcagaacaactctgtcctgccctcctggcagggagcaaggccaacctctacttcccaaaggccacttgagaactccttaaggcaagtcttagacaatgcatccacgggtctggaggtgtcctaattactgctcaagtactaggcagcgttaggaggtgggccaaagcatgcccagggggccattaaacaggctgtgctgagagcatcattgattcccattgaccctatcccataggatctgcctgatcctccacagagggtaagttccaccactacccccatcccttcttctggcttctatttttcggtgcccttggtatgtacacagccccgtgtggctgagggggtagtgtctgtccccatccttgccaaatatgggctaggccagagagcaaagctgcagcttggccaccctgcgctaggagtggggtggggtggagtgggggtgcgagaggcataagaggaaaacaggcatttgccaaaaagacactgcagcctcaagttagatccgtgacaatcacagaacctcaaagaatcaggagggcctggaaagtctttggcaatcgattggccaggctccaacctcttctgttcaaggtcgttttcctgacgccaggacaacaatacgatgtggtgcatgcttgctctaagcgagggtgcggagtgtccaggtcaagttggagcaaatgactgacctttgtgccacctccccaccccttttccctggcttcgaaaattccagcaagcgaaggcctagcagccttctgggggagaagttcaaagtctggccccagagctgcaacaggcttccagcctctggcctctgcgtccgggaacgcacccaaaattgcccccaaaggagggttcagtgcacggcgctctggacccactagagccctgcccgtgcgtggacagtctggggactccagggtcagcccctgccccacggccgccccccgcgtctcccccaggcagccacctgtccgagcgcgtgaagaggaaggagggcgcacagccgcgactaacctgagatgccgccccccaccacgaccacgtcgcatttgttgctcatggcgctcgccccgttccaggcctccctggtgcccgctgctccgttttctgggcctcgatcccagtcctgcctgccagccagcccgcccgcctgcccgccggcctgctgcgcgctgcccccgtgcaccagcgcctcggcgagccgctatattaccagccccgggagcccggacgcgcagccccgcccgcccgcctacgcgcaggcaggccgggtgcagcgcagggccaccgcccccgcccgcagctctgcagcccaggcccggggagggcgggtgcctgggcggagaggtcacctaggacttcaaagagtcccgccccagaatccccactcctcagccttctgcacggtattttcccatcagcctccctagtgcactatcaggcttggcggctgggaggacggcaaattggggtgtcttccttcagggccccaattactccttgggtgtagggcaaataataagaaacttccattgagtgatttcaaggtaccaggcactgtgctcagtactttatgcatgattcctgttcaagcttacaacaatccattttgcagatgaggaaaacaaaacatggtgagtgacaacataagataaaaagtcagaaagaaaaaaaaagaaaagaaaagaaaagaaaagctaggaagattccaagacccactttgattcaccacacagtactaccatttcttggcattcccagcccacctcaccctccttccaaatacccacttctttccccactccccctacgtgattaagtcaggaaggctcctccctagcatcacaaatgccgcaccttaaatacactcttaagcaatgcagtgtgtccttggtggaagctgttgaggctagaccccaggagactagtggcagcagggaagaggtggtggatcggcattgtgggattcagagcccccagaagcagcaagccaagttacctgtgtgaccctggaacgtgggtatgaggagcctggtttagccaaacacagggatgattcaacaagattataggagtttaagctaaggtgactccagggaaaacagaagtttatgtcttctggacagtaggaaagccacctctgagaactaaaagtgggaagcagcaacatagaatggcttttcaagaaataaacaggtgaagtgcttctgttcaggcctgagaggggctggcttcagatctggggaatttgatgagaacctgaagcaaacctctgcctcatcccacaccattccctgtatctacctgctagaaaggtatcctgagcttctgctgtcctcagaccagaagacaatttgggcacttctgtgactgagtcacaggtgacaggaaaagtctttgtccacctctgacttccatctgtcctgctttggtataaaacagtcagaccctgtgcctgaaccccgatccctacctcatgtccccactgcagagaatgaagctacctcaccctgcagacagtttgtgctgacctcctccttgccatcccctatctggtccacttctgttcacaggtccctgaagctgtgggcttcttggctgtggatactcttgtctccccacctagcctgcaagtgaattacgtgccaggtgaggtaggatgaatggagaggatctgctacggtttgaatgtgtcccccaaagttcacgtgttggaaattcaatcctcaatgcaacaatgttggggcatgtttaggttccaagggctccatcctcatgaatggattaatgccactataaaaagggcctgagacagcaaatttgacctcttgctccttctaaccctcattgcccttctgccatgggatgacatattgggaaggcctttgccagatgccaacatctcatcttggaatttgcagactctagaaccatgatacaataaatttctcttcaatgtaaattaccccccttaggtattctgtactagcagcacaaaatggactaacacgagatccttgtgggatcttcttggaatctcttttgcttagttccaacagtgcaagtcagccaggagcctggggatctaagactttgaataaaaggcagactgataaacccttctctatgtccaactggcaatgagggcaggagaggatccacacggttccatggtatctggagaaaattcattagcaaacagcattttccccaaacaaaggtaatcagttaccttgt

SEQ ID NO: 1563858 - DNA, 4001 bp, Homo sapiens
cagggaaagcaaaagccaccgcacacaaatctttcagaggtggcaccagcaggaaggagagtgttgtgcctcatggcaaaaggaacatttaaccgttcagagaagagtctgttcaaactccaattttggagcagaatgaatacaagttgagaaaacggagtggttctaggtgaagtggactcctgaacgacttttctaaaaagatgttgtgctgaagagtatactcagtgtggtcagaaatgtcaggagagtgctttcaatgggtccagctgccacttgtttaaacaagcctgactccccccctaccccgcccttccagctggggagaatttgctctgcaagaaaaacagatctgcgctgcctccagcagaggctgaatcctaatcatcctagcttactattacagcaaagcaacttcccatatcctatctcatcagcttttaggtttagggtaggcactgttaactccctttgaccagaaactgaggcacaaggactcccaggtaattactgtctcacatataatgcttctgaacgtcacccaggtgacagaggtttgtcaccaaaggtgctgtaagggaaaaaacgtcaagcaacaattcattccacaccgagagaaactcttgccaatccaaagtacgcttcttaaggctggattctcaggcacatttattatagtgagtttagagacctagagtcccactccagcaaaggtgccccctaacccgtgaatgctgtgcattatgggataaaatatacgtcacagggtggtggctcacactccaccgtcagtgttttggggacgagaattgaagtgtgcaaaagaacactgggtatttctaagtagaggcaacacacacacacgtaagacaccgatttccactcctggctgcaaaatggaatcgcctgggaagcatgacacttctaaggcctcgggtgcttatgtcattggtctggggtccgatctgggcacccagagttttaaaagctccccaggtgattctaatatgtagcctgcgttgggacccacggccgtaagagaccttccaggaatgagaaagcaaaagttggataacttgggagaaggggggcttggtagggtctgggttacaggctgtttcttgggttatctgatgtttaagatgcctgaagaatcaaagagtctaaatgcccgtggcctctattttcttatctgtaaaagggcacaatgttaaagactctaccctcccccaaaggcaggacggtcctgttggacggatcagggggtgagaggataggaggggggctaaggggagggggatgagaggaaggggactaggggaaggggaggtggactaaggggagggagactaaggggagaggggactaaggggaggggggcctgcgggaggggggactgggggagggggataaggggagggggataaggggagggggactagagacgagggggactgggggaggggagggggactagggggaggggagggggacgagggggaggggagggggacgagggggaggggagggggacgagggggagggggacgggggagaagggcgagggggcggggcgggtgccctggctcgtgtgagggtaggtgaactgggactgaggtggggacgaagccgctctcacctgcgtcgtagaaggcgtcgagcacggccgtctccccgaagtccagctccccgaagggcacggaggtgaggtgagcgccctcggcctcgcaggcccgcagcaggcactgccgcgccccagcctccgggccgccggccgcgccgccctgggagctctcactgcgcacgtatactgcccgcagagcccgccgcggcccgcccccactctcgccctcgccgctgccgcctgccgcgccctccgccgccccgtcgggctccgccggcccggccgcgccctccacccccggcggcggcgggcactgaggggactcgctcgccgccccgagggccccggccggagcattcccaccgccgctctccatgtgcccgcctgcgcgcccttcccctgggcgagtggccagcggctgcgatccgctaggaggcacaagttacagcagccgcgcaggcggtcccggcacctgctcctgaagcgcgggacgctacgggaatcgagggaacggagcgcaccggggaccccgcggcgggccgaagacggcagtacccctaggctgcagcctgacgctcaggccccaaggcccccagcgccctttgaaggccggagagaaagaggcgggggctggggacgtcagggcgagcgaggggcggggagggggccggggagggcggcggggcaggagcggggagggtgccccctgctgccccctccaggcagcgcccgcccgcagccgggagacgccgaacacgggaacaggaattggggttgtttttttttttgttttgttttttgttttttgttttggccatccctctagcctgaccaccattaggagctccaatttcttttttctcaaaacaacttgaagcattcgagcagggtaaaaactctttcaaagcatcggttggatggaaatgttctattcccaactcaatacagacgtattaatagttttcacccggcattgggatgaacggatgcttcatccctggttgccaagcgcacggccccccgtgagccctgtgccggaggcgagctcgtcctggctttcgccgtgaccttgacaaggcacagggaggcaccagcaacaaattttgtctggaagatagactccaagtacgctgcctgcctgacctttgaaaatgccgtgaactcaaaggggccctcactcggatcttaggcacttcacgaatttggacacaaatattaaaagaaaatagtgttaccactgagggtaataccattattcttattttttatcttttttgagacaaagtctgtcgctatcgcccaggctggagtgcagtggcgcgatctctgctctaggctcactacaacctctgcttctcggggctcaagcgatcctcccacctcagccttcagagtagctgggattacaggcacgcacctcaccatgtccggctaatttttttttttttttttttttttttgtatttttagtagagacggggtttcactatgttggccaggctgctgtcgaattcccgagttcaagcgacccgcccgcctcagcctctccaagtgctaggattacaggcgtgagccaccgcacctgggtcattgttttctaaaagatagaatgcaccggacgctgtcacagacttggaggtttttcttttttcaattgcaatattatttttaaactttatttttaattgacaaataattgtatatatttatggaatacaatctgttgtttttcatttaagttcaggggtatatgtgcaggtttgttacacaggtaaacttgtgtcattggggtgtgttgtatagattatttcatcacccaggcattaaggctagtacccattagttatttttcctgatcctctccttcctcccacccttcaccctctgataggccacagtgtgtgttgttcccctccatgtgtccatgtgttctcatcatttagctcccacttatgagtaagaacatggggcatttggttttctgtttctgcatttgtttgctaagaataatggcctccagctccatccatgttcctgcaaaggacatgatctcattcttttttatggctgcatagtattccatggtgtgtatgtaccacattttctttattcaatctaccattgatgagcatttagattgatttcatgtcttggctattgtgaatagtgctgcaatgaacatacacatgtatgtgtcaacagagtgaacaaacaacctacagaatgggagaaaatttttgcaaactatgcatctgacaaaggtctaatatccagcatctataaataacttaaatttacaagaaaacaacaaacagccccattaaaaagtgggcaaaggacatgaacagacactcttcaaaagaagacatacatgtgg

SEQ ID NO: 1563859 - DNA, 4001 bp, Homo sapiens
cacctaaattaaacattccaattttaccataccaaccttaatgcacataggtgcttatttcacattttaaaccttcacacatatttttctatatttccaatttcaaatgaaggaagatatccttaagctaatcttaatatcagaagagtgcattaaatgattctacaatagtttccaaacagaacttattaagaatctcccccgcaaaagtacctcctccccttccccaattttgtttccattaaaaaaaaaaaaaaaaaaaccccttaagttccttcaaataaaatccaagatacactgaaaacccaatcataccgcccctccccacctctcatgagtacaacagaacatcgaaacaaactattatttaagctctcaaccaaataaaaatgcaaactgaaacaacctctccttttcagtgttttattatacaaggtcgcctctgccacggagggtcgttctggtgggtagtttccaggttcttccctagcagatgcagcttgagtgtttcaagcaaaaaggataaaaacaaaagcacacatttcaaaggtagttataacgttatcctgtgacagttaatgaattctgcctttaaaatagcataatgaaaaatacaaactggaaatgatttaagctatctcctcctcctaagaatgatgcaactgaaggcccagtcagaaaatactacctcgccccctcaaccccagtgaaaaagcgtgttttaagaagatttctcttgatttctttccttttcttggcccatcgtatataaaatactcccatcttcactatgtgataattcatcgaattatagttttgtgtggttttttaaatgcatattagactgcaataaaaaatgttttaaaaatagcctgccttattaactaaaaataaaaaagttgttgtcaggaaaaacagcatgaaatcggtttccatgctgcttacacccccgcactacctgcaaccactttacagaacgttagcatcagacctgcttatctaaaatcctgccaaatgtcctcacagtctcctccgctgcctcgctggcttctgggcagccagggaccagccctccatggctcccagcatcggcagcctcgagggctgagagccttgtttgccccgctgcctcgattgagggccgcggcccggccacctgagcagcgttcccaagacagggagcgcatccgggcgggaggagcacccggtccggggcagacgcctggccgcccgggcgaatctgcctctgccaatgggtgacacgccgattttgccccctggaaacgccaagaggcgcgaagctgggccaccttcgccgcgggctgcagcggcgctcgcgcgcgtttcccagaacgcagagagagcgcgcgcggaggccggggcaaccccagaaccccgctcggtttatcctaacgacccccatgccggctgctcctcgaggacggggactggacccgcagcaccccctcaggcacctccatcccaaacacacctgccgcccaccctaagccaccccccatgtgtacccactcacccaggtcgccccaagaaagaaccccgccactcgcacagagaggggtgcggcccttggatgcacgtccggacgatcctgggccagggaaagggcgtttatctcagctctgcgccgtgccccttccccccacgctcgaggacctttgccctgggccgccgggcccgcccccccacaggaacccgaagccctcgggcgcccgccacactctggggataataccttgaggccggtagttgggctgagaggtccgcaccgcgcccggttctgcgatcttccctgggagagaggttccccgcgcagtcccctcaggccgggatcccgtcccggagccgccgccgccgcgctccatcgggatgcgccggccgcacaggcgcactgccaagcccgccgcgccgcaccgaacccgcgcgcgtccgcatgcgcacgcgtcctcacgcagcacgcgcgcagggcgtgcacgtgcgataagcgcaccggttaccacgcacagcgcacgcaaggcgtgcacgtgcgataggcgcaccgcttccacgcacagcgcacgcagggcgtgcacgtgcgataggcgcaccggttctcacgcggcgcgcgcttgtagcgtgtgcatgcaatgtgcacaacagtcctcacacagcgcgtacgggcgtgcacgcgtccttacacgctgctgtacacagtgcacacacagaaggcgtgcgtacgcacacagttcttcatacgatgcttacatgcaacatgcacacacaacgtgcacacccagcgtaaatgcatcttctcacagtagcagatacacactcaaagcgtgtgtagatgtagggtgcagtttctcagacaccgtgcacacacatcctcactcaatgtgtgaacacagagcacataacgcgcacacacgtgctcactcagcacgcacacgcttacactcactgggtgtctgcatgcaaactcagcaatgcagccttgggaacaatttctggctaggcccccaggtgggtgccagttgggccagtgacatctgtgcagacgccagaggacccgccctccatgcatagttaggttccagttttcgaggcgcacgggtaatcagtgtttagtgacgccccaccctcagcgtgcggtcacccagagagggacagcagcaagctattggggtcgatcttcaactaagaggcagcggcacgcgccgtaggccgacctaggcctttcaacgacaccctactccgcagccaatttggttcctcttctcctgaggcgtaaataatgctgactgaaacctccgcgatgccgggtgtggtggctcccgcctgtaatcccaacacttcgggaggctgacgcgggcggattgattgagctaaggagttcgagacccccgtctctacaaaaaaattttaaaaattagctgggcatggcgactcatctgtggtcccagctacttgggaggctgaggcgggaagatcgcttgagcccgggaggtcgagactgcagtgatcacgccactgcactccagcctgggcgacagagaccttgtctcaaaagcaaaataaaacaaaaaacctctgaggaggatctctccgagaagacacacaagaaactgctaaacgggttgcctcctaagtaggcacttttaccactgccatgcacatttattatcttttcaaaaacattgaaaaagacatcttggcagggccggctcaagccttttgtttacccaggcctgccaagtgataacccgttcccatggagccccaggctgcatgttttttctcgttggaaggtgaccagcctgaaagttttattaccactcctggggggagatatacacgattaaaaatgaagctgaataatgggtacaggttttcttttttggatgaaaatattctaggattatgatgagtgcacaactaagtatactaaaaactattgaattgtacattttaagcgggtgaattttatggtcccttaattatgtctcatttttttttttttaatgtgaagctgaaactctcaggaatgggcacctgtactcttggccaaagctgggaaagtccctttgtggcacaaaaaatgtttgtgatgaacgtgttcctgacacgcccaaaggtgtgccgggagtagggttcaagtgtggtgagaaagccaggaagtttaaacataaatgagtaggaaagtgagcaggtgggggctggtaccctgagctgtaatgaaaactcgaacacattgagattaagccaaattaagagcgtgggagctgtcactttctcctcccttatcttagggacctttggtgagttcaattcatccaactcttgagctcatggacatgtgtgtgtagcatccctctctacttttattctatttttggggtccttttactttccattcctctccctaattataaacacctcctctgatatctttgcagctgcaattttgaaatactgttttgaagatacgcatgtattttaattgt

SEQ ID NO: 1563860 - DNA, 4001 bp, Homo sapiens
accagcggtatttcctttccgtcttttacacagctcccaggaaaaccacttgccaactcatatcccctaagtgtgcaacacaaaattgttggacagcctaaacatctcaggtctttctgtattttgcagccttgacagcacccagcccaagcttaggaacaatggttgactctctagaaaagcaggttaagtctcattaggaatgggtcccaaatgctaagggcctgggtaaccaagaatgatcagtatccaggacagataattataaaacctcaaaatcataatttttctaaggagactttacttaagtacctggccttgctaactcccccaaacaacaaatggtggtatcacctggcacctaaattaaacattccaattttaccataccaaccttaatgcacataggtgcttatttcacattttaaaccttcacacatatttttctatatttccaatttcaaatgaaggaagatatccttaagctaatcttaatatcagaagagtgcattaaatgattctacaatagtttccaaacagaacttattaagaatctcccccgcaaaagtacctcctccccttccccaattttgtttccattaaaaaaaaaaaaaaaaaaaccccttaagttccttcaaataaaatccaagatacactgaaaacccaatcataccgcccctccccacctctcatgagtacaacagaacatcgaaacaaactattatttaagctctcaaccaaataaaaatgcaaactgaaacaacctctccttttcagtgttttattatacaaggtcgcctctgccacggagggtcgttctggtgggtagtttccaggttcttccctagcagatgcagcttgagtgtttcaagcaaaaaggataaaaacaaaagcacacatttcaaaggtagttataacgttatcctgtgacagttaatgaattctgcctttaaaatagcataatgaaaaatacaaactggaaatgatttaagctatctcctcctcctaagaatgatgcaactgaaggcccagtcagaaaatactacctcgccccctcaaccccagtgaaaaagcgtgttttaagaagatttctcttgatttctttccttttcttggcccatcgtatataaaatactcccatcttcactatgtgataattcatcgaattatagttttgtgtggttttttaaatgcatattagactgcaataaaaaatgttttaaaaatagcctgccttattaactaaaaataaaaaagttgttgtcaggaaaaacagcatgaaatcggtttccatgctgcttacacccccgcactacctgcaaccactttacagaacgttagcatcagacctgcttatctaaaatcctgccaaatgtcctcacagtctcctccgctgcctcgctggcttctgggcagccagggaccagccctccatggctcccagcatcggcagcctcgagggctgagagccttgtttgccccgctgcctcgattgagggccgcggcccggccacctgagcagcgttcccaagacagggagcgcatccgggcgggaggagcacccggtccggggcagacgcctggccgcccgggcgaatctgcctctgccaatgggtgacacgccgattttgccccctggaaacgccaagaggcgcgaagctgggccaccttcgccgcgggctgcagcggcgctcgcgcgcgtttcccagaacgcagagagagcgcgcgcggaggccggggcaaccccagaaccccgctcggtttatcctaacgacccccatgccggctgctcctcgaggacggggactggacccgcagcaccccctcaggcacctccatcccaaacacacctgccgcccaccctaagccaccccccatgtgtacccactcacccaggtcgccccaagaaagaaccccgccactcgcacagagaggggtgcggcccttggatgcacgtccggacgatcctgggccagggaaagggcgtttatctcagctctgcgccgtgccccttccccccacgctcgaggacctttgccctgggccgccgggcccgcccccccacaggaacccgaagccctcgggcgcccgccacactctggggataataccttgaggccggtagttgggctgagaggtccgcaccgcgcccggttctgcgatcttccctgggagagaggttccccgcgcagtcccctcaggccgggatcccgtcccggagccgccgccgccgcgctccatcgggatgcgccggccgcacaggcgcactgccaagcccgccgcgccgcaccgaacccgcgcgcgtccgcatgcgcacgcgtcctcacgcagcacgcgcgcagggcgtgcacgtgcgataagcgcaccggttaccacgcacagcgcacgcaaggcgtgcacgtgcgataggcgcaccgcttccacgcacagcgcacgcagggcgtgcacgtgcgataggcgcaccggttctcacgcggcgcgcgcttgtagcgtgtgcatgcaatgtgcacaacagtcctcacacagcgcgtacgggcgtgcacgcgtccttacacgctgctgtacacagtgcacacacagaaggcgtgcgtacgcacacagttcttcatacgatgcttacatgcaacatgcacacacaacgtgcacacccagcgtaaatgcatcttctcacagtagcagatacacactcaaagcgtgtgtagatgtagggtgcagtttctcagacaccgtgcacacacatcctcactcaatgtgtgaacacagagcacataacgcgcacacacgtgctcactcagcacgcacacgcttacactcactgggtgtctgcatgcaaactcagcaatgcagccttgggaacaatttctggctaggcccccaggtgggtgccagttgggccagtgacatctgtgcagacgccagaggacccgccctccatgcatagttaggttccagttttcgaggcgcacgggtaatcagtgtttagtgacgccccaccctcagcgtgcggtcacccagagagggacagcagcaagctattggggtcgatcttcaactaagaggcagcggcacgcgccgtaggccgacctaggcctttcaacgacaccctactccgcagccaatttggttcctcttctcctgaggcgtaaataatgctgactgaaacctccgcgatgccgggtgtggtggctcccgcctgtaatcccaacacttcgggaggctgacgcgggcggattgattgagctaaggagttcgagacccccgtctctacaaaaaaattttaaaaattagctgggcatggcgactcatctgtggtcccagctacttgggaggctgaggcgggaagatcgcttgagcccgggaggtcgagactgcagtgatcacgccactgcactccagcctgggcgacagagaccttgtctcaaaagcaaaataaaacaaaaaacctctgaggaggatctctccgagaagacacacaagaaactgctaaacgggttgcctcctaagtaggcacttttaccactgccatgcacatttattatcttttcaaaaacattgaaaaagacatcttggcagggccggctcaagccttttgtttacccaggcctgccaagtgataacccgttcccatggagccccaggctgcatgttttttctcgttggaaggtgaccagcctgaaagttttattaccactcctggggggagatatacacgattaaaaatgaagctgaataatgggtacaggttttcttttttggatgaaaatattctaggattatgatgagtgcacaactaagtatactaaaaactattgaattgtacattttaagcgggtgaattttatggtcccttaattatgtctcatttttttttttttaatgtgaagctgaaactctcaggaatgggcacctgtactcttggccaaagctgggaaagtccctttgtggcacaaaaaatgtttgtgatgaacgtgttcctgacacgcccaaaggtgtgccgggag

SEQ ID NO: 1563861 - DNA, 4001 bp, Homo sapiens
ctactagtcttttcagtgtttagagcctctaaaggcctcagtccagccagggtgtaggaggaagaggggagataagacatccaggaataaccacatacaggtggcatgagtaggatttaggcgagtaactgaaacggcttccaagggctaagggatgagaaatcagtcctgtttggagtgatcagagaagtctttgtggaagaattagcacttattctgggcctgagatggggactgtgggaaccacctccaaaagcgagtaaccacgtcttaattccagcccatggtcgctgagtgggcagatgggcccatctgtggccagatattcccacttttcaaaataaactcgaaatctggatcttaatgtaaaatctatttttaaatgatgacattaaaagtaaaaacaaaaacaaaaacaaacaaacaacaaaaacaaacaaacaaaaaaaacggctgggtgcggtggctcacacctgtaatcccagcactttggaaggccaatgcgagcagatcacctgaggtcaggattcccagaccagcctggccaacatggtgaagctccatctctactaaaaaatacaaaaattagctgggcgtggtggcacgcgcctgtaatcctaggtactaggaggcggaggcaggaggatcacttgaacctgggaggccgaggttgtggtgagctgagatcgtgctattgcactccagcctgggcaacaagagcaaaactctgtctcaaaaacaaacaaacaaaaaaaagcaaataaaaaaagaaaaaacatggtgcagggcagtgttcaaatttccaaattgcctcatttaaaaaatctttgaataaaaattcaaacaaggtccatacattgcattatttgatatgccttttaatctgtagatataacttctttctctctaacatcattggtagattactgtgagatttagtattcatttagtaggtaaattattcaattaatcttttattaaccacctactctgtgactagcagtgtggggacaaatacatatggaaggaagccctgccctctagggtccccaatctcattgactctaaactaatgacttacatcagggtccctttagatgtttccttggggctacagaagctcaccaaggagctcccacgagactgtacatttctgagaaaaaaatattggaactgaaagctatcagcttggggacagtggagtttattctggagccaaaacagactcagagctgggaaagaacccaggcggctcctctcctctcctctcctccccgtatttggaaagcatgtgttccccagcgagcagagaagaactggaatcctgctcgctttttcttccttctaggctattttttccccttaaaccttacacccttgggaaaaacattcagaaaccacagtcataacaggtctagaaattgccacatttgtttctattaaaagatgaagttttttaaaaaattgaacttacatataataaacatttagtgagcttaccaatctagcgaatttgcatgcaaactgccaccaccacagtcctgtactatgagttttaagcttaccagccatgcgatggctttttctctccattcttaacgacctgttagattccttgtcatatacacagttgagacaaggctctggttttgtgttctttctcctctcgtcgctcactcttgtcctgcatctgttgtagcttgactgtgatgcccgggaagagtgatgtttccttctggactcatctcttgccaaatctactcacattttccttccttttcccacatctgcgctttcttccctcctaagttacagacttacctcgggggctggtcatgtctcacttggttgatggcagccttctcagctctggaattcccactgcagcactgctcccccaccaacaactgacacttcagtacccctccttcctgtggcacagaggaccagggtgaccctgctgtctaatttcaacaggctgctctgtaccatttccttttaggtcttccctggggtggaggcgctgattttcatagcctgagctcaccagggagggggcagtgaacttctgaggagaggaaaaagaggctcccactgccatttccctccaaagtgggaatgtagacgaacctcagagaggaagggtgtggcagtgggggcaatttgcttggagtagtacataagccgaggaaactgcctggttgatagtaagagccatcatttgccggttgcctactcagtgggaggcccagtgcaaaagggtcgacatggattatttcgtgtaatcttcaccacaactttatgagctagcttctattcccatcctcattttacagatgaggaagcaggcccagggaggttaactaacctgcccagatgggaagtcgcagagttgagattcaagcccacatgtatctgactccagagctcgtccgccttccactgggcctcccaatttctttttcctttattttctgagatggagtctcgctctgtcacccaggctggagtgcagtggtgcaatcgtggctcactgcaacctgcatctcccgacttcaagcgattgtcttgcctcagcctcctcagtagctgggactacatgcgtgccccaccacacccaattttttttttttttttttggtatttttcatagagacggggtttcaccatgttgcccaggctggtcaaactccttacctcaaatgatccacccgccttgccctcccaagttgctgggattacaggtgtgagtcactgtgcctggttcctcccaatttccagttgacaagcccttggacactattaattcctcacccttgtcttccacttcttccttgatccaatcctcacactctggctacagagccttttgaaagttacactttctaattggtaaggtctcccacaactacatctcctaacatgagtgttggtacagctgtctgttaagcctctaatgaaatcgactcaaactattgaagaagaaagcattgaaaatgggtgtttagttgatggttacaataaaagcccagacacttcaccactacaaaactgcacttgtaccccttaaagttatacagattaaaaaaaatgggtgtttaatgtatatcttgcaagggagatagatatgactccttttaagcaggcttccttctagaaaggctcagaagagtcaataaatgctgagtacatgggactgatttcaaaatacatgtataaaggaagatgtgccacatttatcatgctgtgtatcctgtaaagaatatttatggaatgaataaaagagagtactagaagccccctgggtactgaaggaggaagaaatgaaaatgctttggatggccaccccagtgttgaaaagatctagacttaaaattattaaagggcaagaaaatgtcctcatttttttttcttgacttcaaataaagtacagcaaacatgggctgtgcctcctcattccaaatacaggcctgcaatataagggaagcttcagaggatgccaaaaagcagaaagtatcaagggatgccctttaaagacactttggaatttctaatagagctaaaaattggtaaaatccagataggaaaaaatgagaagaaaataggagttaacatagatttctgggccccattcccagagtttctgattctataagtgttattatttatatgacatccattcctgagtatactgaacaatgtcttgtgtgatgacaattactgctgagtatttaataccattacactttgataatggaaaatattagagattctaatacagatctagtattgtgtacattgtggaatatatatatgtatatatatgtatatgtatacgtatatgtgtgtgtatatatacatatattttttttaactcagagcaggcagatgctttgccctgggttacattgaaagccaaggtagcaccatgacattaccagcgagcatgacaaggcagggaagcacatcacaatacagacaggtggaggtggtggtgtacg

SEQ ID NO: 1563862 - DNA, 4001 bp, Homo sapiens
catgcatacataaatgtataaaataaatgtattttgactgtgctatgcatttatatgttatgtattcaagacagttttaactcttgctgccagactgccagcagaagatgaaaacaacattttagcaaaaacatctgtctccttgaccccttcaggaaaacgctgagatctaaagggcagttctggtcaagttggtgctctgtgaaaaaagtctaacatgcgatatttacaattcctaacatgaagtgggcagcaaggttttaaaccagggtcctaggttaagacttttacatggctcttaagtttttggtttgaaatgctgtgaattccagtatctgtcccatatataattttaaaacactttccaacatctgatatacaaatgcttttaggggtttatccggttcacagcttcttcaccatattggagtaatgctggttaatctaaatcactgaaataaaccagtgcctgagagccacaggtaccaataagcaacacaatttattggagactgtctttctaggtgaaccataagtatagacacggaaggaagattcttttctccctaatgaatggtgaaagtgtatgtagtatatgcttctgacacagtctttggagagctgattcaaagtcttctcaagtaacatatagcttcccaatcgtaaacaatctaactttttaattgcaaatgcaaaaaaacccctaagaaattcaattaaaattaataaaatcgttttattcgcgctcatagcagagggaactagtctaacaggctaaaagcaacctcctgaaaggaagaaatcctatctcaggtagtggagcagtctcctggaccaagcaatgtgctgtcaaattgtataagattaacggttttcgaggagggaaaaacgttttggcgatgggactagttgaggaaaaagcactctgaagtgctgattcccgttcagttcagcctagagactgcaagatgtcccacagaagatgacatcttgttgaagtcatgtgctacagcaggcaaatcaggagatgcaaagagccaagtttcatcccaacttttaaagcaacttttaagcatccccaccctcacccagcttcctccctggaccttgaccgggagggtgcaggaggtaagcctttgggagaggcaaggactgcgacagtaaaagcgcctaaactcgcccacgacccgggctgggggataactcaaactttccgtgcctggaaaggctgcctggcggcggaggcggcgccggcgcgcggagtccctgcgggcgcccgcacatcccaggcagctgtgcgttcgttggggcggttgcgcgggcggccaccgccccccaagggcagatggggcacggggcggtccgcggggtccggcttccagccgcccccgccccgcccgtcgaagcagagcccgtgagttgcctcgcgccgcgtccgcggggctcagaccgttggcagcggcagttcgaccgttggcggcgggactcaggcggctcgcggcgtcggctgacaatttcaaccccccgcccccgcccctgtcccatcccagggcactccggcgggggtgaggggaggaccagatagcacgaggcgactccagggaaaagttttgtggcgcccgctgcgccgctccgacggcccggggactgcgggaaccctgcctcccacgcgggcccgaaccacccccgggagccacccgcccgctcacccatccgtgcccgcagctctctcaaggatgggctgccgccagcgccagctgcggcgccgtccgccatcatcggagtcgggaccggaggcggtggtggctctccgcatacattgcgcaggcgtcggcgcggcctccgcttgggtcgtggccgggctgccggtgggcggggcggggcggggcggggcggggcggggcccgaagggccaccgcgcccgcctcggacctgcgaaccgggcaggattgccccttgcgtcccacgtcctgaccggctgggcagcgactacctggtctaaagaaaccctctcctatgttccgtgctctgcccctactgcattgtgaggactagccaatcagcacccagcttggcccccccaacattcctttcttcacctttacctagcaacacagtaacattccttcctcattcattcattcatttaaagaacatttacggcgtgcctcctgggtgcgcttgtatcatgagtttactagtccttgaaacattacacaaagaaagacccaagttgggggaagaagcctagggagaggttgggagtcgcaggcttgctttgaggtgctaggggccccatcatgagtaggcttccctaaactgttgcacaataaatcatgacacataggtctcaaagttgggtgaaatatctttaagatgtttgtgagtcttcaaagagaggcagaggacttattggcatcaatctctccggattttgggagagactctaccaggttgcagaatgtttttcccattcacaaggaaaaccgtcattggcctgaggctcctttaaggggcagacctcacttcatgggggcttgcccttatgaggtggagtcaccactgttgtgagtgtgtgtgtagtgacatagttgtaggcacgcagtttatggttggggccattaagtgtggtgcaggagatcccaaaatggggctggaccacttgtgagatgggcactttggcgagaccactgagtctccaaatgacatgggagctgtaaaatggaagaagctaataatagcatatattacatatgttagcaatgatagcataagttacatatattaatatataatatatataatatgtaatatggggcaggcacggtggctcatgcctgtaatcctagcattttgggaggctgaggtgggtggatcatttgaggtcaggagttcgagactagcctggccaacatggtgaaactccgactctactaaaaatacaaaaattagccgggcatggtggtgggtgcctgtaatcccagctacttgggaggctgaggcaggagaatcgcttgaacccgggaggtggagtttgcagtgagccatgatagcaccactgcactccagcctgggtgacagagcgagactctgtctcaaaaaaaaaaaaaaaaaaaaaaagaaaagaaaagaaaaagaaaaaaaagacattacgttgcacctacaattttaacaaaaattaaaacgtggtcaataagtgtttgcgatgatgtagattaatacaagtggggggccaggcacggtggttcacacctgtaatcccagccccagcactttgggaggcccaggcaggtggataacctgaagtcaggagttcaagatcagcctggccagcatggggaaaccccgtctctagtaaaaatacaaaaattagctgggcgtcgtggcgggcccctgtaatcccagctgctcgggaggctgaggcaggagaatcgcttgaacccgggaggtggaggttgcagtgagccgagagctgccactgcactccagcctgggcaacagagcgagactctgtctcgaagaaaaaaaaaactagtggcaaaaataaacagtttggcattataactcccgaagctctgcttctaagtaaatacagagaccaatgctttgcatgatatccaggatggtagccattcatgattattaatacgacacacatatgattagggtgcccacaaaacacacacacatacacaaacacaagttcagctttcatgaccttatctggaactccgcaaacagaaaatttagcaaaacacatcagctttgtagtttcttgcaaaaatgttgaacccaaatctaataatgaagaaacattcagacagagatagagactgtgatatagtccacaaaataactggccccaatgcttcaaaatattagtgtcatgaaagactaacaacaaaaatcagagaagtgttccagatcacaggaggctaaagagaccacatgcaatgtatgatccttgattacaaccctaatttttaaaagaagcttgaaag

SEQ ID NO: 1563863 - DNA, 4001 bp, Homo sapiens
tccagactttcactacccaatatggattctcagttcaaatcacttttcctctgtaaagattttcctggaaccgtctccccattcctgtccccatttatctctccctcctttgtgcttccaactgcaccttgtactcagttttatcgtagctcttatcgctgtgtacatcgataaattgtttgcatgcttgtctcctctattagactttgagcctgtataacggcagaactacatcttcctccactttcaatctccagggatgtgtgtgtgcctgatgaatagccgccctgccatacacgtttgttgaagtttgtgagaataattttatagggcataacactaagtctaccttagaaacctaagtgcttctcttgctattttctttcataagttctttcttctccctccaagaagagaacaatagtcaacacatgactgaggctgcccctggttgtctgttccaaatgaaccgttattctattcaggtccagaaaatagctagttcctaacttttttttttcctatgaatatagaccctgaggaatatgtgaccattacggctgaaacatcctggtaatttagtataacttaaccagaagtgacatgaatccatgagacccagagacagaaactctggtctgattccaaggggtctctggccacaaaggccctcaggatatagggccccaccggacgaataaaggagccagcagcagatccatatctaatcagcacctgggcctgcccaggagggccctgcatttccagggtcagtttagaaaaaaactgcgttctccaactgccccaccccccatcctgaatttctctgaacaagccgcaagtcaaattccctgaagctactaagacaaaggtggctttaggaaaatcacagcaggtggggccttcttgtggctctctaatgcatatgccttcttacaagaaaaatgtttgcggctttccttcatgacccacgcttagctttgtttacgttaaacatttattttcaaatgatcatgagcttgatctttttcttagaaattttttgaacagcaaataacactaaaaatcccagaagttgttcacagtgaaagcaagcctgcctcactaataacccaaatctacttcctgccctattccaccccacttacacactttttacctcggttctcatcgaataccgtacatcactgtagaaaaatattaactgaatgactggtcaattataagctcttcaaaaatgcatcatctatttacaaaccagccaaccagaataaaattaaaacccaaacacaacgaagcacattggtaccaagttatcaaaagtcagaaggcattcctcatgcaaagtattactagacgctgtctttagagcagctgatagctgccaacataaaatgtcatcaagaatggaaaaaaagggagagaaaaagtaatggtactgaatttgttactctaagaaataaaacacacagaaaatcatataacttcaaaaagctccttctacatggacttcattaagaaagaacataaggaggtgtttctctctgacccattagtcaaatctcctgctcctaggcttctttacctcctttttctggacaccccatccactcacttgccacaacgatttagaagccaggacaaagagggtaccagctgcttgccccctttattccccagctagggcttctgcttaggatcctctctagagatgccaggtttatcaaataaatatgcaggactcccaggtaaatttgaatttcagataaacagtgaaaaaaaattttttagtataagtatgccccatacaatatgttatctggcagccctctcccgctctgttcttctgccttgataagttgagctcaataaaggcaaatccttgaaaacccattttacctctttaccttaagattcttagaagccctctccatggaatcagcccaggctctcccaggccttcatttgcccagagtaaagtagaagacactctcagccccagcttacctgatcagctgcaaggaaatttaaggaagttgactgttggagacagcaatttttgatccatagctcctcccaccaaaagcttcacacggctcgctaccctggcagccactccaccttcccacccaccggtggcgcaacagtatatttaaataccctcgatgtctgctggagctccccctttaggctaggatgaagagggggatggtgtgtgaccaatacctgcctaaacccgtaactccgaatttacagaacagatttttgagtatatgaggtgttacataaagatgaggcttttaagttttttaaggtttttatttatgtgtgcagaggtgaggggtggttaatcttttctttttttccttcagccctgtctttggaatactcaaattcgagtaaaagtcaatcattaaagtgcagggaaataactacttagcacatgtttctatatgcacacataagcgctataaaggtacagattcacagcatgcagatgaatagccattatttgcatagatatctttttcagtcaatccctgattactcacattaaaagagagcacaaagtagagaggtatggctaattctaatgaaccaaataatatattcgagaaaaatggcaatccacaatagcctcacattacaattgtgaacatttaagcaattgctagacacagtcctaaatttattttttcattaagaatgcagactctttcattggaatgatcaaagattaagaattagtaaggtcagaaatagtaaaattgtactgctctggggaagtttatatgtttatgggcatatcatagaaagatcaaatagtaaagctggaaaggctcttagagatcatttagtccagcatttgccagagtgtgtaccacagacaactaatcccaagagaggaacctcaaaagctgggttcactggtcaatcgggtataagaaatgtcactttatattcctctcttgtaggctgacaatacacaagagtatgataaaggctctcacatgtcctaaagtaaagaaacctggttacctttgttaacccagcatttcccaacattgtttaactcacaaaccatccccccttttttcatcatattcccgttaacatctctctttagtacacccttaggaaaatactgatctaatccaacttcctcattctataggtaaagaaactaaagcttcaaccaagttgtatggtgttttacaggtcaagttttccttagtattttcattttgatttctcttaaatagaaaaatagagtgaactccccaaaaatggctcttctgttgaaatgccatttttgcccatccctgatctcccaaaagctaacaagatggatattttcctatgattgcaaagtaacatcccacaatcaccttcccaacaccccttttcaaagctgtaagtttcgtcagatctttccaaatggttgccgtggctttcttctttcatttgaaggctttagtcaaggaacttctgaaataagaacgtcaagccttctctgcctaactggctttcctacattgtgacttctgccccttgaaaccatgctaattattttaggctttccatgacttaagggtctcaagtgagttttcgctgtactgaaacctgggaagtcagaaggtattgggcaatctcctcaattccaaatggttttagttttgcactaaccttaaaccttggggtttccacttggtaaaattaaatttcctgtctctaagtaaaatgaaaagtttcaaagaagaatttaatttgcaaaaatatcttacaaatgtatatgaagagtataaggtgagaaaggcactgattattgttcagatttaaacaatttatctttgcagggctcagtgtgctgctcagaataaattaaataattatgtctttataaccagccacatatctctccactcaaactttatataaagggtagatatggctattgatttacctctgcattttgaaattagcggtacaaagatgaaaat

SEQ ID NO: 1563864 - DNA, 4001 bp, Homo sapiens
ttcaaatcacttttcctctgtaaagattttcctggaaccgtctccccattcctgtccccatttatctctccctcctttgtgcttccaactgcaccttgtactcagttttatcgtagctcttatcgctgtgtacatcgataaattgtttgcatgcttgtctcctctattagactttgagcctgtataacggcagaactacatcttcctccactttcaatctccagggatgtgtgtgtgcctgatgaatagccgccctgccatacacgtttgttgaagtttgtgagaataattttatagggcataacactaagtctaccttagaaacctaagtgcttctcttgctattttctttcataagttctttcttctccctccaagaagagaacaatagtcaacacatgactgaggctgcccctggttgtctgttccaaatgaaccgttattctattcaggtccagaaaatagctagttcctaacttttttttttcctatgaatatagaccctgaggaatatgtgaccattacggctgaaacatcctggtaatttagtataacttaaccagaagtgacatgaatccatgagacccagagacagaaactctggtctgattccaaggggtctctggccacaaaggccctcaggatatagggccccaccggacgaataaaggagccagcagcagatccatatctaatcagcacctgggcctgcccaggagggccctgcatttccagggtcagtttagaaaaaaactgcgttctccaactgccccaccccccatcctgaatttctctgaacaagccgcaagtcaaattccctgaagctactaagacaaaggtggctttaggaaaatcacagcaggtggggccttcttgtggctctctaatgcatatgccttcttacaagaaaaatgtttgcggctttccttcatgacccacgcttagctttgtttacgttaaacatttattttcaaatgatcatgagcttgatctttttcttagaaattttttgaacagcaaataacactaaaaatcccagaagttgttcacagtgaaagcaagcctgcctcactaataacccaaatctacttcctgccctattccaccccacttacacactttttacctcggttctcatcgaataccgtacatcactgtagaaaaatattaactgaatgactggtcaattataagctcttcaaaaatgcatcatctatttacaaaccagccaaccagaataaaattaaaacccaaacacaacgaagcacattggtaccaagttatcaaaagtcagaaggcattcctcatgcaaagtattactagacgctgtctttagagcagctgatagctgccaacataaaatgtcatcaagaatggaaaaaaagggagagaaaaagtaatggtactgaatttgttactctaagaaataaaacacacagaaaatcatataacttcaaaaagctccttctacatggacttcattaagaaagaacataaggaggtgtttctctctgacccattagtcaaatctcctgctcctaggcttctttacctcctttttctggacaccccatccactcacttgccacaacgatttagaagccaggacaaagagggtaccagctgcttgccccctttattccccagctagggcttctgcttaggatcctctctagagatgccaggtttatcaaataaatatgcaggactcccaggtaaatttgaatttcagataaacagtgaaaaaaaattttttagtataagtatgccccatacaatatgttatctggcagccctctcccgctctgttcttctgccttgataagttgagctcaataaaggcaaatccttgaaaacccattttacctctttaccttaagattcttagaagccctctccatggaatcagcccaggctctcccaggccttcatttgcccagagtaaagtagaagacactctcagccccagcttacctgatcagctgcaaggaaatttaaggaagttgactgttggagacagcaatttttgatccatagctcctcccaccaaaagcttcacacggctcgctaccctggcagccactccaccttcccacccaccggtggcgcaacagtatatttaaataccctcgatgtctgctggagctccccctttaggctaggatgaagagggggatggtgtgtgaccaatacctgcctaaacccgtaactccgaatttacagaacagatttttgagtatatgaggtgttacataaagatgaggcttttaagttttttaaggtttttatttatgtgtgcagaggtgaggggtggttaatcttttctttttttccttcagccctgtctttggaatactcaaattcgagtaaaagtcaatcattaaagtgcagggaaataactacttagcacatgtttctatatgcacacataagcgctataaaggtacagattcacagcatgcagatgaatagccattatttgcatagatatctttttcagtcaatccctgattactcacattaaaagagagcacaaagtagagaggtatggctaattctaatgaaccaaataatatattcgagaaaaatggcaatccacaatagcctcacattacaattgtgaacatttaagcaattgctagacacagtcctaaatttattttttcattaagaatgcagactctttcattggaatgatcaaagattaagaattagtaaggtcagaaatagtaaaattgtactgctctggggaagtttatatgtttatgggcatatcatagaaagatcaaatagtaaagctggaaaggctcttagagatcatttagtccagcatttgccagagtgtgtaccacagacaactaatcccaagagaggaacctcaaaagctgggttcactggtcaatcgggtataagaaatgtcactttatattcctctcttgtaggctgacaatacacaagagtatgataaaggctctcacatgtcctaaagtaaagaaacctggttacctttgttaacccagcatttcccaacattgtttaactcacaaaccatccccccttttttcatcatattcccgttaacatctctctttagtacacccttaggaaaatactgatctaatccaacttcctcattctataggtaaagaaactaaagcttcaaccaagttgtatggtgttttacaggtcaagttttccttagtattttcattttgatttctcttaaatagaaaaatagagtgaactccccaaaaatggctcttctgttgaaatgccatttttgcccatccctgatctcccaaaagctaacaagatggatattttcctatgattgcaaagtaacatcccacaatcaccttcccaacaccccttttcaaagctgtaagtttcgtcagatctttccaaatggttgccgtggctttcttctttcatttgaaggctttagtcaaggaacttctgaaataagaacgtcaagccttctctgcctaactggctttcctacattgtgacttctgccccttgaaaccatgctaattattttaggctttccatgacttaagggtctcaagtgagttttcgctgtactgaaacctgggaagtcagaaggtattgggcaatctcctcaattccaaatggttttagttttgcactaaccttaaaccttggggtttccacttggtaaaattaaatttcctgtctctaagtaaaatgaaaagtttcaaagaagaatttaatttgcaaaaatatcttacaaatgtatatgaagagtataaggtgagaaaggcactgattattgttcagatttaaacaatttatctttgcagggctcagtgtgctgctcagaataaattaaataattatgtctttataaccagccacatatctctccactcaaactttatataaagggtagatatggctattgatttacctctgcattttgaaattagcggtacaaagatgaaaatcagttcctcttttgttaaacatgaatcttcttt

SEQ ID NO: 1563865 - DNA, 4001 bp, Homo sapiens
cactaaagcagggagtccgcttaataaaaaaagtaccaatcacttcaaaattaaatcttgcaagttttgttttaattgattctttcccatgaagtctacccacaaatacggagaggctgtggggatcccagctcaatttacaaacgatgtaagaacatctaggagaaaataactcctttaaaacatattactttaattagagccacaattaatttatctgttttatctatcatctagctagctagctagctagctagctatctaagagtgctcagaaaaacacacagtaggtctattaccctaattatgaaaccacaacaaagaatcacttaaatgtcaactttcattactcgtctgggtttaatttcgttttcttaccataaaagcttattgtgtgagtgttaaaaactaaagttccctttttaatagtctcctaaaatctactctcatgcccttcaaaccccagtagtaaaagcgagctgcccaaacgtgttgactcagggcaggaagagacaaggttctgcaaggaagctgtggcactgctcacgatatcgcgtgaaaatggggaaattcgttgttaaaaagcatttgctgattatatgccatgcaagaagttcctttaaattaaaaagaagaaagtagaaaaaaagaaagaaggaaggaaggggaggaggaagagaagaggaggaagagaaggaagaagaaaaaggaggaggaggaaaggaggaggaaaatgatcaaagctctaaaatcgcaacaaagttgcaggatgacttttcctcctatttgctattttgtaaaatgaagtttaaaaggcattatttcctcggcgtccgaggaaggcagcctctcttacaaatcccaattcatctccagccttaccttacgctgctagcgcaaacccagaggctaaggggccctgctctcagcggcagcagcaggggcagcggcagcgacagcggcacatgccatctgttagcggcagaagcaaaagcagcgctgcgcgaggtggccccggtgccgggagagcctttagcaggggtgcatactgaatgccgccattttaaagcgaggttcctgaaatcattagatataagcaaattaaagcccgccccacctccagaacttcagggctgggacttgcaacccggctccaagtcggccgctctggggtataaaatgtcaagtctacagacacgcgcacgctgactctcggacggaggcgacggttccccctctcccttcggcccccttgaccccttcgtgctttttgcaagactcctttcggttccaggggccagaatactttcttttctgggctcctcgaggccccttcccggggccggccggcgggctgtgggaggaggggacaaggccacgggccggccctacccgctcctcccaggctcttggttcagtccactcggagcacacctcggagcgccccagctccctcgcggaggccgggcgtggggctcccgcccgggctcgcagctaccatagcaaccccggtcccaaccccgcccggcctttgccaaaggcgtgccctcctcccgggccagtgccctccgccggacgccagacgtcccctcgcgcagccccgccgaccccaggcagcccgggctggggccgcgcctccgtgcgtcccgcgccggacagacgcggcacgcggagggaaacggcgccagcgaggggctttaggcgccaaaacggaaactcccgcgaaactccgcgggccagcggagcgcgggcgggcatccggagcgccggactcggaagcggcgcacgcggccgcccggccccgccccgcccggccaggtagcgcggcgccgccgccaacctcacctggctccgcgcgccgctgcgggacgggcgggaatgcggccaagggccgccccggctcccgcgcccaccccggactctctggcctccgcctctctctcactgctcccaaagagcgccaaaaagtcgcgctgcggctcacgctcggagtgcgggcactttcttcctgtagggcgctgtttcgtcgcgaaatatattctttgtgtggttcgctcactcgtgcctggttctccgagagcgcagcgcgggctttattctcagggggtgtggcgcctcgcccccaaacccagcagcccagcccccgctgcacagaccctttgtcatttcattaggaagggaaagggggacaaatcataacgctcagattttacaaaagcgaaaacaaacgaagcaggcacacatccccagaggcggggttggggtaggggtgcaaagtttctggctcttcaggaactgaagtgccagtgagaaaggcagtgtggttcacagcgggacgctcatagacacttcccagacaggtgaggcgaaatgggtcctttcaaaattgatcttagtcgatgaataagtccactcgctacaggctaaataaatacattcatactcaccagctgccttcttgggggttttatctttcataaatgccccaatcgtttatttccctctaagaatttcagacagggaaatgctgatcagtgcaatctgttccccttcttccacggagtttgcaggataagaggaaccctgaggtaaggttccagatactttggaaaatggacaaagcaaatgcaattttatatcttgattaaaaagtgtgcatctgcacagggaaattacaagtttcgatttaatgcaagtgtaataggagcaccagctgtcccttaattggagccccacaataataaatgcgtgcttttatttaattttacgaagacaattgtagttgataacgcacacatatgcaggatcgtcagtgacaagctcatagcaattcatggctgctttcctgtaatcagctacttcacccagagacagagttctacatgctctgcacaaagtgcaaaacattgcaggagatatttaagcagcagttaggttgaaaagtggagtgaattctcaggctaattatactttttaattctgatggactgatccaaatagaattctccagctaattttaggcaagaaatcaatctgtttgttaagtgcaagataatagagtaggatggtaatggctgggaggacaagactgggtacaaactgcccttcaaataattgagaaaacccccgatggttttggcaagtatcgtgaaagtcattgggacaatgcgcagggatggtgtccgatactttgttatactgggtagaaacatagcataagtcaagagagtaggagttgctagttatttgagaaaagggggaaaagactctaattcctaaccacctcttcccaccttccttcaaatttgccgaattgcctgaactgctgtaaaagtcaaatgtgtctgacatacaggaagtggctttggcagtcccaagatctaccacagcaaaaagtaggcagtgttggctatcacagtcagctagagagaagggcatgggtgagttacataactttatacccaatgctctaacaaatgaggaactgttatcacagtgagtcaacaaaggagtctttatattaaacatagcttgggtcaacaccagctctcttacctctgtccaccattgcgagccacatctgtgggacattcggggttttgctaataacacaaaaactggctcaatcttattgaactgctgaaataattgttttgtcttaaatttaaggcataaataggtcaatttgctattttttgggatactatagcttcaacattgtctcctgcttttaatttctggccagtgaaaattgcaaatgagactttattattctctctttcccacactggaggggaaagaaaccttataaacaaagtttagcctggtaaactgccttccttttatccagggtggcatgacctccacaaatgaagctaggcaaatttccatgccaccaggccactggggaatgttgtcaaaggcactaagaaattgctattccctcccctcagcattttaaaaaggcccatttgctctctggggtggacttaccttggaat

SEQ ID NO: 1563866 - DNA, 4001 bp, Homo sapiens
agatacctcatttttcccccaactaactcagtatgcttttccacttcaaggcactgcccaatcctgtagctgcagatttaaataatacacaaaataattgtagatgaaacttaaatgaaaccaaaatgaagaaaacaaaataagttctttagtcataatgtctaccacaaataaaagcaattcagagattttcaatggtaggaattacctttatctttacaataacaagtttctattcttaaaatggaatggtctgcaaaaaaaaacaaaaaacaaaaaactagtaatcacgaaataagtaaaagtaaccctttaagtactacaggttaagcatctttaatccaaaaacctgaagtataaaatgctccaaaagcctcaactttttaagtgtcaacatgatgtcacatgggtggctgagataatgacgcttttgttttctgatagctgaatgtacacaactttgtttcatgcacaaaattatttaaaatattgtataacattaccttcaggctatgtgtaaaaagtgtatataaaatgtaaatgaatttcatggttagactggagtcccatccccaagatatctctttatggatatgcaaatattctaaaatccaaaaaatcgaaaacactttcagtctcaagcatttcagataagagatacttaacctgtatatcgcttaagaaaatgtttcctgaggaaaccatcacacgaagggatacatctctgttagccaatgcagccataaataaaaatgttaatgaggtaaaattggtcatgatgaaggtaaaacaatatcaagaaactgaaaaagttcttgttaagcttaattcattttgacatattttgaaaaaagtctcagatgcattgtagcaaatcttaattaaaccagaaatccattataatttattgcttctatgttttaatttatactttttatccttaatttaaggataactatgaataacacatgaaaatcagtgcattttctttttctgcaatcatatacatcctgtcctatataatacctcatctggcctcatattttgtttataatctagtatgtaatactcaggcttgatgaccttagtaataggactttccttacaaaatatactcacaaatctgaaattggtcaatcatctgtccaggaggaaaattaagtgaacctagttttgtagcaatacgtttaagttaaaggttcaaaatatactttgagacgcttcaaaatgccataattttccttctggaacccttatactccctcagtctgactttagttatcctctgaaagctgacaagtccctcctaagtgcattttggtactatggataatatgctataattcagtgaagggcttctctaggttacatggggattatgatcactgtaacatctaaatcatatacaaaaaagtaaacgatagcaaggctacaatccctcactcctacaaaaattcttcaatttttattctttaagtatatctgttttgataagtggtaagtggtctttggtggaatgagctttagacttggcttagctctacaaacacaaagacttaagacattttgtcgttaagacattctgactttaagaccttctatcttgacattctgtttttttgttaaaaaaacaaaatttatcactttcatgctattattaattttactcatttcaaagcacatcatatttcaaaaaacatagaaatcaacaaatttaaattatgtgcattcagatgggactcacctttagagaatcaaaacaggccaccacacgaccattttccacatggcaaactcttggtggatgggcaaacttgcaatctgcatcagctcgagagcaagttcctctctgaaattctctacagacttctaaagtcagccacttggtatcacgaatcagggcaacattgacagccgtcatattgaaagcaaaattaaaatccaatgtaccctctttaggacaatattactgtggactattaaaggattaaaaatgaattcaaactaagtgcgaagagataacaggttgctttggtgaaatgtctatttgttaacacttaggttttcattaaagtcaaatctggtctagtcaaacaaaaagccaatcataaaaactatcagaataactaaaaatgaaattagagaccaactcttaagaagccaactgttaagataatgaatgctttattttgttcctttgccgaatttatgttaaataaccggcagactttcaaaagaattctgggctctgcagttgatgttttcaattattcttgcaaaaaacatatgctgctggctgcccttcgatttgtggaatggtctcagatcagggggagaaaagtttttctccctatttattagctttaaataacaagattgggaaggatgttagaacccaaaaaaagtttcgttgcaaaatcaagtggagggaaaatgactaagaaaattgagaatcacagaaaaaagaaatggaccagctgctgacagtaaactacaagcacaccaggttcggcggggaggtggagagggcagggaacggtatggtagggagaggggtttataaagagacagctctagagtagaatccaagcagcagagttttcagaaaaggcacttttcagaacctgcaagaaaaaaataaataaaattagctaaaataatacaatgcttccgtttcaaactctagatttggaaaagaagtaactatatcctatttaaaacaggaagcatctagatactgacagtgcaacatagtacagtcagccattgtcaataaaaagggcatttcccagtataaaactgtatagtaaaagcaagcaactgcttagatttactgttgtagtacaagactaggcaacaacctcacatgaggtggggtggaggatggaaacgtaaaatgtgcttcagataaagaaaaaagtcatctgaaaagatttttttttttctgtgtaggctccttagtctctatgaagggaaattggagcaactcagaagaaggtttcagcatatacaaacaagtgagacagaatgtgctgtttaatgaaatagattaaatattatgcagctttaaagtatgcagtttaactcagtgtgaaccagctacaatttctagcaacagctgagaagatacaggaaaggttaatttattggcatatgccataaacacatactgaaatagcattaacgcaaaagtgagctctgagtattagaaaaatcaaataactgttaacttcatcaaaaagtgagattaaagttcttaaaaatatttcatttaattttttcaacaatattttcaacaattttacaaaatctaaatcttctctttgtcttttccatattcaagatgcaattaagtatcacctgacttttcaaatatcattgagaaattaaatacctagaaagttcaagcaagcttatctactcaagagcaaaacatgtttttctctgagtcattcttcatggaaatcattctaaaatgtattctgtgtaactttgccttcttaaaaaatatcaaacataatttggcctctaattaaagacttgggaccattaatgtattaggaagtataatagttctcctctttaagtggcagactgttgtcatatccactgtcacttctctgtcacaatatctaccacagtgaattttccagctctcttccaaaaaacctaatagccagtcatgaatgttgaataacaattagttacccactgaatgaggggcctgtggaacaagatgcagagctttcttgcagaagttctatgactgctcttacttctatgcaggcccttctgcatcaagttacatgcaggaccatgttctagagcgttgaagttgcaggcaaatgacttctaggaaaagtattttaaaaataacctgatgatagaaatgcaaaacaaaatcacaatgtgatgaccactctcattagtctaactataattttaaaaacagaaaaattggagaaatttgaaccctcatacatcgtggctgggaatatgaa

SEQ ID NO: 1563867 - DNA, 4001 bp, Homo sapiens
ctgcaccaccatgcctggctcatgtggctttttcaaacaacaaaatcattgtggcctgtattgcttatgacacgttaaccactatgccaagtactttaaatcagtgctttttcttttgagacagggtcttgctctgtcacccaggccaaagtgcagtggcacgatcttgtttcattgttaacctctgactctcagactcaagagatcctcctacctcagcctccagagtagctgggactacaggcatgcaccaccatggttggctaacttttaaattttttgtagagataaagtctcactatattgcccaggctggtctcaaactcctggactcaggcaatcctcccacctcagcctcccccaaagtgctgggattacaggtgtgagccactgtgaccggccacatcagtgcttttcaaacacaaacaggtgcagaggagtcacctgggatcttgctaagatgcagattcggattccctaggtcaggggtgaggcctgggattctgcatttctaacaagctccgaaatgatgcaagtgctactggtccttgaacctcaagttgaggagcgagactttatgtggatacactaatgtaattctctctgtaatcttaggagatccttactattatctctatttaaagatgagaaaccaaggcacagatagcaattttcccaaggtcacattggctagaagcccagccctggatctaaggactacgctatgtaacctcctgcactttacaagtttaaatgatagaaggaaaagtctcatttcattttattgttaaagctaaaacatgcaatactatggttttctattttaaatggtattcataacatgaagattttgctatccataactggaatttttattaaacacttgagaatttatatgatcttattccacatatatagttactcttccccatcccctaccccccagtactcaattccaaaagcttgcctgaagcatgtggtcagacgactcttcctgattttttgctacccttctcaaataactggaaaatggaccgtgcacccagggtatctggttagtgtgaagaagtggggtgcagcgtgtaaatcagaattcaagtagttagaaactggttatgtaaatccttgctatttgagtgtgctactttgaagtacactctgtgatctggcagcatcagtagcacttgggaactggttagaaatgcagaattttaggccttgccgcagacctgctgaatcggaatctgcattttgaccgcaaaccagatgatcatatgcatttaaaaatttgagactactgatttcaatcacgacttgatttagattcattccaatatctgagtctctagagcgttttgaacttaaaaacaataagggaaagcactgtctttactaagcagacgttttcttttcctccctgctgcactgcagctgctgggtctggcagggccccggccctcccgatcccaccactggcgcctcccgggcaggacccgaaggctgaagggcctgcactgccccgcactgcgacagtggcagccgcgcaggccgccacaaccctcccgcggccggcaatgttttatttactccaccgggccgatccaccacgcggactgtcgcacgtgggcaccgtccagcccgggaggcgccaggcaggggaagagaaaagaaggccttgcgctccggccatgggcaccgcgggcttggaccttaggcccaaggccctcaccttcagcaccaagtcggtcaggtagacgacagtccagccacccaccaccaccaccaccagcgacaccggaatcatggcggcagcggcggcagaggagggaaggcgagccccggcgtcctcctccctgcaccgccaacagctgaccgcgcgcgccttacagccccagcatccgctcaggaaccaagctaccgccggctccttccttgcggtggcacggtttcccaccggactcttccagtggggacatacaggaggatttgctagtaccggaaatggcacgggggcttatttttgcgggcgctcgggcgctgccgtccaggcagtagttcgaactcggcatctagtcttgtagcgatttcttaggctttggccctccctgctgtctactctccattctcgccagttctggtcaggggtttgctgtttcttttaacccatgaggatttggggtcgtctgaagtaataatctctccctccccgaccctgtcatagatatccagatttaattgtttatcctttttactgaagtgtaaatttacatgtaatgaaatcatacatacagagctcaattgtccatttctgtgagttttgataaatatatatatatatatatatacgtgtaccctaatcaaaatggagaaaatttccctctcaggaatttccttcttgcgtcccttcctagtcagtagcccctccccctgttctgattatttttaactttatgtaaatagaaagcaataagtactctttgtgtctggcttgtatcgttcaacatgctttttgaaatttatccatgttgattaaattaggctcttttttcaaccttttataatatttgagatggtgctatggttaaaaatcagaactctgaacacctacacattttaacgttaatgtatacctgattatatattgaactagagcagcagttctcaaccttacctgcactttaggatcaccaaggtcttttaaaattcccgatgcccgttctgtatcctcgaccaattaaatcagatgctcagtgggacccaagcatttatactttttaagctcctcaagtcattgcactgtgcagccaaggttgagaaccactgaactagataatctctaagagaaaagaaaactatttattggggtttttttacgttctatttatgtgcatctttaaaagttatttgtttcaacttttctggaaaagcatcattagctataataatgctaataccaaaatattgagaacataatactatctcaagaacaagtatcccaaataaaaatgtatcctcaacccccttccaagtgaaaatatacaataataccagaaacctatattacaaatattgctactaatttgcctcattctccctgcttttcctaaagttttactcacttagggacatgtttctccagcttcaagacagcttatgactgttttacatatctttgcctatttgtgtgtgtatgtgttgttataaattatttccgttttctttggacatagctgggtgtaaattataaaagtttgtattcaagcaccctgttactccacagttttccatatacaagtatcccaaaagacttagtgctgttttaagctttaataatttctgaagtattaatgctaccaacttgcaaaaagtcacttgaaggtttatttaaatttcttatatgtttattttattttgtgaattttgaacatttttaaattttttagtccctttaacggaagatggcaaacattgactgaaacaaaaaattaaaacacattttctgttcaaaaattcacaaaccaaataggcagttaaataattttatagttaatacagttaaataattttactttcaaataatgtatgagttcatataatttatactcctgaagttattaaaagcttaacactatactgagacttctttttctcttttttgagacgtagtctcactcctgtcgcccaggctggagtgcagtcggatgatcttggctcactgcaacctccttctcccggactcaagcaattctcctgcctcagcctcctgagtagctgggattatgggcacataccaccaatcccagctaatttttgtatttttagtagagacaaggtgtcaccatgttggccaggctggtctcgacctcttgacctcaggtgatctgccggcttctgcctcccaaagtactgggattacaggtgtgagccaccacgcctggccatatactgaggctatggatacactattgtgtttgttctgacctttgtctgttcttatataa

SEQ ID NO: 1563868 - DNA, 4001 bp, Homo sapiens
tacccaaaagaaattattctaccaaaaagacacatgcacttgtatgttcatcactgcactgttcacaatagcaaagacatggagtcaacccaggttcccatcagtggtaaatgggataaagaaaatgtgctacatatacattatggaatactaggcagccataaaaaagaaagaaatcattctttgcagcaacatgcacggagctggaggccataattctaagcaagttagtgcaggaacagaaaaccaaataccacatgttctcatttatgaagggagctaagcattgagcacacatggacattaatatgggaacaacagatattgtggactactagagggtgcagggaggtggggaggataaaaaaaaaaacaactattgggtactatgctcactaccaggatgacaggatctgtaccttaagcctcagcatcatgtaatattcccatatgacaaatctgcacatgtacccccttatctaaaattaaagttgaaaaaaaatgaaacaaaatgacattgaacttctcaatagcaacactggattctacaaactaatggaaaaataaacacaaaatcaggggggaaaaggtttttcagcttggaactttatactgcgtcagactctcaaacaaaaataaaggttgtctaagatattttcagacataattattattattattattattaataaaagtttataacccatataaagaagttagtagagaatgtattccccaaaaaaatgatgaagtacatcaatgaagagcaagacaatgaatctaggaaataatgatccgatacaggagcacagacaaagggaatttcagaaagagatgtgcagctagccggcagagtaaccagctcagatgaaaaaagaaggatggagggctctgggagggagctgctcccatccctttctacctctttctcaccaagtttggtgagttttccttaggatctttttgggcccctcaagcaactttcaagaaccttgcatatcagagaaaaaaagggttggagtttccaatcctttcattctgagaagacctctaggttcttcatataaacagtcccactccttccccagaaactttctacctccacaaataaatactatagaggcaagaataaaatgtggttttgcctcactagagaccctgctttaaaaaatgtgagaaacatcaccatattcttttggaagattgccctcaagacctcccatttttctttgctctccaagtctacatccccccggctaccttctggggaccaaggtagttcttcttggtctggaaaatttgcgtgcttaaaaagaactggacacaaataatggaatggtcttttacccactgaaaataaataatctgctgtccaaatttataagccaaccatatgcaagttcacaaggcaatttctcaagtcctaatccctagacggctcagagactgaggcccatacattgcataggaaccacaccaaggtacagccatcccatgaagcccaggtgcacaccagatttgttatactaatagttccaggtttacagtggtgaagttctaatccagagttgagaaattcccacctgcctttacttgggaatcctaattattttagaaaaaactgaacagtagacaaagaactgtcagagaaacccaaagcaggctattgcggtctgtatggacagatacacctttacaagaactgcactgtgtcctgcaaatcattggtcctagaaatgggggattctggggaaaaggggaaactactacaagaatgaaaatgactggctatgggggatgctatctataaaaatattccaagactgacccactcattgccccaatccatttcttatattactctaaggtaaagaaatacttaccacaaatgtttgtccttaagactgtcgcagctcattctgtttcctcggccaaaagaatgtacaatactctctgcctgctccaagaacaaaagccttcttgctcttaacatgaaaaaaagtttcaaagccaatctgatgtcagcaactgaaagtgtagagaagccttgacttgaagtagaacccagaaacaaaattataaatcatacactgtatcacagtagaggaaggagacctaatttttttttttatttacaaggacaaatctggagaaacagaacgcccactcaagagttagcccgacagtttgaaaacaaaatacttctgcacaaaatgcagaagaagctgggcatatctttttttgtacacgacaaataaaaattgtatggtgtacaatatgatttctgatgtatgtatacatcctggaatggctaaatcaagctaattaatactttctttacctcacatatgtatcctttttgtggtgggaacatgtaaaatctactctcttagcagttttcaagtacacaatatattgttattaactatagttatcatgatgtacaataggtttcttggcagggcgcagcggctcacacctgtaatcccagcactttggggggccgaggtgggtggatcacttgaggtcacgagttcgagacaagcctggccaacatggtgaaacctcatatctactaaaaatacaaaaattagctgggtgtgatggcggacacctgtaatcccacctactcaggaggctgaggcaggagaatcgcttgaagccaagaggcagaggttgcagtgagctgagatcacaccactgcactccagcctgggcaataaagtaagactccatctcaaaaaatatatacaaataaaaatatgaaaaaaaatttaaaaattaaaaaatagatctcttgatctttgtcctcctgtctacgtgtaatgatgcatcctttgaccaacatctcccaaaaccctgccccatcctctggaaaccaccattctactttctacttctatgagtttgacttttttagattccccataggagtgagatcatacagtatttttctttctgtgtctggattatttcacttagcataatgtccactaggttcatccgtactgtcacaaatgacagaatttcattcttttttaaaggctgaatagcatttgtgtatatatagtatagtatatatagcatatactatatacatagcatatatagcatatactatatacatagcatatatagcatatactatatacatagcatatatagcatatactatatacatagcatatatagcatatactatatacatagtatatatagcatatactatgtatatagtatatgctatatatactatgtatatagtatatatagcatatactatatacatagcatatatagcatatactatatacatagcatatatagcatatactatatatacgaatgctattcgtatatatatacactatatagacacgaatgctatcattcatatatatatatatatatatatatatatacagtatatataaaaaatattttcttgaggttgcttccatatcttggctattgtgaagagtgctgcaatgaacatgggagtgtagatatctctttgacagactgatttcattttctttggatatatacccagtagtggcattgctggatcatatggtaattgataatatgaccataaatgcctggattttttctgggccagaacattcatactgttttccatagtggctgtgctaatttacattcccaccaacaagggctcccttttctccacatcctcacaagcacttgttatcttatgtttttgataattgctaccctaacaggtgcaaaatgttatctaaatgtggttttaatttgcatttttgtgatgataagtgatgttgaacattttgtcatatactggttggccatttgtatgtcttctttttaagaaatgtctactcaggttctttgaccatttttaattgggttatttactactttttgctattgagttgagttctttatatatcttgggtattaaccacttatcagatgtatggtctgtaagtatttttcccattccatagatggtcttt

SEQ ID NO: 1563869 - DNA, 4001 bp, Homo sapiens
gagaaaaaaaaacacaggaaagaatcaaggaaaggtaacagcaacatatactcttacttaacacccaaacatatgccatctcctgtataaggccttctccaccagccagaatttcttttcaaaatagtcatttacgaacatgtcttaccctttctattagattgagagttccttcagcccagtagccattccatatttacctttgtaacttatgttgtatatatcacagtgctagatatgtctattcagtgagtacccctgtgctgtatttattgtgtgtatattaatgcatgtgtatagacataaaactaagttcagcactgagaatatatatatatataaatatatatataaatatatgtatatatataattaggaactttctgaaagcttaagttaacctttgataacaaaagtgctaatatcagttgcctacaatactgcaaagtacatacacaaacatttcttgtgcaccataaatcgtctgttaaaagtctgaatctatattctcataatataaaaacatgtatagagccaaagatataattttgtcaaaataaagccaactatagtttttaaaatagcagtctgtgctaagagctttattagaaaataaatcatttacacacctattgatgttcactgtcattcaacaataataaaagtcttactttccttatcataattttaattcaaactgtcatttttttcctatggtcaatttttaccttcttatctgtgtgtgtgtgttatctcgatatttttagtgagcaagtttatattttaaaccataacatcaataacattatattaatctttgaaagaaaaagagtggcatttaaagcctttttgatgattagttttttattaaattagctagtgttatttcaacatttctccaaaatacatctaaagatcacattagaaatttgctgggaatttactatatgaataaatgaatgaagggaaaatttaggcaaaagactgcatgaaatgtacctgagaggagagacttccaaattctagtctatattgaaaagtgagttactgtctttttccctaaaagaaaaaagttgtcagcaggtgacaattttgtacctacgaagtttcagtttggagaagaattgaaaccataaggatttcaaatcattacagattttaaatttattcacttatacggtaacacccaggaaaggctgcatttttaagtgatgatggaatcccctccagacctatccatggcaatatactctacttgatcatggtgaaagaaaggatgaatccttttgttagatattgttttaagtcattatttaaagctatgctgtccaatgattcaaaattgttcatacagtcttaaacgaataacatgactaaggtgctcattcataaacctgatgacatttagattttgaaattatattctaccccctcaattgcctgaaaattaccctatgtcaatatcacagtaatcacatcaatgcaatccatgcaaatataagtctccattctctccatctgtccttaaaaaccctactcagcagtttgtgctatagcaccatgctgcagcatcccagcacttgaacttgggaacaggctttccaggagtgcagacagagcccttaccgcattccttctgaacctcatcttgcctctccggggatttgcttctgccatttcgcctgtacgcaattacacttttcttttccaattgtcaacgcaacgttgatgaaatacgagctgcttcttgggtagtatttaaaaacggcagccaaaaatctctatcaaacaaagctgccgtggctgcttccattagcacagtggcagcaatgctggggaggaaaaaaaaaaaaaaaccactatccctgattagtcagctgacagatccttcccttctgctccttgtaattcagagttaacacattcctccaattacttagcctgattgaaccttgtggattagcttgtgctggactgctcaagaagatcaggcatgtcctaagagtggaaggaggaggaaaaaaaaaccagctctcttcctaggagcaggcttgatgggactggctttctcctctgcgcagtttgatttttaaggtggaatgctaagaatctttgtgaaggtagtattaactcatgctttttactctcgtcctaccctggtatgtgacttaaatttcaattctgttttgttttctctgttattgtattctgggtttaagccttgtgaaaggctatagtttgcaaaattttgtcctggtaataatctagaaagaatagaacatgcaaactttctaagacggatacaattctctcccaaattaacctttccccaaaatgtataactaaaataaagtctcctctcattaattatgaaatacaacctaaatgcttttatttgttttgaaatctacaaataaaggtattcaaattgaattgtatgattatttcacagacacttgtttgaaataatacaccacaggcaattatacctagctacacaatggtagatttcactagaaatcctttctgaatgccaacttttgcacttgaaattagcttgcattcaatatttacctttatttcaaacagtaaccaacagttactaatggttgagatgtaattaatgtgctcttgagtatgagtatagaaactataccacaagcaaaaacatttaacatgttaaaaaagaaacacctaaaacaacctatagccagttacatgtggtcagaatctgtacccctcccttgcccagcacgatcaatttggcagttatgaaaataaagggaccctgggatccaagttctttactgagcataggtcaaaattctccactgagaaagcagccctgggaatacagaaagaggagtatcactccccggtagacaagtaattaccctctgttgacttcaaaatgacaggatcatgacctaatcttatatttctcttttatgaaaaatagaacctctgttacaagccacctattttgaataataaaaataaaactctaccaaaaaaactaacgtcaggtgccaaaccagtcacaaaatgaaaattaatttaatcaggcgggtgcagtgttggccaaaagaaaaaaacctgggtgataaaaaatgttctaatgtaacaagtgctttatttagtataagagaagcaattattagcataaaccaaggtctactcagcaagcccaaggaccaatcctaaaagaccggagcaagggaaatagcttttactttatttagccccactgataaggctcaattgtatatggaggacagatctaatctctcaaaagaaattttacctttatctaaataacattgaatgtatttgtctatttgtaagccaattggaaaatgatagaaaccatcaccaactggaattcttgacatttcaattcttgctctggcttttttggttacttggctatttgagcttggattcatcacatagccattccaaagtataaatatcaatgtgatttcatcatctataagacaattatagtgatacctacttgcagtacttaatcaggaaatgaagagaatcaacaatacttaataaatgtgaatgcttttgaaaaagcactaatatgctatagaaagtcaaattttcttctattttattttagtaatttgagtatatctaatgttaactcttctctccactgctaatgattaaacacctctgttaaataaacaggaaaccactttttgcttatttgtccaaagtgaggaataattcattctgagtattaaaagaataatgatcttacccattttaccttgcaagtgctagaacattggcttggaagtccaacaacctagatttttgttttgcctttgcaactaaatcaagttcttgtggtgggcgtgacctcctcaatcagtcaggagacaaagtaagaatttcagatggctggcaatgttggaatctcaaagaaaaaaaatatattgattcccagctattctagtctgatagaggaagttggccacatggca

SEQ ID NO: 1563870 - DNA, 4001 bp, Homo sapiens
attctcctgcctcagcctcccgagtagctgggattacaggcacctgtgaccacgcccggctaacttttgtatgtttagtagagacggggtttcaccatgttggccaggctggtctcgaactcctgatctcaggtgatccacccgccttggcctcccaaagtgctgggattacaggcgtgagcctccgtgcccggcaataaatatttgttgaatgaattaataaatgatctttcttgggctttctggaatgcatgagagaatctgcatttttcagatttaccacaagatgggcattcattttagttttacatccattattacctagtactaataaataatgagtcaattatcagaagtcactctaaactctttttgtgtctttcagtattcccaaatgcatatttctgtttttctcccccagcagtgtcttatctgattaaatgcatatttcttacaagactttacatttgaatattgcaataggagtaaaatttcaaaaaataaaaataaaaaaaccttacatttgtgaagtaatcttagggttggataaaaaggcccttctctttgtctaaaaaagagtaattctccatttactgtaaggatttctatatgttcatggctgtaagacaaatgtcacaaagtaccaagttagatattttctttcaaaaattcacaatataaaacacgcatatacagtgataaactttcttaaaaagtcagtaaaaatcctggccaaaaaatattgtttacattgtttttcctatcatgcaagtccagtagagaaaaaaagaaaaatattacctgctacaaccaattttatttcacattttattaattccattgttaggtaattcaataaaacaattctctaaacaacaaactgaaataaattaaatccaactctgaactaaaacatttaactctttactagaacaatcaatacacaaagccacattttttcagggacatagaaaatctttgaaaatacaaatattggagttttagagttattctgtgtctaccccattattaatctatcaatagttaatctgaaaataattccatttagtatgagtgcaatctaatcattaaatattcagctataccgagctttacacagacaaaaacaaagacttaccatcggactattttgacaggatctttcttaggcatgatttgattaagccatggttcaatacctggaaattgctctatcaattgattcttaatacccttaataactgaagttttcaactggatgcagttggacacattttctttttcatcaaatctgccaagtaatttttgcaagaaaagaaaaggcatttctaagtagaggtatcagaatacctaaaggtactgttctaattagtcatttattcccaaccaagtatttagatacttaattatgaaataaattgttcttttaaaaaaaaataccatctcccttttactctgtccagcacaaaaccaatgtcttaatacaatattgaaataaactgtcaagtatacagcaattagctggggttagggggaggaatatgagacatactttgcaccataatctgtaattagctacacaaatgcctttcctggaaaatcttattcaattctacccaggaagaaacacaggctcccaccaataataaaacctgagatcagaaaacaaaaccctcaattcttgagatacaaaagaccaacccaagcataacatagaaaatcggcccctgctaggctatgtaatctgctgagattttttttaagtgatgataataatgatttctaagatccctattcgtttttgctcaaaatttcatgcacaaaacccaccttcctttgcccatgttccccctttgctttttgcgtctaccaaatctggaaggcaaacccactagtaggttcccaaggaatttttgtcttccttacactgaatagcctatggggcaatcgttattttcaaggcaaggttaatctggcagctaggcaataggcatgacaggccgcttgcttcctgtcacccagactccttcactcccatgacccaggaagtcaagccttcctttattcagttcataactaataaacatatggcagtgagcgcagggctcccctctcagctacagagaatatgcctctaaatcacagtgcacggatgtgattggtagaaccctaggaatggagacagaattgggggagggggcaaaagagaaagaggggtaaggagaaaaaacaatgggagtggagggactgaaacccaattaaggactacggatggaaagcttaaagaagtgttcaagttgggagtgagagcatagtactatagaaaaccttagggagtcaggatggcaggggcgggggagagagaaagaggatcttagctctcgccctcttccccacccccaccccaccgcctttgtgagcagccgatggaggccacagcatgtccttacttcttgaacatgatccaaggtgaagggggcgacgatagggaagggcccggaatgggaaagaaattgaatttgcaggggtccggcagatcccctcacacgaggaaggccggcactgacagtcggagctgtagtcgttatccggaaaacgagagccagccgcgctttacggctctcagtcaaatctgactacttccgctcctctggactccacgtaggcgcttttgccggctccttttaggcaaccggttcctcagcagttggaggtagctgaaagggcgggacttgagagggaagaagtgatagagcaattgcaggaagagaagaatggagggggcggagaatcaatcaaagtagcatttatggcacttgcgtcagttacgggttcctcaaagggtcaagattcttccgtgcttcgttgctacctatcgtcaaagtaaacgatttttttagagggaatggtttctgtcctgtctgaggcaaccgaatggattggtgcttacctaccagcatgaatccaggcaaccctcatggcttcatgttaaagtgctggtaggattgccaggtttagcaaatgaaaatacaggatgcctatttaaatttgcatttcaggtaaacaatgaatatttgttttagtgtaagtatacctcattaatattttggatatacttacactaaaaatatacagcgcttgtttagctgaatttaattgagcatcctgttttttatcttataaccttattcactggcaaccgtacgatgctcccaaagttttttgcgggtttttattgagacagggcctcactcttgcccaggcttgaatgcggtggtgctatcatggctcacttgcagcctctacctccttggctcaagggatcttcccacttcagcctcccaagtagcatggactacaggcacacaccatcatgcccggttaatttttttatttttattattattattattattgtagagacggggtctatgttgctcaggctggttgcaaagtcctgggctcaagcagtcctcccaccttggcatcccaaagtgctggggttacaagcgtgaatgactgtgctcccgtagaataattcccatagaattattacagaaggtaatctgatttaagagataatagctaaagagacatgttttacttatgtaatttttttaaaaataaagctgatagagaaacaaaattatgccaatcaagagtttcactttgttttttgttttagagacagcatctcactctgtcacctaggctggagtgcagtggcatgatcacggttcattggagttgcaacttcccaggctcaagtgaccctcccgcctcagcctccggagtagttggtactacaggcatgcactaccacacctggcgaattttaattttttgtagagacaggcagggtctcactaagttgcccagactgatcttgaactcctggcctcgagcaattccccgaactcagcctcccgaagtgttgggattacagccatgagctactgtgcctggcctaatcaagggttttgatcagccaagaaatcatg

SEQ ID NO: 1563871 - DNA, 4001 bp, Homo sapiens
aaccaattttatttcacattttattaattccattgttaggtaattcaataaaacaattctctaaacaacaaactgaaataaattaaatccaactctgaactaaaacatttaactctttactagaacaatcaatacacaaagccacattttttcagggacatagaaaatctttgaaaatacaaatattggagttttagagttattctgtgtctaccccattattaatctatcaatagttaatctgaaaataattccatttagtatgagtgcaatctaatcattaaatattcagctataccgagctttacacagacaaaaacaaagacttaccatcggactattttgacaggatctttcttaggcatgatttgattaagccatggttcaatacctggaaattgctctatcaattgattcttaatacccttaataactgaagttttcaactggatgcagttggacacattttctttttcatcaaatctgccaagtaatttttgcaagaaaagaaaaggcatttctaagtagaggtatcagaatacctaaaggtactgttctaattagtcatttattcccaaccaagtatttagatacttaattatgaaataaattgttcttttaaaaaaaaataccatctcccttttactctgtccagcacaaaaccaatgtcttaatacaatattgaaataaactgtcaagtatacagcaattagctggggttagggggaggaatatgagacatactttgcaccataatctgtaattagctacacaaatgcctttcctggaaaatcttattcaattctacccaggaagaaacacaggctcccaccaataataaaacctgagatcagaaaacaaaaccctcaattcttgagatacaaaagaccaacccaagcataacatagaaaatcggcccctgctaggctatgtaatctgctgagattttttttaagtgatgataataatgatttctaagatccctattcgtttttgctcaaaatttcatgcacaaaacccaccttcctttgcccatgttccccctttgctttttgcgtctaccaaatctggaaggcaaacccactagtaggttcccaaggaatttttgtcttccttacactgaatagcctatggggcaatcgttattttcaaggcaaggttaatctggcagctaggcaataggcatgacaggccgcttgcttcctgtcacccagactccttcactcccatgacccaggaagtcaagccttcctttattcagttcataactaataaacatatggcagtgagcgcagggctcccctctcagctacagagaatatgcctctaaatcacagtgcacggatgtgattggtagaaccctaggaatggagacagaattgggggagggggcaaaagagaaagaggggtaaggagaaaaaacaatgggagtggagggactgaaacccaattaaggactacggatggaaagcttaaagaagtgttcaagttgggagtgagagcatagtactatagaaaaccttagggagtcaggatggcaggggcgggggagagagaaagaggatcttagctctcgccctcttccccacccccaccccaccgcctttgtgagcagccgatggaggccacagcatgtccttacttcttgaacatgatccaaggtgaagggggcgacgatagggaagggcccggaatgggaaagaaattgaatttgcaggggtccggcagatcccctcacacgaggaaggccggcactgacagtcggagctgtagtcgttatccggaaaacgagagccagccgcgctttacggctctcagtcaaatctgactacttccgctcctctggactccacgtaggcgcttttgccggctccttttaggcaaccggttcctcagcagttggaggtagctgaaagggcgggacttgagagggaagaagtgatagagcaattgcaggaagagaagaatggagggggcggagaatcaatcaaagtagcatttatggcacttgcgtcagttacgggttcctcaaagggtcaagattcttccgtgcttcgttgctacctatcgtcaaagtaaacgatttttttagagggaatggtttctgtcctgtctgaggcaaccgaatggattggtgcttacctaccagcatgaatccaggcaaccctcatggcttcatgttaaagtgctggtaggattgccaggtttagcaaatgaaaatacaggatgcctatttaaatttgcatttcaggtaaacaatgaatatttgttttagtgtaagtatacctcattaatattttggatatacttacactaaaaatatacagcgcttgtttagctgaatttaattgagcatcctgttttttatcttataaccttattcactggcaaccgtacgatgctcccaaagttttttgcgggtttttattgagacagggcctcactcttgcccaggcttgaatgcggtggtgctatcatggctcacttgcagcctctacctccttggctcaagggatcttcccacttcagcctcccaagtagcatggactacaggcacacaccatcatgcccggttaatttttttatttttattattattattattattgtagagacggggtctatgttgctcaggctggttgcaaagtcctgggctcaagcagtcctcccaccttggcatcccaaagtgctggggttacaagcgtgaatgactgtgctcccgtagaataattcccatagaattattacagaaggtaatctgatttaagagataatagctaaagagacatgttttacttatgtaatttttttaaaaataaagctgatagagaaacaaaattatgccaatcaagagtttcactttgttttttgttttagagacagcatctcactctgtcacctaggctggagtgcagtggcatgatcacggttcattggagttgcaacttcccaggctcaagtgaccctcccgcctcagcctccggagtagttggtactacaggcatgcactaccacacctggcgaattttaattttttgtagagacaggcagggtctcactaagttgcccagactgatcttgaactcctggcctcgagcaattccccgaactcagcctcccgaagtgttgggattacagccatgagctactgtgcctggcctaatcaagggttttgatcagccaagaaatcatggaaaaatttaaaaacctgaaaaggccctacgcaggaggtggggtgggtaggcactgacatccaaaacaaatacaccagtctccccagggagtaaatactctagtccatattgaggagacgggccattagagcaattatagcaaacagtactatgcatttaaatgatccaactaacaccttgtcttaattctatggtatgaacaatattctgattataatttggcttcccatgaagatctgcccacagggaaagaattagctacgttccaatcaaatctgcatgaacaattatgtttgcatttgtaaattaataaattggcattctggtttatacaacactctcttgtgaacatccttagtgagaatccacattcccagcatccatcaactctgcaacatttagaatattgacattatgaacatgtgaaactgatgtccagaccccaagctgtggtgactgccacactggcaggattatttttttttaatttttatgggtacctagtaggtgtataaatttatggggtatatgagatgtacaggcatgcaatgtgaaataagcacatcatagaaaacggggcgtccatcccctcaagtatttatcctttgagttacaaacaattcaattatgctctttaacttattttaaaatatacaattaggttattattgactatagtcacagtactagttcattctcacactgctagaatacctgagtctgtgtaatttataaagtaaagaagtttaattgactcacagttctgcatggctggagagggctcaggaaacttacaatcatggcaga

SEQ ID NO: 1563872 - DNA, 4001 bp, Homo sapiens
acatattcaggcaagaaaataaaagcaagtgtttcctagacttcctcattgggatttgaaatagaaatcctgaaaagcccataaaagcctatttccctaaatccttggtggaaattcccaaaagattaaaaaatccagaccctgtcttattatagggacccagcagatttcaaaagactcaagaggtcagcttaatctggttattaactgaaattgctgagatactgatgaacattccagccatggaacccaaaattctctagagtaataattacctattagtgcaatgttactactgaggccgtatatgcttcatttttacagtataacaaaatgtctaaaacttatgagagtcctacaacgtctaggccactcagtatcacatccaagtaggtatggttcctggatcaccaaccaacccctgaattcgatcctgttatctcacagtctggggtactgatcccgcacagcagagacacaacgtgtgaaaggctcggcagagcccattcctgttcctggaaaaataaccagaagcacacatctgcctgaccatgagtcaggaatatcaattttgtggtggagcccatttctgctgtgaccaacccacacccgaacacactcgcaacagaagcaaccgccacagagcaattccagaatgagctttttccccctcggggtccatacttagcaatgtcataaacggtctcccctgcgacagcaatccttttacactcttcataatgaccttaagtctttagtgcaaaaccacagaaacattgccactgccatataaaagtcatctgagtttcagtttgggtgattcggtcatgaccaaactgaacagaggataacctttcaggcacaattaacaggagccacagcgtcgcgatgaacttgccccatctggtaccggtgatcccgagcgctccagggcgatgagagcccgttacctactatgtcccactccacttatgtaactggaagatcgccggcgaaggggagggtaggatgggagggtgctcacattccgaggccacagcactccaaagaacctctgagcaccctggggacacgctcgcaccttagagcctctggcgccgaagagcctcgggtgctgctggacgcacagtcccctacccacggctcctgatgggaactataaccacctctttatgatgagttgtgggacccagaacacaatgtctagtcccttttgtggataataatccccacctacttgttcctgctagatggggaaaggagccggtggacctactcgctcgcgggggggtagcggggggcagaaattcatggaatgggcgagaaggagggggaggcaaagcccagagatgggggtgagagctcaggagcccttgtggcgcactctcccgacgggaggcgaagtgcgcacgcgcgccggtgggggggccgagtaacgggagagggggcgcgcgagggagggagggggagagcgcgatccagggagaggccggggccgcgggcgcgcgacggcgccgcggcccaaagccccgagaagggcaggagcgcgcgcagccccgacaggcgaagccccggcgacaggggcgcccgcggggccgggggccgggatgcgcgtcgagggcgggaggaagaggggcgtcaggcgaaggcggctccagggaggccgcgccgaggacggtcacccgcgagcaggggtgacgggccgaggggagagtcgccaccggcggcggcgggagggggagggtagagaggagggacgccatccgccagccgtgtcgtccgaccccgcgggcccctcccgcgccacgtcccgcccctgacccccgccccccggcaagggtccccgcccgcggccacggcggtcccactcacagtctctcctcctcgcctcctcctcctcctccgctcggcgcggcggcggcggcggcggccattttccggacggcttttaccacagccctctctccgagaggagggagcgcgcgcgccgccgacgccgggaccccgcacggccgacgtcgcgccccgccctcttggccggcccgcgcgctgctgcacctgcgcgcccgcgccccgccctcggcgccgctgcgagcccgcccgtcattggctgtgatggccgggctgggacggggaggacgggggaggggggagtctcagcggcgatgccgtcaattggcgagatttcctgtccatttcggccagggaaaagggggcggacccctccagctgttgattggctgctttcggccgtcgtttggggaaaagaggcggcttgggcgcggagggactggtttagtgggcggaatttgaatgttaaggattaatggacccttgcggatgctggggcaagtgaaggcctaggcttgggacgcctgtttgcgctgctctgaggggcgattgaccctctgtccacagatgcaccgagtgcgctgcaataagcgtttcattgcacccacattttctcaatatcactatcttcggcagaagcagcaaagttgcccaccctggagcctgacgttgccccagctgaggggccttggtttcagaggcctactcaatgcattatttcatccgagcctgcccagtgctcacactctcatagaggcggggaataaactgacaacaaatcgcaaccctggctttcgcagaactctggcgggggaagagagtgcatgccaaggcctcgtgacacctgtcactgttggatcagatggtttggtggaggtgtgaataaggggcaatgttagctctgcctggaagatatgatttgggagctgagatccagcaatttttcactttcctagaagagttgatttggagctgagatccagcaattgtgttttgggaaaataagagtatgagaaaactgttagctaaccaggtgttcaggacaggagtgtttgttaaggggaccttaccctgatgccagtcattatccaatccattcaatgatccttctgttagttctatgcttagcaagaaaacctgattctgatttggctgcttgcccccattcatttattgactacctgctatgtgccaggcactcttccaggctctggatgcacggtactgaacagacagcaaactaacattcttgccgggaagattcatactagcatacaaataagtataatatatcatttcacatagtgataagggctttgagaaagataaactaagtgaagggggtgctatttagatatctgctggttttcaccctcattttactccctcatatgaatatctggggaaagaacattccaggcaagttcaaaggacatgaggagagactatgcctggcatgttggggactaacgaggaagtcagtgttgctggagagtggtagggaatgtgattggaaaggcagctggggccactatgagaactgggagttcattcttttttggggggggtggggatggggtctcattctgtcacccaggctgcagtgcagtggcgcaatcttggctcactgcaacgtccaccctgagctcaagcgatcctccctcctcagcgtcctaagtagctgggaccacagatgcgaaccaccacgcctggctaagtttttgtatttttgatagagatgggagttcaccatgttgcccaggctggtctcaaactcctgagttcaagtgatccgcccgcctcggactcccaaagtgctgggactacaggcgtaagccaccgcacccggccagaaccgagagtttattctaagatgagaagccctcagaggattttgagccaggagctgtctgatctatgttgcaggtgtagagtggagaactggacgtgatgaaacaaaactacagcacaaggctagttgcaaggccctggaacagtctaggagaaagagttgatggtagctttaactagggtggcagcagtgcagctctgagaagttgtgagattcaagatatgttttcagaactgaacaaaaggattggatgtagggcatagagcaagggaagaaacaaggatgattcctgagattg

SEQ ID NO: 1563873 - DNA, 4001 bp, Homo sapiens
atccttttagtctctagtcaaatcccaccttcctaaagcctttccgggtacccccataagaaagtaatcttttgtccactcaaagaaccttctgctcctagcttgacattcaccactttctatatttaattatgttatttgtacatataccttagcagccctgttagactactagtatcctaggggcagagattatgcaccggacatctttgtagcccagtatatgcgcacagtagacactcaaatttctcagtgtttactgatcaaacaaatgcaagaaacaagcagaaacaaggaatctagattaagaaggaggatggttccaagggtgtctctatcactccttgaagccatcagcagtacacctggtgttaggagttactcacccatgaaagggtcaacatgtctcttcttaaccttggtctcagagattgctgcatagtaggcacaggtcatcttaatgagccaggcagcccgcatcacaggcactgtgtatttggctaagtacccaaacacctcttccttcttactgaaaatggggacctggatggacattgcaaatagtgaggtctctattatccccatgagctgacacccatgtagcttaatatgggaataggagggtacttggtaccccatgctccctccttggcctgaaggacaggaaacagtaccttacctttttggctagttgcgtgagtggcttggtgccagccaagtcagtgaaccaagtgttaatggcactctgggatcgtgcagtcaccagccagaagttatccttctggttcacttggggcttcctgcgaccagtgtcaggaagggtattacaacgtaatttctctgcaataatgctgctgaagttggaactgatctgagggaagaaaagtgtacctcagggtgggaagaaggggcagacaggtggtcctgccttttgctgggcaaatgccaatgagatagtattaggtcatgaaggcaaactcagccacttaggttgtccctataagtcttcccaacccagggcctttgctccttcttagattcttccagccttttccttcagcctggcagagttgtctcaccttggcaggattgaagctgacgttcttggcactgccatgctcatccccagagacagcaggctggttattgaaaccttgttttacattcaaggccgtcagttcatcctgaggcaggaaagcggcgtttagttgttttttccttaggggaagggggaaggggtgggagagtagggcaggagaaaagaaggaacaaggtgaaagggcaggaggagggttccgtgtagaacagatcgttacttaaagctgggcccttacgttcacttggaccccaccctcactcccatggtcactaggattcccagccacccagcgcgccctcaaacatcactcttctcttgcgaacagccgagcagccgtaccccaccaagctgtctcagacaactttctgaggtgtgtgtggaggagggcgcctctggtgcggcccctacaccaccccctattcataccttggaaccccccaccgccccccgtcctgccctcccacgccagcccactttactcttccccctttcgggacttttgctctcaccgaaccgccccgccccccattcccagccgtcagtgcctcctcctaggctgaccgcgtgcccccggcccctccagagccccgattttcgaacgcacctccttctgtttggggtcctgagggtaaacatcgggaggccccagccgcggccgcttcaggggccggtgttcgtagctcaagatcccgaaggccgccatcttgcccagcccgtagcgccggaggcaccagcagggccaggctgactgggggaacgggaagggggagagggagccgaaaaggggggcggtggttgagaggacggcggccgagagacaacaagggggcacgttagaaactctcgaccattgccggaaactaccgagggaagccgaggtacgccgggaaccatcggacaataccgactgcagaggaggtggggcctggcccggtgggggcggagctctgtgccccgggagtttttcggcggtggcggcagcaagtcgatttcactcagcaaaaatctatgaaacgttccggaggcgcagaatgagctggggatgcaaaccagggaagaaggaggcctctgtggtgctgagttctgactggacttcggttcccatagcctagctcggttttggcctagaaaagtcttcaataatatttgcattggttaggaactccgtctattacagatcagttcgtttcttagttccggcatctgaaaaataggtgcgctaacacctccttcaaggggctattgtgaacattagaaactatgtatgcatgagaaagaacctattaaaccctgaaaggctggctctaatccctcaaggtctaccatcgagttgtctaaccttttcttgtttgtttttctgcccaagggtaccgcatactaacgtttttgattcacaaacccttaaaggtgctgatgaaagctatggaccttcttcccagaaataataataataataataataatatgcatatattgacatgcaaaatgttgctttagattcttagatcccctgaagttcatccatgtatcccctaagggtccatgaactccaggttaagaacccttggtctagctaaagaggcacctattgtgtcagatgcttttcagacactatctcctttaatctgctcacagcctcatgagttagggattattattggctcgattttgcggatggaggaagctggttttcaaagtgtgaaaattcacttatccaatattatacagctactgagtaacagagctggcactaagattctgaattccagagccaatatcctattgtcgtattgctatttgtttattttgaggcaggttctccctctgtcgcctaggctggagtgcagtggcgctatcacggctcactgcagcatcaaccttctggactccagcgatcctcccgcctcagcctcccagtagcctggactacaggcgtgcgccactgtgccggccttgtattgccttttagagaaaagacagccagtgtgctgtaacaaaagtaacaaataacaataaacaaaaataacaccagtaacaaaaataacaaaatgctattgaatcacaatggaaagaagaagtaattcaaggcggggagtggtggctcacgtccgtaatcccagcactttgggaggccaaggcagggaatcacctgaggtcaggagttcaagaccagcctggccaacgtggtgaaatcccatctctactaaaaatacaaaaattagcttgtgtggtggcaggcgcctgtaatgccagctgctcaggaggctgaggtaacatttgaactaactctgaaggatatttttattttattttattttttattttatttattgttttgagacggagtctcactcttgttgcccaggctggagtgcagtggcgtgatctcggttcactgcaacctccgcctcccaggttcaagtgattctcttgcctcagcctccccagtagctgggattacaggcttgcgccatcatgcctagctaatttctgtatttttagtagagacggggtttctccatgttggccaggctggtgtcaaactcgtgacctcaagtgatccgcccacctcggcctcccaaagtgctgggattacaggcgtgagccaccacgctcagcctgaacgatattttatttatttatttatttatttatttatttatttatttattttgagactgagtttcgctcttgttgcccaggctggagtgcaatggcgcaatctcggcttactgcaacctctgcctccctggttcaagcgattctcctgcctcagcctcccgagtagctgggattacaggcatgcaccaccatgcccagctaaatatttttttgttgttgtatttttagtagagacggggtttctctatgttggtcaggctggtctcgaactcccgacctc

SEQ ID NO: 1563874 - DNA, 4001 bp, Homo sapiens
cagtacacaggtgaaggattaggtggcttggaccagcacttggtggaagtgttgagaaatggtcagactctgaagtcaaagataacaggacttgctgatgtatgtaggatgtgaagagagaggagccaggagttattccaaaatatttggcctgagcaacaacaggaagaatggagagactagtgagatagcaaagaaggttctgcaggagggaggacagtggaatcaggagtttggtgctggagttgctatgttgaaatgcccatcaagatactgaaatgtaggcatctggatatagagtctggagttcatcagagaggtctgtgctggagatacaaatatgggaaccatcacataaagggtgtgggactataactacatacttattctacggcaataaaacagatgttcctctcttcataagccaagtcctaaaatagtaaaaagacaaccacaattcaaggaatttctacaaatcccctatggaaaagcaaattacaccaccgatagcagcagttttcaacattttttttcccacagctctatataggcacatacatgaaactttctcatggatattcttggatttttatgaaatccaacaataaatggtgcagagaggtatatcattataatagtccctaaacctgacagcgatttaaatttctcattagccatgggtaggcttctttaacactacttttttctgtcccattcaaaaaagtacaatacatcaaaactgagaatgacgttttacaggagttaagtagagcctactctttcagtcatctgcaaacaagtatctgttatcagtctctaaaaacaaattactgtgacgctttagagcctaatatctgcatactaatgtatctcaattgataaccctgatctgaagtcttgcaatagataaaaaataaaattctgattaactttttctgaacctgggttataagatgtacaacagagtcccaaaatgttacggtgccttttcttcacacactgaaattcgttagtatattctgatcctattctgaagggattaacaacttaatcatgccccaaggcatttcatgggtaactaggtgatttataaacccccttcatactccaagaaataacagactacttacaaaaaaattttactcacactaacttcattaagacctcaaacactcaaaagttccagaaaaaaagtactttgaattcaaatttgtattttatacacaacgtatgtagctcctgcattaacttagaagcaataacagcttacatttaaaacgtatcgtcaagaggctgtaatacaaatttcccatctatagagttttttctaaaagctcgaatattatgtattccagccaagaaatcaagagagttctgttgggaactcggacaaaaatttcacacaattttcagtggaagtgtaacaacacgcaaaattaacaagtctctgttgcatcgttgccaggaagaccccagatacaaagcttcttctccacctctgctgaaccccaggagttcaaaaattctagactaagcagtccagcggagaacacagcagcctctcggggagagggaggtgcaaacgtctcagccggttgggcgggaaggggggctggggaacaggcaggggtttcggggcacttacaggtccgtcaacaccataagctccgagtaggcccggtgcagcagaaattcaatgagggtgctcagccggtagcccgggctagccgcagctgcagcggccgccgccacggcggctcccgggggaggaggggctggggctgacgggggtccgccgctgcccccgccgccgcctccgggcgggaccagctggtggttctccagctgcactggggccatggcggcgcaggaccgggcttggcgcaacggcacacgatgcggtcctcgagcctcccgggcgctcggtcaccgcgccgaaacgggagcgggcagagtcgccaccgcctaccgccgggccgcctcagaacaggaagccgtgcgccgaccgcggaagcccgcccccatgtagcgagaagtccgccgaccccagggacaggagcgaggggcggggggaggcggggatgggggggaagcagggcggccccgcagaggggaagctgcgcctccgcaaacgctcagaagcagcttcgccagacagccgcaacgtacatgttgactgcccgaggcggaagtcgatcggcagagcggaagggggacctgcagaggaccttccgacaggtctgtgtctgttctctcagctgtctagcaccgcagcgctggggggcgcgtgggagtgaggcggtacctgtgagcgcgcgggagagcggaaaagggagccgcgcgccgccggaaaccagggtgagggctgagccggagtcgtcaccgggaacgtcagcagttgccccgcccttaccctcgccgctctccctcccgcctccgccccctggcgttgtaaaggcgacaatttgcccagagaaatccaccatcgcttcctaagtggggcacaaacacagccaggggaggcctcctctaaatgttcgtgaattctggttctggaatcgcgaagaaatgggagcggccgcgcgcttgtgattctcaggcctttgctcctcccatacacgtccacggcgcgttacgtgggagaacgttttcgcccctttttttttttttccaaactgtgggaaaaggtgctagaaaatatgattgcgggtagagacagggccgctggcagagtaactcaattttaatagagtcgggtgtatgctgaggtcgtcaccatcccccaaatcctgtcagtcccacacaaaaacggcccttaaatcccctgccacgggctctcatatagtttttgtccttgctcttgcagtcaccgctctattctgaagggcttttcagttcatccatgcctaccgacactcccgtcccccccatcaaagtccacgtttaattttttgtacctgctttaaaacagcgattctcaaccttggctgcactttgcaattatctgaggagctgttttttaaaaaaatacttagatatatgggttccacccctgtagattcagatttaattggtctggcttgaggtctgggcttggggaatttttgaactttcctaaggtgattctaacatgccctaacgtagagattcactattagaagcattcgttgctgcgacccctttcaaacatctttttgcagtttcatctcctcttggtgtaagagatgttcatgatgttccctaaggttagaatattcttactgtcatcacttgggtaattctttatcattgttgaaagcggttcatctgcttctgaaggtgtaagctcacttgttccctcccttggtggtcctaaagcacattgaaacagaatatcattgtgctagttattaaaatgcattgggattatttataccccttacagatacagttgctggaaggcagctaccttatttttaaatattatttttatttttaattgatagtatatacttatggcatacaatgtgatgttttgaaacatgtaaccattgtggaatgagcaaatcaggctattaacatctatcaaatgatatacatacttacttcttttggtgagaacatttaaaatccacttttagcaactttggaagatacaaaaggttattgctaattgtagtcacattgctgtgcaatagatcaccagaacttattccgcctatctaactgaaactttgtaccctttgactaatatttcccctttctccacccactgtcctacccggcctctggtggtaaccaccattctactctttactttttttttttttttttttttttgagacagagtctcgctctgtcgcccaggctggaatgcagtgacgcgatcttggctcactacaacctcgcgtcccaagttcaagcgattctcctgcctcagcctcctgagtagctgggattacaggcacgtgccaccacgcccagctaattttttttaaatttttatatttttagtagagatg

SEQ ID NO: 1563875 - DNA, 4001 bp, Homo sapiens
gggcgacagagcgagactctgtctcaaaaaaaaaaaaaaaaaaaaaaagtaaagagtagaatggtggttaccaccagaggccgggtaggacagtgggtggagaaaggggaaatattagtcaaagggtacaaagtttcagttagataggcggaataagttctggtgatctattgcacagcaatgtgactacaattagcaataaccttttgtatcttccaaagttgctaaaagtggattttaaatgttctcaccaaaagaagtaagtatgtatatcatttgatagatgttaatagcctgatttgctcattccacaatggttacatgtttcaaaacatcacattgtatgccataagtatatactatcaattaaaaataaaaataatatttaaaaataaggtagctgccttccagcaactgtatctgtaaggggtataaataatcccaatgcattttaataactagcacaatgatattctgtttcaatgtgctttaggaccaccaagggagggaacaagtgagcttacaccttcagaagcagatgaaccgctttcaacaatgataaagaattacccaagtgatgacagtaagaatattctaaccttagggaacatcatgaacatctcttacaccaagaggagatgaaactgcaaaaagatgtttgaaaggggtcgcagcaacgaatgcttctaatagtgaatctctacgttagggcatgttagaatcaccttaggaaagttcaaaaattccccaagcccagacctcaagccagaccaattaaatctgaatctacaggggtggaacccatatatctaagtatttttttaaaaaacagctcctcagataattgcaaagtgcagccaaggttgagaatcgctgttttaaagcaggtacaaaaaattaaacgtggactttgatgggggggacgggagtgtcggtaggcatggatgaactgaaaagcccttcagaatagagcggtgactgcaagagcaaggacaaaaactatatgagagcccgtggcaggggatttaagggccgtttttgtgtgggactgacaggatttgggggatggtgacgacctcagcatacacccgactctattaaaattgagttactctgccagcggccctgtctctacccgcaatcatattttctagcaccttttcccacagtttggaaaaaaaaaaaaaggggcgaaaacgttctcccacgtaacgcgccgtggacgtgtatgggaggagcaaaggcctgagaatcacaagcgcgcggccgctcccatttcttcgcgattccagaaccagaattcacgaacatttagaggaggcctcccctggctgtgtttgtgccccacttaggaagcgatggtggatttctctgggcaaattgtcgcctttacaacgccagggggcggaggcgggagggagagcggcgagggtaagggcggggcaactgctgacgttcccggtgacgactccggctcagccctcaccctggtttccggcggcgcgcggctcccttttccgctctcccgcgcgctcacaggtaccgcctcactcccacgcgccccccagcgctgcggtgctagacagctgagagaacagacacagacctgtcggaaggtcctctgcaggtcccccttccgctctgccgatcgacttccgcctcgggcagtcaacatgtacgttgcggctgtctggcgaagctgcttctgagcgtttgcggaggcgcagcttcccctctgcggggccgccctgcttcccccccatccccgcctccccccgcccctcgctcctgtccctggggtcggcggacttctcgctacatgggggcgggcttccgcggtcggcgcacggcttcctgttctgaggcggcccggcggtaggcggtggcgactctgcccgctcccgtttcggcgcggtgaccgagcgcccgggaggctcgaggaccgcatcgtgtgccgttgcgccaagcccggtcctgcgccgccatggccccagtgcagctggagaaccaccagctggtcccgcccggaggcggcggcgggggcagcggcggacccccgtcagccccagcccctcctcccccgggagccgccgtggcggcggccgctgcagctgcggctagcccgggctaccggctgagcaccctcattgaatttctgctgcaccgggcctactcggagcttatggtgttgacggacctgtaagtgccccgaaacccctgcctgttccccagccccccttcccgcccaaccggctgagacgtttgcacctccctctccccgagaggctgctgtgttctccgctggactgcttagtctagaatttttgaactcctggggttcagcagaggtggagaagaagctttgtatctggggtcttcctggcaacgatgcaacagagacttgttaattttgcgtgttgttacacttccactgaaaattgtgtgaaatttttgtccgagttcccaacagaactctcttgatttcttggctggaatacataatattcgagcttttagaaaaaactctatagatgggaaatttgtattacagcctcttgacgatacgttttaaatgtaagctgttattgcttctaagttaatgcaggagctacatacgttgtgtataaaatacaaatttgaattcaaagtactttttttctggaacttttgagtgtttgaggtcttaatgaagttagtgtgagtaaaatttttttgtaagtagtctgttatttcttggagtatgaagggggtttataaatcacctagttacccatgaaatgccttggggcatgattaagttgttaatcccttcagaataggatcagaatatactaacgaatttcagtgtgtgaagaaaaggcaccgtaacattttgggactctgttgtacatcttataacccaggttcagaaaaagttaatcagaattttattttttatctattgcaagacttcagatcagggttatcaattgagatacattagtatgcagatattaggctctaaagcgtcacagtaatttgtttttagagactgataacagatacttgtttgcagatgactgaaagagtaggctctacttaactcctgtaaaacgtcattctcagttttgatgtattgtacttttttgaatgggacagaaaaaagtagtgttaaagaagcctacccatggctaatgagaaatttaaatcgctgtcaggtttagggactattataatgatatacctctctgcaccatttattgttggatttcataaaaatccaagaatatccatgagaaagtttcatgtatgtgcctatatagagctgtgggaaaaaaaatgttgaaaactgctgctatcggtggtgtaatttgcttttccataggggatttgtagaaattccttgaattgtggttgtctttttactattttaggacttggcttatgaagagaggaacatctgttttattgccgtagaataagtatgtagttatagtcccacaccctttatgtgatggttcccatatttgtatctccagcacagacctctctgatgaactccagactctatatccagatgcctacatttcagtatcttgatgggcatttcaacatagcaactccagcaccaaactcctgattccactgtcctccctcctgcagaaccttctttgctatctcactagtctctccattcttcctgttgttgctcaggccaaatattttggaataactcctggctcctctctcttcacatcctacatacatcagcaagtcctgttatctttgacttcagagtctgaccatttctcaacacttccaccaagtgctggtccaagccacctaatccttcacctgtgtactgcaatagtcagttcactggtatctctgtagttcccttgccccttctatagtttcttctccacaaaatagccaggatgattcttttaaaatttctctgcttagaacccttcgatggttccccatctcactgagattaaaaagtgttgataattgccagg

SEQ ID NO: 1563876 - DNA, 4001 bp, Homo sapiens
caatactgggctgttttccaacttcacgtaaatgccacaacaaactaggcatgggaaaaaccattccaagctgggggaagcaaaccttaggcataaggcacggagactgccatggttcctgaggaattgtgtgggaacagggattctggaaattgagctcagacaccaccgaggagaggacaggtggctctgcacaggatcaaataacttctttgttccagctaaggacctttgtcaaaaatgttttgcgttcctctttttccttttcaatcctttccaattacccttctccttccttttcctcatcccactttagtagacattaaaagtatgaggttggactgtgagtttgcagaacttaaagacgtcctccccacagtccctaccaaggcaagggcaattcattgcaagcagacggcacttgctcctccgcaagtgtttttctgcactcactgaaacttgccaagcctgcttgctgagcgaacaagcgagggggcaagaaggcggagggtttgcgctgaccattcgaagggggctctgcttcatctcccaaggctgtgggaaagggacagaaagttcgaaacccctcccctgcgctcttaaatggaaagctcacttcccccaaagtgtgcagggtggcgagcacccaacccacttagaagaaaaagtgaagagcttttccggttgcgatacagatgctaactttcccatccagatttattcagagctggtaaaagcaatagcattcctcttgaaatccctgcccttccaagcctattggcatgtttttccagccttgttttctccttatatgagtattgttcttgatatttaaatattgacataaaattcttccataactttgattgagttgtaaatcacaccctctccttggcttcctacatccactttttctttccttttcttgcttaacagcaaagctataaacctcttcctggactgataaggaattttatcatcatgccccagagccacagaagaagctgttggtttagaattcttttcaaagactcatttaagtaatcccccagccctttctccgctcactactttcagggctgccttctcacgtccagaagcaatacagtttccaaactgctagaacagaaaaacaaatttgcatttttctggaaggactgtctgtgctcatttcaagctggttccgccttctccgccagaaacacagtaagtgctcagaatgcgaaaccaaaatgagataagaggccccgtgaaattctttttcaggacattcagctgtctttattctagcccaaagcatagggtagaggcactaaaagctcgagatacatcctgcacgatacattccagcggccgcaaactggaattgatttacatatattctacaaactgcttgtaagccctttacaacgactgcctgacatcaaccacaattagaggcaaaagtgggggcgggtggcgaggaccagaccggggtggctcaggtaaaatgtgcttctttggttgtcttaggaaaatgcagccccgtctttccgccaaacgcatcgactacggccaggcgcctgctaacccagcaagctctccgcagtaacacgtcgcaggggtcccgggcggcgcccgccccctccgccgccagcgcaaccgcctgagcttacctgcctcatgtttagaatcccatgacccatccggcagggagcgagctgcatcggagcccgcgtcgcagtcttcagagcggaaacaccgaacccgacaggagcccgcaagacaaaagcaacccggcgaaatctacgggcagcaaagagcacgttttcgtcctctttttctttgatctgttgctacacgcactctgctcgagacaatgtcaagtttctcaaccttttctcccccagcctatgaaaagtcggtcgcagggaagcgaggaccgcctggctcttatttcaaatcagttctcagagacgttgtaggtggctggcttgggccgcggaggagcttcgccaatcagaagcaagggggtgggtcctgggagccagaaaggctgcctccgcgaggattaggggcgctttcgggattcaaatgactggaagcagctggaaacaatgtccaaagctccaaaagtaaaggatgagttctattcttatctaacagctctagttctgctaaaagcttaactagctaagggccttaaatccttgcattttaagagctccctaacagcattaaaacatttggaaggtgcaaaattatttcagccagaaaagttcaacactcaggacccaagggtatttttaaaaggatatcttgcactgaagccctacttttgcaaaagactggaaaggaaaccaaattgttatgagtaacaccttaactaaaacgaacaatccagaaaggagggtgttacctacctcatctgcatatagattaactgtatattcaatttaagaaaaataaatcttaatgggaacgtgcacacaatttttttgaaatgcagcaaatgaacaagaatctttacctactgaaggcccgaggcataatttcaaataacactattgtcatagaacaatacacactgacattttgttcagaaaaaaaaaaatttagtgcatccacctttctctatggtttggcttccctacagggttgatctgttgaacttattaacagggacaagctggacatcaccttggcaggattgcaggagagctggagaagtagttggcttcttagaaacaaactcagaccaaaaaaaatttccaaagtttgctttcttaactccatataagcaataacttttttcaactcttagccaacatgattttaatgtaaatctaccttctggatttcaagaaagtgcaagttgagcaaagagtactttgtgtagaactaatggcatattttcccccaagaaatgaccgcaattttgtgacgataattcaataaagattttaaatgtgttggtatcagaggaaaaaaaattacttagcaaataatgcattggtggcttcaggagtgtcagctgcatgggttcaatacatgtgagctctgcccagttctgtgaaaatttggtggtccgataactgggcctggaagcccataacgctagccccctgcctgagtagcctaaggagccacctagtgacacaaactgacttcagtccacttcttgtacttttccttgagagcccttcatatgatggagttcaggatttctcaatctcagcactattgacattttgggcaggataattctttgtcgtgagggctgtcctgtgcactgtaagatgtgtagcagcatccctggattctgcacactagatgccagtagcacccccacaatcgtgatgaccaataatgtctccagacattaccaaatgtctcctgggtgatgaaatcacgctttgaaagggtggttcttaaacttgagggtgcaaggaaacctctggggagattgttaaaaatgcaaatctccaggcccctgcaccaaaataatctgattcagtaggtttgctgaggagcctgagaatcagcattttatcccactgacaaaggactctgatttactttgagaaatattgcgtctatcccagccctaggtatgccccagccacaggacacaggaagctacccagggctcctgccattaaatactggagcttaatcccatggcacatctgtttatcaccttcagtagaagctacaactgcgtctgccttctgctttcatcacctcaaaggtaaatatgagctgggatttcctctctcaaggactgagcccttttaatgttccttccatttttattctcctttgactcactcaccaactatccaacaatctcaaatgtcaccactcattcgtgatttccccaaatgccccaagaaaaattaatcccttccatcttctatgcccttaaagcaaaatacccttataaaagaggtttcagagagcctatttgccccttctgccatgtgaggacacagcaacaaggagccactgatgaagcagag

SEQ ID NO: 1563877 - DNA, 4001 bp, Homo sapiens
aaataacagaatggaattagggagtaagaagcaacatttgcccaagaaggctgtgtgcatgagctgattctttgaaaatgttgaaggaaacgtgtacctattctttctgactctagggcagcttcctcatttcttctttccaattagaactcctctgcatacagacaaagaatataaagttcttcaagttccattttcctcacttgagtgtgaacactctcccctcctttcacagtgtcttgaacttgcgctaggtactacttggatttttaacagtggcttggatctgaacggctcttgttacaaaacaggtgatacatacaatggcaaaaatacattctcacaggaaacagacaattgaaaaatttccagaaggaccgggtttttctctcactctcctgaagttgtaccccccaaactaatcaaattgagatagaaatgctttaaagatccgagtatctgatagataagtgcattcctctatggggtatagtttttgcgtgggcatgcgttttgcttaagtcagttgctcagaagtgatgctaatcaagtttgggaaaagtaaaattgttctgtggctaccagccctttgtaccagaaacagcgccgtcctcatacaccagacagagacgatgcaggacgtccgcagagtcactaaccaacttccctcccttctgacccctgcgcttcagtaaagcaattacagtagcatcccagagcagtagagaataaaatgagccttaccagtttctcctagtgtggacgaaaggaaacaacccctcagctgctctaggccaggcaactgggtctcagacttacttgactgaggggactctgaaagctgaagtcttccttccctctgtttgatttcttcccagcaacctctcccaggatttttctcacaaagcactctcctattctctaatcctctcacaaggaaaaccagcacacacaccaaatgacttctgcagaagcgcctctcctggggagctaggaggggaggggtggaaggggggtgtttgctggcattcattcctgccaggcgaatcctcagggagtcatggatcccagccctctggactcctcatcgactggaatacgataggtcatggcgaggcacggaggtgtgcatttgcttcttcctatatctccaaaccctggtcactatccctcagggatgggagaggggacacctcagcttcaaacttcatctgagtcttatgaccctttatactccctcccataacagagtaattccaaacgagttatgtagaaatcagctagacgcttcccaaatctatctggcacctcattttaagagcccttgacaatttatagcagctgcttgtttttaacttatccaaaagctgaaaacagattgcaaacatcaagaaaaggtggaatatcatatatgaaaaagtgatcgatatgtactatcaaacatctggaaaattactgtctttatgaaaattcatttttttaaaaatcatgtttctaaaataccaaataaaattgctaagttgtaaggcatgaccttctttaagatatggattttaccttatcttcccaggacaggatttgcacttgcatttgaaaataatattcacactttataaattcaaatcctcttctaacttaaggcaaatatcttacatatattccagatatgctataatcaatctggaattcccacttacccctccagtttttaaaaagaagacttacctttttattacgtcatttaaaaccctgaaacgaataaaccacagtggagacaagcagatggcagtcttctacattttgcaatgagggctgtttgccttggagtcattatttctaaggagacgctgctgtgcttgtgcctgtgttcggcagcatgccatttggggctttgaaacaaaatgaatcagcttcacaccaccagctccactacatactaacacttcagaatacccaaactggggcaggctgcctctttcatagtgaccctgcatagaatcagaggtgacggtttgatggatgagtttcccaagagacaatgcaatctgtgacatcacagttctggccgcaccccccaccccaggcccctgtcctgcctctcctctccagaaaaaaaaattgcctctgcttggtgacaatgccatctcaatagcaaaaatgagtctgaggtgcatagcaaatgctataacttagctatctttcttaacctcagttttctgattcccctttgctggagtaatgggagtaggatgagatgaacatactaggcagagaattcagacaaaaccaaacaaaagcacagaactcaatattctaaaaagtttgtaacatgatagcagaataataaccttcaaaaggagcactactgaacactagctcaatgatactaatatctttgttatacgcaatttaagacattttgccataaaattatatgtaagcaactacaaaaatacttaaagtgtctatatcatgtgtttcagccttactagaactcatttagcatcataattttcttgatataaaatagtttcctttccctccttttccttggccattttgctctattctcagttgttctctgtaccagtacctgccaccggtcttaacatttaaaataatacctggataatccatttgaattttggatacaaacttacttgtgagtaaaagctctaatatctttctgactctcaccatcacctctatccttttcacctacattcatctcagatgtccagtacaaagagagtaaaaaatctagaagatatttatgtctgtatctatagctacacctatatatctctatgatcaataaatgtatctacataaacattttaaaaaccttttccatggcaaaataaaacagcatatgtcaagtcaaaagaaataatgaactgggacagagggcccatctccttcatgtttaatgaatgcctaaacttggaaaagagaaaaaaacctaccacccaaaagaaaaacgggcaaaggttatgaaacaaaaggagacatataattagtctttaaatgcatggaaaggtgttctttctcacttgcaataaaatcaatgtaaattaaaactacaccgaagtataatttattgcctgtcagagtggactaaattcaaaggtttggctcatacaccattgatgaggctctggggaaatgggcacttttataggttgctgctgggagtataatataccaccaccaatctggggttgggggagagatttggcaatctaacaaatttatagatgcatggacccttcctcccagcaatcccacttctaggcacctattctacacaatcaccagagaaagcaagaaatgtcatattttcaagcaatacaaggaacccacacaaatgggcagcagtagattgactaatctgtggcatatctatatagtgaagtactatgcaatggcaaaatggaatatcagatctctatgtactaatatagacagatgcccaggcaatgaaaacaaagtgctgaagagggcatggggctgagggaaataagagaggtgcagtgggaggatgaagtctatatatgcataggcttgtatttgcaaaaacaggaactctcgaaggatcaataagaatctaataaagatagtttcttataggggaagggaaggattgtggttaaaagggcagaaacagacgtgagattcctgtaggtttactcatcctcttatgtcaggagtgggcaaactatggtctgagggccaaatcgatcctttgcctgttggtataaataaaggtgtattagtacacagccatgtccgttcatttgagtattgtccatggctgtgtttgtgcaacaatggcactgttgagtagttgcagtattgaactgcttggtccacagagctgaaaatgtttactctctggccctttccacaaaaagtttgttgacccctattgctgtgtaatgagttttagcataagtcaagagacaaactgaagaggatgggatagacttccgtggtttcta

SEQ ID NO: 1563878 - DNA, 4001 bp, Homo sapiens
atatcctctggactatagagactaactttattgttaaatttaccaaaacataactgagatgacaaacacactgttaaaattgcacgatgttacagcaagccacacgaaaatggtttcagaacaggaagctcctataagtatttcaaacaacaaatagcattgaaaatgtacaaatgaattatttgagagtcctaaatttcagaaacgaaatcaagtcaatttacttgattgtccgctcctcttaacccctattcacctgggtaattagatttagttgactattgctgtttggatttttgctatgagattatctttattatagaactataggtgaaatattttttaaagactgcagagtgatgtttctatcttggaccagcagaaatacagactttcagaggactcaaaactactgaagtgtgaaacactggaaatcaacctgagtttgggaggcagattgcaacggggacccaactcagaagggacttgctctcatcttaaataagcataatttctcaactcaaaaacttgtctaacacaaactcaataaaaactggctgctacatccaagatgaattcatcatagggtattttgaataacataatacaagcactcagcatctgcatattcaattatgccatttagtatttgactttgagtgataaagaccaccgaataaagacactacccaaatgttactttactgattagcactctggccaatttgagaagcaggtgggttagcaaaggcacagtaaaacagggccatgaactgatggaaaaaggggagaaggggatccagttggatttaactgcattctgaaagactggaaattgatagcataatgtaggctgtttcagtacaaacgcaaagtggttcttaaaaacaacagtataaataatacatcaagtaagaacaggtgaaaaaaggtgatccagtaacattttataggtaaagaatgttactctgaattatcactgcatttagcctccaaatgtcagcacactcaaattcatttgctcaaccagtaacagacaactaagaatttctgccaagaaaattgtaggggaccagagggactgtttgaaaaaaaaaagtgacaagcagatgagcactgagatgctagcctcaagttttaaaataattaatacaatagatattttgaataacttgacatttcttctttaagaagtgctgaaattattattattattattatttttttacctcatatctgaagtgagaaccagggaagacttttaatttcgccaaacacccacctggtggaattcatgcaaatcaaattaaactgttaaccaaatcttttctgtactttcacatctgcctataacatgctcattcttagtaactggatctctaggacattctttaaaataatcacatactcgcctgaccatgcaacctgattaataatgaatgaacattcctgagaagaatcacttcgaagcatggcagatgtctgtggggatatgaaggctttaatgatcaaaattaaggggaaatggaagctgggtcacactgtctggttattttaattgaaacctagtcttccaaatttacttaacagaatacttaaacactccttctcgaggttcatttatacaagcagacaagcacaaagacaaatggcaatgcaaaagaacaacccagattcctggaggaacaaccaccctatcctgttctgtcctaatagtgcagaaaacccctcagcagtttcagaaatccaatttgttcaattgaaagactgataaacaggttaaaaacaggaactagtacattggtccttaatagttctttgagcacctctctagattctgacaaagagatcaccttgaatacccaccaatggactgcacactagttctttttgaagaaacatcgccgtaggcagaggatggggacccacgaaatgatagacaggccaccgagaccagacggtgggtggcaggcagtgctggagcggtcctgtgtgtctgtgagtgcgtcaacagtgaaacacaacaggaaaatcggtccaacaattccaggaaggccagctccacctcatccactccgccagggttgcccgagttgaagaatcaactgccttttccacggcccccgccacaacttccctatcctctggcctactcaatgttcaactgaacccaaatggaaaggtagctcaggtcagctcaacacccactgcctggtccaaaaaaatgaggacttggcaacgggatctgtactctcattccttacagggaccagcagcagcttggccgaatgagacactgtcctgtggcagaaggctgaatgctagctttcaatgccaccaataggagccgtcctgcccagctcctggggctgggaacaggcactagactcatttgcctttggggcctttcagtgtcgtactgagcacatgatcacattatgctctgcatgctggcttgttcatttaaaaaaataatatacacattattttgtgcctttatcttctgaattaatgtataatgtctggaagaagttttcttcaaagttatatcaggaagaacaatctccagtacagacacaaagaacagtcatttatttcttccaaaaatagtgacctaaatagcaatctatcatcctgataaacaatttaaaatatatgtatatacacacaggtttcacatacacacgtatgcatacattatgtacacacatatataaaaacatcgtgtgtgtatatatatatatatatttaatattacatacacggtatatatataatagcaaatctgtgatgggtgtccaaaatttcagtctccagaatggcaaagaaagggtgaactgagaatggaaagaagtaatcttttaaaatttgattgactaaaggaggaaggggaagtagtcttcctaaaagaaaaaaaaaaaaaaaaagtcctgcgctgcagttctttgaaggatattgcttatcaccatgcaagacaagaaactgcaagtaaagtaaatcatcaggaaagtgtttaaaaaaagaatcttgcacaattcaattcataatccagacatttggactccaccaaaggtgtttaaggaacattcatgataaaggggaagcagaggcaagaactgcttcctcgggctgcccagtctgcacgtctcaacatctactttattgccattgcaacacttcacagtaaatcaaagcatgcttcacatgttaggacataaaaatgcaaacatagattttttggcttatgtctctccaaattataacttcatttgtcttttaacaatgaataaaaggattactcaatttcacatatagatgacttccttaagaagttctcattgtcctcggaagagacacacatagatcatcaagtagaattctaaagaacttttcatcaagacatggcttttgttaaaacaacatttaaattgtcaaaattctacaggcctaacttttccctattttggcactgtagtggaaaattagcctgaacatctgaagttgaaacatcaggaaagaaatatttactccacccctcaagagaaaatgataaacaacaaaaaaaattacaatcttctaaagggcataatctgacaacttgcagatgaaatttcccactatctgaatgtctcagacatttcatgtcttttacagtttaagaaataaagcatttagttttaaaggcacacagaacctattttacattatattgaaaatgaccgatgttttccaggtctatgctgtactgggtatcatgcaagaatttggttctgaaggcaatgatagcagactggacagagaggaagagggtgagagatggccacacctagtctcctggcagaagtctaaatcaaccctcctggtgaacagaccaacagcgtgatggtagcagaaatggaagtcactaatttctgtgaaaccagtcacagatgaaaagcttttaacactgctgtccctgaatgctttctcaaatgtatttatagtttgataggtatttctat

SEQ ID NO: 1563879 - DNA, 4001 bp, Homo sapiens
tacttagagcttttaatttatacttcctttcttttaattggtgtcttgtgatctaaaattagctgatgaacatagtatctcactcaaactctctcagctgagttttcaataattagacccactgttgcctgaaattgaacaaacatgtggagacttggcttattatttcttccctagtgctttctatccatacttagagagtgattttttttttttttttttttgagagagagtctcgctctttcacccaggctggagcgcagtggcgcgatcttgggtcactgcaacatccaccccccagggtcaagtgattctcctgcctcagcctcccgagtagctgggattacaggcacccaccaccacacccggctaatttttttatttttagtagagatggggttccaccatgttggccaggatggttttgaactgctgacctcaagtgattcactctcctcggcctcccaaagtgctgggattacaggcatgagccaccacgccctgcctagaaagtgatccttttatttcacatatagtcatattaatcattatcccccaagctggagttaggttaataatttcatgtaaaaaatgaagttcaaatagtcttgactgtaaccttactgaataaagagcctacacgaaaaggaattctttcgtgaaacctgagattgtcagagcactgaatttcaccaataagctggatatcgtttatacaaggaataaaaggtcacgtgtcctctaaaatcccacatttgctacagacattcttccctctattcttttgtttgtgcagtaactagatacaggtacaatgagagtgaattagttttcccagatgagtgagaaaagtaagtgttccccaaatgcccaaagccagattttatctgtcattctctctctctctccctctctctccctctctctccctctctctctctctctctctctctctctccctctctctcagagagaggcagcactctctttggaagaactgtaaggattgaaaatgatccagaaaaactgcatggattgaaaatgatccagatttttagaatttgccctcaccttgacaacgctaaaattacaagcagcagtcaacttttacaagatacccttattgtgtaacatttataggttgccaaaaacatgctaaaactaatcagataacaaaggtgaggagaaaaccttcacctgccatgtagctagcagtgaatacactttttatttccatgacattttctggcagaaaggggttggcttaaggcggatcggactaaccttcaatttgtcatagcgctcactcaaagctgccacctgatgatcgcggtgccgcccaaccagtttacacaaggcacagattaactggtcatcggtcacacagtacatattcaccttctcatcctcatgctccaagcacatcagcccccggatgtgagagtccggaattggctcaatcagacgatggcctgtaaagggcttcttattcgggtgagtggctttcaggcactcgtcacagtaggatacttcacaagtgacacaggtcttcacagcgtcctgggcaggatcctggtcacaaaactggcagaggaccttctcggcggaggtcatggtgttggcgtcaaaggcccgctcccgacgggtctcgctgggagagttgggcccgctcactgatgctttctggaacctgtcgatgatgttctgtagggtgacgttgcgcttgagcccgtctagacctcgctggctgagggtgatgacatgccggcaggtggggcactggaaggcggtgatggactccacagactcgttggtggcacagtgtgatactaggatgcggtgggcgcagttgaagcagaggctgtgtgcgcagggcagtagaagagggtcctcaaagagctccagacaaatagggcaggtcagttctgactccagtgtttccatcttcaggcaaagctctcttgtgtcatcagcaaaacccaaggaagctgatcagctatctggaaacaagaatgtaagatttgattaggcacagggaggtcaaccataggggggtgtcagctttgaatgcatctcagaataattccaaacacaggtcatgaaagggtaagtgtgtgtacattccaaataattctctttctattcactggggaaaaaaggaggaaaaagcatcctgagccatcatataccagttaacattttctcaaagttcagtaactgaaaatgtgcaattttttttttcaattttgttttttaaaaggcttcattcaaaactagaatgtaattgaaactgtaatttccataatttgtatttaatcagaataatcttattgtgtcagagtcaggtttaacctcgcacagaaaattaaaatgtagaaatattcatcaataaactagagtcttttataaatttgaatttataaacttacgtattaatgtatacgagatttaaggacttttactctgcaataccaaaccaggtttcagaacaataggaaggcagtaactatagaaatgggcatgaaatgtacatgaaatcaaatgtggggatttcagcagagatgatcgtgtttaagtgtgggatgtcattttccaaaatatattcctgagaaaaaacattgactttcacaaagatgattgtgatagaggcaatatttttggcatgtgttcattatgtttctgaataattctattgtttaatccagcagtgggacgtgggtaggcagaacgaagtggagaaaaatatctgggggctttttcagtggctgcagtaagtttgagtaccaatgactaatatttagagcaatgatttagttaattagaacaaggatttcagtggtcatcatattcatgtgataagttatgttatgacaatgataatgattacagttgagaaagcaatttaaggaggcttacaaaactgctgagggacccttttggccaaaaaactcccaccacgggcttgtcactgttgccagcaacaggccaggctggcaggaggtccagcctcacactcagagctatgttggcctgggtacgacctctgctagctatgttgctctcctccaggccacccgagggtggcccagctgcctgctccccttgccataaagacctgagtgcttttgtgaactctcatctgccttcccatcaaaaagagtagtagaaagaattccacacaaaccccagttcattaagggtgaagaggcctcatgctcattagcaggcctgggaaccaagccgctttgaaccttctccctttcaagaccattagcagaggtctgcagaccagtgatgggaatattacatgcagcccattgcaggctgtgggagaacagtgcagttcacccagtggtcgggaggttcaaatcacccacgggggtggtggggagagcgttctcagccggatttatgggaaggcttcacatccaaagctatgtttagtgattctgacaatcaatcgtttgtattcacacctccgcttatttacaaaattcacggtttctagaataccctgaccccttctgaaatagcatccctcagaaataccaatatggtgctttggtgaaattaatgctcatcttgctaccaactgaatggtaactgatcattaaaagtataaagtatgtcccgagcctgttaaaaattaaacagctactggcttcataaaagcctggtatcttaaaaaatcttcaaccattcactagcatttattatataggaaagaataaaagagcaactgtgacttgaaatattaaagcttgtacatctttctacaacctgcaatggaaaccctagggttgctgttgtaagaaacatatcatccccacttggtctgtcacctcttcctacagatggctcagaagaaatggaaaggtttttacctattaataattattttggttaatcatagaaaaaatgtagaattatctttaaatcaaagttcttttaccttctcatcagaagcatataaattaaaggaaaaatgtagcccttttggt

SEQ ID NO: 1563880 - DNA, 4001 bp, Homo sapiens
gtgagactcccagtaatctgcagtaattcatatgccactggcaaggataattctaaacatgagatccaaaaaccctatgcatacaccgcccccttgccctccttaccccaggagacttatctgtctttctggttatatattcccttggctgttagtgtaattagtgtataataactatgtacatatcaactcacaggaaaaacggcagacgtgctggctgatttggcttggggccatctcatcagcagggtgagaaaacctggtattaaaccatctgttattaactgtatattctaaaacagtgttttgtgtctcctgggttgctgactcccatcgacagcaacagaatgtcaagactcatatttttctgagcagcactgaaaagataaactttaaaacatttgcattgtcccttctgttctgcggcttgtgctattaagaattttatttactaaagtgtctattgtattatacacggtgcttttctatgtttcattctcacagaggtgaacaagtttcatttaaactgtgtccttgcgaaagttatgctttctagagtcaaagatcctagagaaaattggccatagcttttgtccttatgactaggcagttgccaatgcctgtttgaaatcaatagtctcactagggaatggactatgacttgcattttttaaaaacgtggtcattttctcaaatctccttgtttgcactgattacttttctttaaattaacttaagcaattaatttcataatatcagaaatctgaaattgagtctttgtgccacttgttgcagtcagtagcacaaacctgctcccaaaactcaggataaagtctgtatatgacagaaaacaacagtattcctttgaaagacgagcagtcaaatcattcaacacaattatccaagttaattcaactcaaaaaaccacatcaccatgaaaaaataaaaataaatttttttacctgattccaaatcacttttgacagctataaaaaattgactttctttgcaaaagttttacctatgccccagaactcagctgaaacattttttttcctttcccagttgtctcttacaattggctgttcccaagtataattaaaatttccctgcaagtctgttaaacactttcacatttccatgtttaattacattcagattgagatttttgtacacatatagaatatagccagattttaactcaattgaccacaatacctttgacataaagcctttattcaccgttctcgccatatatataaatagacatacgctccttgtcaaaacgcaagagcgagtttctttacattgtctagaacaaagaggccagctcggcttctatttttcctcagtgtctcagaaggtgtcctttattacatatgcaggatgcaaggattttgctgctgcgtgaatgaaaaatgataccttcagactgcctttttagtgacaaattacgcttttgcagaatatcacactgcctgtggttttaaaaaccccatttagatttactatcacttccttggggactcagccttcctcacaaagcaccccaaggctaatttccactgttttagagtgtaacaaagatgagaaagtttgctcatcacgacagtatagaaacgcttgcctaggaaaaacactctctggaatgtctaaagtgctaaaaatcattgcctctgtggattttcggtgtgcaaaacaggcagaaaaagttgtctggaggtattcgcaaagcattgtatttgttcaggaaggagctgtggggttagaggctgagcaacgcctcttactttgcttcctgggtgagagcagacaggcgtgccacttagcagaagcaagcagagagagagtggtaagactcaccagcttccccatttttcccaggatgggggtttttgttcctcagttctgatctggaagagacaaacctgtaggtccttcaagcaggctgggctggggcaagtgccggctctttgcctcggatcagctgaatggctggggcgttcaggaagcttgctctgtccagctcggaatcactccccctctccagggtgtgtgcttacacgcctctcagtcagcgcaaaaatccgccaaactcaggtcagcctaacaggtttccttatataggtaaacatgaattgcattcctggtgaaagaagttaactaggaatcctggtaacctggttaactctatacacaccagaatggctcagagttgatcagcctgcgtaggggtttggttgcagtacaaagggatttgtgcaatttaattaaaatcatctttatcctggcagtctgtaaaattggcccttgtagtgtgactgtgagtcaacagttagtattttatatcatgggctgtgaccagcctcatattatctgaaggcattgtaggggaaaaaagtgtaacattttataagttgtctttcatgtttttaaaaccagggtaattgaacttgagattattttcaaagaagtgaatagaacatgtgacagaaagagaatgtgaataaacctccatcaaataaggctcaaatccttatttgagcatagtaacgaatagttattcaactttcccaggcctttggtagataatgcaatacaatcattttgcgttttctccctttacaatgcagtaattgctactgtattttttgatgggcaaaatgacagataatgacatctattccaataacaaccctcctaagcccacatgctgatgtgttatttgatggtttcaggaaagaaatctaagacttgcgaatttgcatacttgtatgtaaacatttttaaacaacttcctcgatttaagaagataagaaaatatatcttcaaaagaactctatagctcttccccttacattttatctactacttagtaaagtaataattttaaaaaattctagccaattccactgaagacaatatggagacttgagactttcctgtgtactagagatgaagattgtctgctaaaaaggacctatctcaaaatgaaacacttgtttttatttcatccatgggttgactgctccttgagtagtgacaaccttattaaaaacagctcaaggctgttttaggtctctgtttaggacaggcgagataatgaatcttctgatgccacctaagtgagcaccaacacaaaccaatgtcaaaaagtttctgccgagatgagtaaggaacaaaaattgcactgccaggaagggtaactatttttgaatagcaatttccactgggaaaaacttttgcatacaatttctcttcttatctctgcaggaacactgtgaagtgtgtagtatttcctcttcacaataataaagttggcttacagagataaagtgattggtccaaagtctcatgatcagtttttggcaaatccaaaaccccagataaagaatttaactccaatagcatttcccaaaatagaatcaactttaagagacagaagaacattaaaatggcaattttccattttcaaatataatttttaataatcatatgtccagagaatttaaatgcaatatacaaacttattaaaatactttttataaagtcataacttactgttaacatgactccctttaaatgtctccagaaagatcataaaatgagatagagagtgtatttttattgaatataaatttgggttataaaatattatgaaaatataacttggcaaatattgcacacatttttctgttcacagtactcacatctctattgtatcaagttaagattcatcctgattcctccactggaaggaatatcagtgttttctacttactgggttttcattaatcttaaatgaaactctgtaccatgctaggtaaatggctttcactaatatagtccatttatgatctgcactctttgtgtcctcataattcccactgaagtaagttctgtttatgtagaaactttagactttattaacaggttgttgcaagacaaagaatgcatttttttttcccagggcaggctaaacctctaaatgccttaagctg

SEQ ID NO: 1563881 - DNA, 4001 bp, Homo sapiens
gcctgggccatgtggccttttggctgccaagaggccaggagagggtgacagtagttaggtctagtcttgggtgtctttcaccatttaacagagaaatggggaggtgtctaattatttttgagggtgcttgtgtgaagtgttcctttcaaaagatagttcttaaagcactgggtcatttaatagggcctaagctatgtaccgaatcgctggatttaacttttaagagccttgcaccttgaatttcactttgagacttccaaaccacagcctatttaatttttcccatctcatgtcccttgccatattcctcatccaccagtcctctctggcagtcctacaattatgttcaataagattcaagcttctcattttaaatcccttttctcggcctgaaacggtggctcacgcctgtaatcccagcactttgggaggccgaggcgggcggatcacaaagtcaggggttccagactagcctggccaacatggtgaaacccggtctctactaaaaatacaaaaattagccgggcgtggtggccagcgcctgtaatcccagctactcgggaggatgaagcaggagaattgcttgaacccaggaggcggagttgcagtgagccgagatcgtgccactgcactccagcctgggcgacagagcaagactctgtctcaaataaaaaaaaaaaagatcccttttctctaaaacttaacagaggtctctgtccctagtacagttttttcccacgggacaaaaaatgcctaaggaagggagaacataataaaggggtttctttctctccctctttctttcacattaagacctacacttaaatattttccatagaaaaccatcttcctaattgtcttttgaatgaaattctgacttggtgccacaaggactaatctgttgacaaaaaacaaacaaaacaaaacaaagtcagtgacccttggagacagacctaagtctgaggacccactaccccaaaacgtattagctctacatcacagcccatgttttcttacttgcaaaactgggatagacctatcagggttttgaaggaagatcaatggaaagaaaaatacagggaggcaggaagcattatataactttgaagcattaaaataatttcaccttccttctctgcacacatagaaacttttctagcctcagtttctttatcaaaaaaatggagcttgttccatgggccgtgccaaggactttgattaagtttaaatatgataatgtaaataaaaatcactatgtaaattgtaaagtacaaagattaattgtacttgatacaggacctcatcatagtgagaggtgtttatgtgaagagtcagaaaccttaaaagtgtggaaattgcctatgatgagccacagatccttccacccaacccccagtgcttaagcaggaaaataatataaaatatgtccaatgagattgaaagagcactgcaagaagaaaactcgagaaaaacagatatacagtttctagtagctgatcttctcataaattaaagcgtactttgtcccccttcctggacccatttggtattttaagtacgtatgcacccggatgaaaactcggtattcagacttaacttactaaatgccaaaatcttgcctctttttctcttcttcccagttccaacagtgtgataacacacggaaaacggaaatccaagggatctagcaaaaggattccacccagcaaaaacgccagcttgggagagggcccctacctaactccttccttctggcctccacccctcccctgatacgtttccttccgtctagtctcgagataacccttcatcccccagtttcttgactctggccgctgttcttgaacatttcttaaacactttcagagaaagatggctcatgcacctgcctgcaaaacttcccaaaccgggcctcccagctcccccagaccccgcaacaactcacacccgccggggaaactccagaaggaaaaggtccgccggccagagctctgggcccttggaatcaccccaccaccgcccctctggcttcagccaatcagaagccgtcagaaaatattatgcaaatgaatcctgatgctccagccagtcagaagccgcggagccctcccccacgcagcgtcctctttcaccccagccccgccaagctggctgccgcgtccctggcaaccggcgcgcagccagttctccactacgcttggctgtaaaaaaattaaaatggttgcctggggtcacatgggaggggagcgggctggcccaggcctaaggaaggttggaaacctcactgattgccccaggcaccttccctgtcccgatctggaacaggctggaggtgctgagccacctgcccggaattcagtttgcctccagaaaacagaagtcatccgttgaacaaataactttcgagtccttgtagcacgccaacagcctcaaagcaagaggtctttggtctctgctttctatcctatatgctaaatttccggtaaaagccttgtctgaggtacccatccccacttcttggttcacagttgcaattctggaattctggatctctttttttttgttttgtttttttttgagacggagtctcgcactgtcgccaggctggagtgcagtggagcaatctcggctcacttcaacctctgcctcccgggttcaagtgattctcctgcctcagcctctccagtagcttggactacaggcgcgcaccaccacgcccagctaatttttatatttttagtagagacggggtttcaccatgttggccaggatggtctcgatctcttgacctcttgatccgcccgcctcggcctcccaaagtgctgggattacaggcgtaagccaccagcgccctgccggaactcttaaattctggttcttaattcccactcttttaattaagcaacctggaaagcatgctttgctggctcatctccccaaaaatgtccacaaattatccttgtactgtgtcccttggatagtttttttttggggggggggaatgacattttaaaagtgaccagaaattcctgaacaaagtagtcagcaagagtaaactggtgcaagaaagtcagactggataaagaagagatctggcctagaactggaagaaagatgatattttaaggcaagaagccagcccaacccaagatagcagagatcctggattattttgagacagacttagaaggatccatttcatgaaaaatgtcctagaaatatgacagtcagactctcgtgttaaaggccatgtagtccaaccatccacttgtgctgaaatcgctcacaacatccccaccaagtggtcgcccttgcctacattcttctattttccgttctccagtgttcttctatcttttggagctctacagaaggccatgaagcacaccatcagatgtttgaaggtagatatggtctccttaagtctactgttcttcaagtcagttatccccagttcctgtagccattcttcatgttctcttttgagtcgctcatccatcctagtcactaactttagaagtagctctggtttgcttttgagtgtggcccctctcattccaagtaccatcttttctaggacaaaatggagtggcacagccacttatattattgtgaatggtaatttttctaggtcatatttattgagcacaagtgcttggaaattagacttgttaactcaaaagacatgttaactcattttaacttcacaaccaccctgagaagaaagcaaggatcaaagagtttaagggccaaactgtcagaactgggatttgacccagttttctaatgccaaatccaatgttctttctactactcaatagatagctactgcttataatgctgcctaacatttaatggacttattttaacagctacatctatatgctgccatctatataacaaaattttgtgtaccctatacttgagtagtggggattttttggaccaaagtacagaactttatattatcctacttaaactttatctcattggatttggcc

SEQ ID NO: 1563882 - DNA, 4001 bp, Homo sapiens
tccatgttaagttcattgattgggcaagaatatataaaaatagcaaagacagtttctccctcagtacagtcatgagaggagacagacagggggatgtgagggtcgggggtgggcagggggaagctaaccatctggggtacaatgaaaccactccccaaacagaagaaaagtaggggaggagaactccctattcagcaactcccttctattggaatattgccagagaactgattagagtactgggacggagcagaatggggttaaaggcagcccttctggcccaacttgagaatcagagggatcaacccacacacagtacttctctatttagtttccaatatattcctttataagggctcatcctcagagacacacaaccatcaccatctatccgccccacactcagaaatcctcaaaaaggcaaagtggttgagaagtaagatgctgcatggctgggaggctgggagtgcacacgttgatggggaaaggctggggtccaaggggctctgctgggggatttgggtaggcaagtaagcgttgtgacataggaaggtgagtgatcctgaaaacgggtaggggaccgtggaagagagaaagtaaagagtacaacgactgcaggatttcaatttcctgctctaagaagaaacacctctgaaaaataatgtgcaacacacgaagtgctaagtaacctaaaccttatcatcaccagtaatgtttctgtaaatctactccgccgttatttacttaattcttacaaggcaggaatggaaaatccccactctccctggttgcgtcgcagtctgtcctgtggacatatgtaagttttccctctcccccacagagctgatttcacagctaggccagaaataaggaaccatccagacggagactcgaggatcgctccctggcagaaaagggattaagtttcaccgggcctccccgccggcagggcgtccgcagccacgccggctgctgcgacagcaccgcccggcagacggccggccaaggggcgacgcctgggccgaggaggctgccggctgcgggagcgtgggaaggcggccgtgccctttcccagactcgcgcccaggcgccgggggattcgctcgactgcccgcgccgggcccggccaggctgcgcagaggcctcggccgcccccgccccgcaccccggagtgcaaactccgtcccaggagggcagtggcaggaacccgggccccaacagcatgactgagagccggagctgagctggggcccccgtcgccgtttcgagcctcgcgggccccatcaccctgcctcgccgagccggagagccctcggccaacgccgggccccggcggcacctgaaaagcggccggagccggagactagccctgcgagggctacgacgctcgacctccagggccgcggcgagggggcgcgttttacccatagcgttcccaggtgccagccatctcctccgctcgctcgagggcgctgggctctcgtctgcctccgcagcgggttggctcgggctccggcgcgagctcccgggccccggtcgccgccgccgccgctaccactgtaggccgccgcccgccttcgccgccgctgccgctaccgtcgccgacgccgcgcagcagccgggatccgccagcccgcgcgccccgcaggggacagcacggcggccgcgatgctaccgcagctgggcctcccgagctaaacttaagagttttcgcccctcagtccaggggcagcaccatgacaccacggcagcaccacactgtcatttccgccgccgcagaggaaaaaaaaggcaatcccttccaaaagggaggcggagtgggggcaaacggggctggggctgacaccccaagggagcactgggaagggcccaagaagaaggggtgctcggccaccttcccaggctcaccttccgccgcccccgccactcccagctcccccagcccttcctctggaggcacgtttacatgtcttctcccctggcaggagtgaccggagaaacctgagcaagcaaaggcagccggtgggtggggctcgggttactactgtacctaccagctgattccagcagccttttctccagcgccctgtcatcttgaaggaagacacaccgagagggacccggacgggtgtgcgtgtgtgtgtgtatggtgtgtatgtgcgtgtgtgtgtgtgtgacagagcgacagagatagctaaatgtgtgtgaaatgcagaaggaaggctatggctaaactcttctcccactccccaatccccctgtcccccaaccccacaaacccccaggttagaacaagaaagaggcctttgcaacgggtaataagaagagagagccgggtccaccgcagagatcctccctatgaagctgctctatgcaaagttaactacagagtaaaacaaaaatagtggaggagatagaaaagggcagacaattgaaggaaaccgaacctctctttctttttacaaaaaaagaatggctgtgttttattggcctcgggcagaagttgtggaggtggattaaaaccatcaaaagaaaaaaaaaagtaggatttttcttgtaccttcaaattgttgaccagtaaaacaagagggtcgttaccacatggacaatgaggcagatgctagctatccagctattccaggtccctaataagctaattggtccatttggaatccagcatcctcccattggtctggaatcagcctgtttgctgacctgtcattggctcagagaccaccacccgactcaaaaggtggatgggagagggaaagagcaggaagccccataagagactctgtttctaacttggggcaaaaagggagaagaaggggaaagaaatgagaaaatgggaagactcaccccagcacacacacacacacgcctcccatcattgtgcataggaacaagtccagaaaaattgaggtatctcttggtatatcccttcagggaaccaatagtaatcagtcaacactcctgttaaacaatgtgctagagagcactgaggtggaaaccaagacaaaagtcacaaccaggctctcctgatgaaagtctggcccctaagagaagtaaaagttagtgagtcacacttaaagcacaggcaacaaaagcaaaaataggtaaatgggaccataaaactttcaaacatctgcacaggaaaggacacaatcaacagagtgaaaaagcaacctacaaaatgatagaaaatatttgcaaaccatatatcggataatgtgctaatatccagaatgtataaagaacttctatagctcaattaaaaaaaaaactcttaaaagtggacaaaagacttgaatagacatttctccaacgaagatatacaagtggccaacaggcatatgcaaagatgatccacatcactaattgttagggaaatgcaaatcaaaccccaatgaaatatcacttcacatccattaggatggtcacacacacacacacacacacacacacacacacacaaaacaaacacacaggaaaatacggcaaggtgtggttcacacttgtaatcccagctactcaggaggggatgctgaggcaagagagtcacttgagaccagcagttagagatcagcctgggtaacatgaatagaacgtgtctctacaaaaaataaaattagaacagaaaataataagtgttaaggttgtggagagattggaacccttgcacactattgtaaaaaggtacagccactatgcaagggaatgtaaactggtgtagctgctatggaaaatagtatggaggttcctcaaaaaattaaaaatagaactactatatgattaaacaatcttacttctagatatatatccaagcaaatagaaaacaggatctcaaaaagatactggcaaacccacgcttacagcagcatcattcaagaggcagaagcaaatttaatgtccatcaagagatgaatagataaagaaaatatggtatatatacacaagggcatattattcagtttcaaaaaaagaaggaaatcctgtcacat

SEQ ID NO: 1563883 - DNA, 4001 bp, Homo sapiens
cattacctgaatttccacaacagtaaaatgagaataatgtgaggtgaggattaaacaagatacagtaaatgactggtgccctactgtaacaaagttcattacagcaaagatgagcatgccacagcaccacattgtgctatctgctgctacagtctgacatgacacacttagtcttaaagttacatattactctctccctaacatgagcattatatataaagaggtctcactgcagtggcaaatccacaaggcattctcatcacccaaaacataaaatacaaaaatcttaattctagatgaacctaggacaatccctatttaataacgtactttggactaaataattcaaactgtttttgagtgcatgtgtattgactcttgaagaagaatgtgtttagagacatttcttaagttttaacctacagctctgtcataaagacaagtgtaaaagaaacatcaaaccaacaccaaaaatcgattttgactaatctcctatctggttcaattcctagctagcttgctagtttgcatgaagcctcgcctgcttctaacactacctttaaccaggaatttcctcatctgtaaaatgaaggggttggacttcagtgaactccaaaggcccttctcgccccacaatcatataattctacagttaaagcttactgtagaaaatgacacagtactccagtgtatcctaatctcttccaggacagtgtttctcaaactaatgcgcatacaaatcaccctgggatcttattaaaacccagattctgattgaacaggtctggcctgagtatcttctaattacctgccaggtggtgctcatgatgctggtctgttgatcacactgtaagcagcaaggatctaggatactttccttaacctcccagttcccccaaaatatgactgtccctgcttccatgcatccttatatacttttagcatatcactttattgtaactacttcttgatccacttgttttcctttagactttgaactggctcagggcatcactgtatctctagcacctaaacacagcgcaatttcaaacagcgacccaaaactgaatttcataacgcagtgtagcacaaatcttttgcccaacgtcacacagatgtagcggtaatgcaagtttttaacaaccagtcctttagactcccagtccagtgctctttctcctgtaccacagtgcctccctgaggcaatcggtcacttaactactcagtctctgcctggacagcccaagagtgcccaagatgttgtccacttggttgtcgtgggaccatgagcaaccagagtcctcaatctcacaactgtgcctgatctgccccatgctggatctgacatcacttgtcctggattcctggagactcctattctgaaccctctcccagacacctccttccaaccttcctgcaatttcaggtgccacactctctccaaattcaaactccgaaccttccactgggaactcctgcactgattttcttagtcaccccaaactgtaaggtctcaaaggaccattaatctgacactcggtccgatggtcccttagaagtgcgcccacacaccgcccctagggttccacaccgaagcggtccccgtgccccaggcacttacgctgcgcagcggaaaaggcggcgtgggctagggcaaagagaccgatgcccaccagccccttccacagcgacggcgccatgatgccgaaggagcagcagcccagcaaaagaagcgaaggacggcggagctgtttcttcttccaccggcgggtgtccgcgcgccgcagaaagatgacgtcactgaagtcctgagcgcaaagtgtctcagtggtggaaaagccagagggctgtgagaaaacggaaacaggaatgccgggaagaagcagaaagctacacggaaaaaggtccgcgagaacccacgaacctgcgctatggaggcctctctaggagggccggagcccaacggagtcataaacgaagaggcgaaagcgggagctacggggaagcgaagaggaagggcgccggcaaatgggggcagggccagtggcgagaacagggtggggcagagggacgggggcctgcgtagagaacgtgtgggggcgaggggcggggtaggcagacgggcggggtggggaagacgcgcggggcccgcacgagggtgggtgtagccgaggggcggggccagtgggtgggtgggtgggcgtagccggggggggggggccctggtgggtgcggtcgagtggcggggcctgcggggaggatgggtggggccgaggggcggggaggaggtggggccgaggggcggggaggaggtggggccgaggggcggggaggaggtggggccgagggcggggcctacgggaggatgggtggggcgtagggggcggggcggaggggacggagagtgggtgagggccgagggggcggggaggaggtgggaccgaggggcggggaggaggtgggaccgagggggcgcggaggagtgggaccgagggggcggggaggaggtggggccgaggggcgggaggaggtggggccgaggggcggggctgggggcgttggggaaaggcggtaggtgctggatatagacccctgacagttgtgttttgtgggttggttggttttggctttttgtgaaactgtgccttttgttttctgtaggcctttcctgtgcttcagctccctggaaactggcactgcagaaggaggcaagggtgttaaaacgaggaggcagtgtcaggacaaaatcccaggatctggaaccccaaatacttggctcgcgggaagtgctcagtaaaccattttaaggtcctggagaaagattcgcgcaaaaagaggtgtagcgcggggggagtgttttgtcgtgaaaagaaccagcttacattaaggaagaaatgaaagaggaaattttaaaatgctaataacgcagccttcttgccttgtctctatctctgatccgggtaaaatgtatactcctctgcccatttttctttgtcttcatctcctgaaatgtagacatttaatagtgagcttctccccttgacctcatcactctgctgtcccctggggagctcacccattcattcccaccgcttcagccagcaaaggtattacagtgattccaaatcgacatctctatcacaaatatctctccttagctccagggctgcatttctgactaccagataggcatttatttcctgtggcacttaaaacgtaatatggctaaaatggaattcatcctttttttccaaattctgcaccagttcctccagtgacccctgactgagtggcaaagctttgtaaactgcatatcacaaggtaaatgcaaagtatgatcaccattcttttcctttaacccaatcagaattctacgttttagttgcatcaatttgcttttgctcaaagatgcgtcctatcctgaccaccccttttaaatgtgcaaaattcctattcctgatccccttattctgttctactttttatatcaccttctaacatactatataatttaactatttatgtttgttgtgttactgtttactgtctgtctttccccactggaatgtaagctctgagagaacagagatttctctgtacctaaaactttgactgtcatgtgataagcattcaataagtgcttgttgaatgacaaatgaattccggaaaataattgggacagtatccctatttgaaaggatctctacagagagtccttccaatcttttgaattgggctcaaaaatccccatggacttgcatgtactctcacattttgacaaccttttgattgtaaacattttctgatatgcttgagcttcctcaaagctggaaaaacaaataagacatctcattagctgggcatagtagcacatgcttgtagtcctagctacttgggaagctaaagaaggaggattgcttgatcccaggagttcaaggctacagtgagccatgattatgccactgcactacaggctgagtgacagagcgagaccctttctc

SEQ ID NO: 1563884 - DNA, 4001 bp, Homo sapiens
taaaatctatgtttgtatacatgtatgcatgcatgtgtgtgcataatacatacacatactcgcgctcatactggacgtcttagatccggcttaggttctttaaggtaatgcttatggccaaaatcacaaatatccaaaattacaaattggaaactcattaaatcacctggaaagtacagtaagcacagcacaggtatatcacgttctgcaccgtgccaaccatgagagaacaatacatttcgctttcccatcccccactatgtaaatcactactttttgctcccttgtagtctttcttgtaaattacatacttaacttggattgtattccattctgcagaggttcagtgcacagccccaaggcacagtaccaaacctcaaagatacagtccctctgctctagggttccaaacgtatcaattccactttttgcctttcaccttctaattaaattacacatattgtaaagcattccgtgttatggttaatcatcaaaggtctctatcattcttatcacccttccaagtaagtcccctgctacccattgacttcttacccaagataactctcatggcatggccacagcgactgcttaagtagagaccggggttcatttggggagctttgaaaacattttcaagagtttgttctgtgcaaccttgcccataaacacttcttccttctttcgattttcaaagcatgtataatgcgccctgtatgctgctgcgttttgtgcaggactgcgtttcttctttgctttccacacagtagcacactactgcaaaaactggtgtaattggcttgaagggatcaactgaaaacactttaaaagcaaacaccggtggagcgagaggttaagtcctcaatattcattccagcggtgtgagggcgctcgtggaccacggacccagccctccgcagtagcagggagccaaatgcactcgtgtcatctcttaagagatgtcccatcattcctaacttttcttgtctcaaaagttaaggaactccgctttccagacctttccccaggacccgcctcggtcctctacgcccctttgctagctaggcatcctccgtcggtcgccagcccctgcggacccagctgcctcagggcccgaggtttttatgcatctccttttgattactaactaagctatcctaaagtgcccgaacgtcacgagcgcgagagaaaaaccacactggtgtctttaacgcttcagacacacctcgtttcctccgttttatgagcggaacctagttcctggcgagagagccatccccctcctccgcctgcggagccggggccggttccgaggcccccaccccagccccggcccgccccgcgcggctctgcgcattcctctcgcgtccgcggcaccacgctggcaccactgcctcgggcgaacacggccgggcccgccctcgccactcacctagcagctccgcgatggcactgaagggtcgcgtgtggctgctggagttgctctggaggtagcgggggctcatctgggggcgagagaaggtcccgacccgcgtgaggcctcggcccgccgggccctccccgcgcgccccccgcagcccaggggcccgcgcgcgcgtccgccccctcgggccccggacctaccgtgctcaggcggatcccgaaggcctgcgggccgccgccgggccgggccagcccgcagcccggcgcgccagggccggcgggggcccctcggtacaggagcatttttttggccgccacggtacccgtctgctgccgccggacccctggcccggcggtccgggactagccctcgctcacttccactcgcagctggcggcgaccgtccgggaccggccctccctcgctcccactcgcagctggcggaggcggagcgcgctccagccacctgtcccgggcgggaggggtgaggccggctgaggcaagcggcggctccgccctgtcagcacctctaccgacccggcgactgcccgggctgcctctgggccgtacagaaatatggcgacctcctgacagccgctccttgatccccgcccctaattaattattggcgtatgccataggccaggccgccgagcgggaaagcgcggggggcgggggtggcgcgtggggaggggcgtgaatgaagcaagaggagggagagcatgtatgggatttctggaacctagtcccgcttaggctgcatgactaacaggcaagataagacaagtctttcaagttctaaagactacagtgttgctatctgggaagatagcaagctcgcctgatgggaaaacattctacctactctgcctcaaatgcctccagaagcacccagaactttctggaaggcaattagcaaactatctccaaagtcttgctagcatgcagggacggtgtttctaaaaggagaaattggattcacttaaataccgccaagtaggggattggtcgagttatgaagtatgcataaaatgaaataccatccagttcttgaaggccatgtttgtagataagtatgtgttgatgtagaaaaatattcatgaaggaatgaagaaaacaaggagttacaacatattgtggaacgcatgatgccttttctattggaaaaacaaatatatatgtatacatatatacatatatatatatgcatgcatacacacatatacacatacatacatacatatatatatacacacacacacacacaacgaaaaccacttgatatacaccaagatgatatctctgggtctggaactagacactttttccttttttcttacctgtgttttctaatatactataaatatacactgataatagaaaaacagattcattaaaaacatatgtaatgttctatggcatgaatgaactataatttatttgaccattcctttatggtaatttaggttgtcctctttttttaattttgacaatacaaaaaatgctccttcacacactcgtgtacaggtcattaatttctgatactgttatctccacagaatgaattccaaaagatgagactgctgcatctaatagcatgtgcatggtttaatcttaataaatactgtaagataggcaatttgccctcccagcaacaatcagtgctcttttgtcatgttcatagcactagatggtcccaatcttttaactttttgatagtcttttcaataaaaaatagtatctccttattgttttaatttgcattttcctgactaccagtaaggctgaatatcttttcaaatgtttagtatacatttgcatctcctcttctacaaatgcctgtttatgtcctttgagcatcattttttacccccattgggtgctttacatttgtctgttttttagttatcttttcttcaattttttaaaatacacaaaagtacagaaaacaatataatgaatcccatgtacttattactcagatgcagtaattatcaagactgccacacctgctgcaatggactgaacatttgtgccccgccaaaatttgtatgttgaaatcctaactcccaatatgatggtattaggtattgggattaggagttggggcctttgccaagtaattaggtcataagggtggaaccctcatgatgggattagtgcctcataaaaaggaccccagaaagctctctcatcctctttcttccatgaggactcaagaaagggtctgaattctgcaacccagaagagagaccgtaccagaacctgatcatctgctgttaatacgcaacctagtctatggtactttgttaacagcagccagatctgactaaggcacttgttttctatatcccttttcttctttttctttttcttttcttttttttttttttccatttctgtaagctgtgagcatttcagggcaaatctcaaacatcatgccattttattttacatacttcagtgttctttagaaacatggacattttctaacaaacataaccaccatgccacttttataccaaacaaaatttatactaattctttgttgtcttctaatacccagacttttttttttt

SEQ ID NO: 1563885 - DNA, 4001 bp, Homo sapiens
agttaagtggcagagccaggatttaaattcaggaagtatttgctcttaaccactaaactatgctgcatataggatgctccaaggaaaaatgtaatctatggaactgtggaactactacaggagattgactgtagtatcttttatcaagggatgtaagattacaaagccctctgttgcttatgcactttctatactggaactatcaatggacttagctccacccttcccttctcagaatttagactactttcccagataggagcttattaattttcaaaatattcctggacagttaggaaggttatgtggtattatcctgtttgagaactgaggacagaagggaggcacttacccaagattctgtaatcagggaaggttctgcaatcaggatcagatctcctgatcctcactatacagcaaacttagcttttctgatggtgacctagaaggtcaaacaaaaggacaagaaagaacataaaataaaaagatatgagatatggctttcttctacatcagccaatgcaatttcatcacacacaaaggacaccaaagctgataaataatgtacaagtgtttctttttcctttcttgtggccacattttcaaatttaatttattgtacatttgtataatttctgacaaatttgttttttaactttccttaaatataatttcaaatggatgaaataaaaaagaaatagtattataaacctacacgaatccatcatccagctttcaacaattaccaactgaaggccatcttgtttcatctataaccccacccactgctcccccccacccccgactttttcaagctcaccggaatatctgacttctgtattttattatagaaaaatttaaacgtataccaaggaaagcagattaatatacgcaacccactgcctatcactcagcaaaaaaatattattaatttagggccaattttgtttcatctatacccctccccatttccccctaccgctgagattattttgaagcaaatcctagtcattaatgtatttagaagccaatcccagacattatttaatccgtaaatattttcgtatgtctctacaaaaaaggacaatttgaaaacataatcacaatactactgtgacgcctaaaaaaactgacatcaattccctaaaaaacatcaaatatcgaatccgtgtcccaattttcccgatgcgtcttaaacatatttttacagttggtgtgttcgattcaggatccaaacaaggcctactcatcgcatgtggttcatctccagctcgctctcgttctccatctctttctttcttgcactccccccccccccaccttttatttaacttttcaatataggaaaattacaatctctgctattttgaggcaattcccaaataacaaattatttcattggtaaaaattggtatatctattttatctttaatttattctaggaaagaagttgatggcagaaagggcactacaattagcgaatttatataatttataatttttctcattctattacgcgtattatttatctccataacaatagctaatatcttcaggggccaggcttcacattacgtgccttatacgcactattatacagtacacgtctctgaggtagatactattattatcaccattttacaaacatggaaaccgagacacagaaagaacaggagccttgcccaagctgggcgttggcgagcaggaatctgaatccagctctgaccgattgtgaaggcactaggtaatcccgtctatacccgacgaaaaaaggaaatcatcgaccctttctccccacccccaccccgaaacctgaaacgagaatccagatcttcccagcagccgacgtgtgatcactgccgttcctccaaccgccatagtaaagccaggtttctctggcaactgatatccataggcagacacgtcaccctggaggagggcgtatgcccttcagccaatcacaatcgtcttgtctaagttttagaatgttccataatcaaatgattggacaaccacccccacgtcagcaatgacacttcgccgcagtaaaggcgggtgctagcaacctgcttcttcactgttaaggtctacagcaaaccaatcctcttcctccgttagtacgagttccggccaatgacgttcgccctcttaggtttttttttttagcccgccctccaaaagcgtgacagccgttgggtcataagtctacagggcagaatgttcacgtggcctatttcacgacccagagttcctctgaccagagggtttttttttttccttttccttttttttttttttcctgcagggaggcattatgggtttgtggtttttttccccccccactgggagaggaagtgtctacgtggcctgcggaaataggataggcggaaatgagctaaggttcccgcgagtggggaagcgcgaggtcaaatctggggccacgcccccagtcctgtggcgcaactccccgaacacggaaaaaaaaggcgcagtgggggttctgctgtgtttgcaagtgagggtcgtgagtgcaacgggcgcaaggcattaaggccagtgtgttagtgcgcgggcaggctcgcgtggtgctggggttgctgtgtgagcggccctcgtggctcgggaggtgctgtgtttgcgcaggcgtgcgcccctggcgtcgggactggtgagagccacggcgggcgcgcgcgcgtgcgtgatggtgggggcggtgcagggaggggtttgctactgcgcgcaggttgttatctatttctgtgttatatttgaaaatgttctaatgaaaaggaaaataaataattaaggaaaggcgacaataacagataaaggggcactgtcagaaatattttggctttccgtactgatttaattactttaaaaatacacttcctacgttttcctccgtgccaaaatcctatcgtaaaccacagccctccaatgattcagagccaaacccttccatcgccgcattagcaactccaaagggaggcttctttcaagttctctagtatcgtcctccctcccctcctccacacctaccccctcccttcaaggttgcgtgcagttctcttggcacaaatacaattttcctgtgagaatatctatctacgacagccttcccctccgttagggactccggatttctgtggcgactgaggcgctcttacctttgcgtcctgatctccaagcaagcacactgaccttcttcaggcaaatacgcactgttaattttccagaaagttctgtgagtaaggtttatacctctcgagtctgccactagatgccgccaaatcccagcaaaggattggctgtttggtccctgggattctgggattttgtttccctcccccctcccctttctgatttgctgaacggtaatatctataggcatcatggatatcgttcattcctaggaaaaaataaaatcaacttctgtaaatagcactagtaggcaggggactgtgacccaagatccaaataattttgctcatttctttccttttctccttgggttaaaaaaaaaaaaaggcccctctccatccctcttttcttttgtccttgccttgtttaatcaaagagttaatgaatgacgcaagcactgatgctgaagatcctaaccctttttcctcaccttttcaaatgctcgcaactcacccaaactgaaaatacagatagctgttccgtcagtaaagatagataagaactcatcagtaaaacctggaccctggtattgaaaactgattttccttttctcttgaaatttgtatcagatatgtgtttttgcaccctattttctgtagtggtattggtaaactttattgtgtctttggagtaagagaaagagacctaattgtaaacctcattccaccacttactagtctcagtaccctgggcaaatgatttatgttttgtgatcctcagtttttttgtatgctttctatattttagatgctgtgttatatcgttcacgttgatttttttattcatcaccaagtcct

SEQ ID NO: 1563886 - DNA, 4001 bp, Homo sapiens
ataggaaaattacaatctctgctattttgaggcaattcccaaataacaaattatttcattggtaaaaattggtatatctattttatctttaatttattctaggaaagaagttgatggcagaaagggcactacaattagcgaatttatataatttataatttttctcattctattacgcgtattatttatctccataacaatagctaatatcttcaggggccaggcttcacattacgtgccttatacgcactattatacagtacacgtctctgaggtagatactattattatcaccattttacaaacatggaaaccgagacacagaaagaacaggagccttgcccaagctgggcgttggcgagcaggaatctgaatccagctctgaccgattgtgaaggcactaggtaatcccgtctatacccgacgaaaaaaggaaatcatcgaccctttctccccacccccaccccgaaacctgaaacgagaatccagatcttcccagcagccgacgtgtgatcactgccgttcctccaaccgccatagtaaagccaggtttctctggcaactgatatccataggcagacacgtcaccctggaggagggcgtatgcccttcagccaatcacaatcgtcttgtctaagttttagaatgttccataatcaaatgattggacaaccacccccacgtcagcaatgacacttcgccgcagtaaaggcgggtgctagcaacctgcttcttcactgttaaggtctacagcaaaccaatcctcttcctccgttagtacgagttccggccaatgacgttcgccctcttaggtttttttttttagcccgccctccaaaagcgtgacagccgttgggtcataagtctacagggcagaatgttcacgtggcctatttcacgacccagagttcctctgaccagagggtttttttttttccttttccttttttttttttttcctgcagggaggcattatgggtttgtggtttttttccccccccactgggagaggaagtgtctacgtggcctgcggaaataggataggcggaaatgagctaaggttcccgcgagtggggaagcgcgaggtcaaatctggggccacgcccccagtcctgtggcgcaactccccgaacacggaaaaaaaaggcgcagtgggggttctgctgtgtttgcaagtgagggtcgtgagtgcaacgggcgcaaggcattaaggccagtgtgttagtgcgcgggcaggctcgcgtggtgctggggttgctgtgtgagcggccctcgtggctcgggaggtgctgtgtttgcgcaggcgtgcgcccctggcgtcgggactggtgagagccacggcgggcgcgcgcgcgtgcgtgatggtgggggcggtgcagggaggggtttgctactgcgcgcaggttgttatctatttctgtgttatatttgaaaatgttctaatgaaaaggaaaataaataattaaggaaaggcgacaataacagataaaggggcactgtcagaaatattttggctttccgtactgatttaattactttaaaaatacacttcctacgttttcctccgtgccaaaatcctatcgtaaaccacagccctccaatgattcagagccaaacccttccatcgccgcattagcaactccaaagggaggcttctttcaagttctctagtatcgtcctccctcccctcctccacacctaccccctcccttcaaggttgcgtgcagttctcttggcacaaatacaattttcctgtgagaatatctatctacgacagccttcccctccgttagggactccggatttctgtggcgactgaggcgctcttacctttgcgtcctgatctccaagcaagcacactgaccttcttcaggcaaatacgcactgttaattttccagaaagttctgtgagtaaggtttatacctctcgagtctgccactagatgccgccaaatcccagcaaaggattggctgtttggtccctgggattctgggattttgtttccctcccccctcccctttctgatttgctgaacggtaatatctataggcatcatggatatcgttcattcctaggaaaaaataaaatcaacttctgtaaatagcactagtaggcaggggactgtgacccaagatccaaataattttgctcatttctttccttttctccttgggttaaaaaaaaaaaaaggcccctctccatccctcttttcttttgtccttgccttgtttaatcaaagagttaatgaatgacgcaagcactgatgctgaagatcctaaccctttttcctcaccttttcaaatgctcgcaactcacccaaactgaaaatacagatagctgttccgtcagtaaagatagataagaactcatcagtaaaacctggaccctggtattgaaaactgattttccttttctcttgaaatttgtatcagatatgtgtttttgcaccctattttctgtagtggtattggtaaactttattgtgtctttggagtaagagaaagagacctaattgtaaacctcattccaccacttactagtctcagtaccctgggcaaatgatttatgttttgtgatcctcagtttttttgtatgctttctatattttagatgctgtgttatatcgttcacgttgatttttttattcatcaccaagtccttattagatgagcactactggatcaaagtcaaacaacaaaaatcatacccctttcaattatctatcttatatacttgtacaccacacaggagggatttttttagagcagtggttcccaaggtgtgtttcctggatgtaccagaaacatcagcgtcacctgaaaagttgtcagaaattcggattctcaggtcccacctcaaacttaatgaatcagaagttcgcagggtggggtttagtaatctgtgttattacaaactatcccagtgattccagcacacactgaagtttgagagccactgctttggagagtagaaatgcaatgcatatttttgtacacaccactagagggtgctacagaatgtaaagcaaaataataaatgatgcacagtatatgttttcagacaccctctatattatcagtcctattttacagattaaaaactaatgtgtagatatgtcaaattattttcttagtgtacgcaacaagtatgggaaccaggatttgaacttcacctgcctctagcccaagcccctaatagtactctgttgtttaaccatgatgacttgtctttccaagcctcaaaatacattagaaatatcttgttccctgctttggctaatgttgactggagtgtcaagaagagtgcaggaaagcaaaccaagtaagtggaaatatttcgatgtttcattctcatacccttcctcatctccattctataatagcatatcacatcaaggcttctaaatgttttctttcttgttttttaattccccaaataatgttctctttactctgcagttgccttttttatttatgtctaaatctctttttttttttaacggaatttctctctgtcgcccaggctggagtgaagtggcgcgatctcagctcactgcaatctcagctcactgcaatctccgccctcccctccacccaaccccaaccctggttcaagcaattctcccgcctcagcctcccgagtagctgggattacaggcatgtgccaccacgcccggctaatttttctatttttagtagagatggggtttcaccatgttggccaggctggtctcaaactcctgacctcaggtgatccacccgcctcgcctcccaaagtgctgggattacaggtgtgagccactgcacccagccatatgtctaaatctcttctatgtgtgttgaagttatcagggtggtgaggaaacagttattgaaaacctgttatgggccacacactctatacacccattaatctcaacaataggcctgcaaattgggtgatatcatcattattttatagataatgaaagtgaattctgcagtgtgtaattacttatctt

SEQ ID NO: 1563887 - DNA, 4001 bp, Homo sapiens
gggaggctgaggtgggagatcgcttgagcccaggaggcaaaggttgcagtgagctgagactgcaccactgcactatagcctgggtgacagagcaagaccctgtctcaaaaaatatatatatttttgtagacatgtaaaatgtctatatattccattttaaacttctttaaaaacagaaaaagaatagtagcaaattactttattgacctattagggaatggaatagcttctctgatcatttcttaactgttagttttcagaaaatggagttaaatgtaaaagctctctaagaaaagaaaaataaaacacttgggaagcaaatgtacataaacaatttaaggaagaagcatgcattgttttacaagctatttgttctattgtctatttttgcctataaaggagtaactttatactgaatattgtccattacatttaattatatattattaatacatgtatggagaatctatcacagctatcccttacagagttgaaaaattccaaaatttcaactctcctagtatttaggtatacctgttgttttaagagttcaagaaatgcttcagaaactagtttaatctcgcatcctgattgggtatgtagacgtgaacaacttgaaagacacatttggccgtttcctgttttccaaacttcccactaccaactataagtgtaatctaaaagttggtatccactccatattcaatatcctgtatatagtcttttctaggcaaagagattttccagtactcagagtaagtgtggacaagatattcaccaagaatattaaatcccatgtgtgccttgcctgaaaaagtagactttctcctttctgtctggaattcacattaagaatgcaatgcactctgaaagaacaggactgctttttaggcaagatccaaaggacacaatttttcacgtttgagtcctcttcttatctccctcaaaggtcaattttcacttagcatttgtcctctcgttccccgacgtgagatctctcagattctactggggcagatctgctacttcagctggagagggcagatgtcaattactttctttcaaagggggaaaccgcagaacattgattaagggcaggagggctggagagggagtacaaaatggactgtcctaggatttcagctccacctgactggggcccagccttcccagcccacgtccccacaccggccgctccatgtgaaaccggtcatgtgagcctgtttacagcagagcagctggtgcaaccatcaagatccgtgcagaggtctggggagggggaaggatacaggccacgcaccccctacaccctaccccatttttccaagaaggcgttcgctctcccctccccgcctctccaccctactttcatctccctccaggcaaagagagtaaagctgaggctatcccgggacgcctcgctccaaccctgccgatttccttccagttgctcgctggggcaaccggctaggctggaggaagggcgaggacggtgtcaccccaaacggggagtcaacttccctcccccagccgtcctcggtgcatccaccgaagagttgtcccgcgagccgcatccccggggcaaccgaactccgtcgggcaggcaccgagaggctcccgagcctgcctttgcccgggcaggagcgagctacacaccagctggccagaccctggggccgggcgccgcgggcggcggagccaccgccagtcacacacgggacaggaaaggatcccctccgtctcctccccgccgcccacccgcatcccggcgccgcggagccccgctgtcaatcacagagccaagctccggctgtgcggatgggtcattctttggcggggggctctcagccacgtaacttccacattttcccgaagtcagaggaagtgggtgacgggacggtgggggactctcacctcggcaacaccggcttcctcggaaagcagctgcgactgctcctccgctcctttgtcagcgtctctaggctgcactgcctgctgggataccggaggactcaaatgccacctctctccgccctagaggatgagccgcggctcgggggtgggaggcgagaggaagaagaggtggggctgggggcggggccggagcctggggcggggcttcggccttgccacctggcctcttggggtttcttcattcatgctctaaacttcttccttctctgtcctctgatctgcccctcccctcccgcctccccttgaagagacagactggaggctctcacagagggccatctctgtctgcgctccttaggcagtccctcttgcctcctgtcctgtctcactctcctgcacacacgcacccagtgagtactcaaggctagtggcttctattcatacttccgagacatgtcttgttgaccgcctcaggctccaccccatcctcagaacctgtttaggccccatgactttttgcttggactccttcagtagcctcctgtttgaactctgcttccactcttacctcagtctaaaccatctcccagaaagcagccagaggtatcgatctaagatgtacacatgaccacgttacttttctccttaaaatctttcagtctcaacagtacctacgacaccttagcatggtatataaagtgggccaaggcaggcagatcccttgaggtcaggagttcaagaccagcctgggcaacatgctgaaactccatctctactaaacatacaaaaattagccaggcgccgtggctcacgcctgtaattccagcactttgcgaggttgaggtgggcaggtcacttgaagccaggagttcgagaccagcctggccaatatggcaaaacccatctctactaaaaatacaaaaattagccaggtgtggtggtgcatgcctgtagtcccagctactctggaggctgaggcatgagaatcgcttgaatctgggaggtacaaggctgcagtgagccaatatcattgtgccactgcactccagcctgggtgacagtcagatgctctctgaaaaaaaaaaaaaaagaaaagaaaaatagaggttgtacatattttcggagttcaggtgatattttgatatcttcatataatgtgtaacaatcaaatcagagtaattaggatacccatcacctcagaagtttgtcttttctggccgggcacggtggctcaagcctgtaatcccagcactctgggaggccaaggcggatcacgaggtcaggagatcgagaccatcctggctaacagtgaaaccccgtctctactaaaaaatataaaaaaattagccaggcgtggtggcaggcacctggagtcccagctactagggaggctgaggcaggagagtggtgtgaacccgggagatgaagcttgcagtgagccgagatcacgccactgcactccagcctgggccacagagtgagactccatctcaaaaaaaaaaaaaaaaataagtttgtcttttctttatactgagaacattccaatttttctcttctacctattttgaaatatacaataaattactgtaaactatagttaccctactgaagtatcgaatactagctctcattccttctgaaactatgaaacaactagaaaaacatattggggaaatgcttcaggacagggcaaagatattttgggtaagactgcaaaagcacgggcaacaaaagcagaaacagacaaatgggattacatcaagctaagaagcttctgtgcagcaaaggaaacattcaacgaagagaagagacaatctacagaatgagaaaagatatttgggatcttggctcactgcagcctcaacctcttgggctcaaaccatcctcccacctcagcctcccgagtagctgggactacaggcgcatgcattcatagctaattttgatattttcagtagagacggggtttccccatgttggccaggctggtcttgaactcctggcctcatgtgatccacccgccttgacctcccaaagtgctgagattacaggcgtaaggcaccacgcccagcctggaggtcattatc

SEQ ID NO: 1563888 - DNA, 4001 bp, Homo sapiens
aaggaaaatcttggaagtacattgttgttacaaatgtgcctaaatttcagataaaggttgaaaaaatataaagtattctaataacgaaaactagagaacagttaatattccaaagcagcaaacatataactctagatcattatagtagtttaaaacatcttaggatctcttatttctccatgactctgagcatagatccactgaaagtccttctggggcattaagagagcattcgtattggatggactatttctattagctggactgcataaatgtcagtaatgggtgtgatcaagacaaaagaacaaaatattccttcaagattattctctgctagttggccacaacctattctgaatctccactttcttgtgaaactggtgagactgagagacaggtaatcttttataatgggattaagccattggtttatagcagtgattcttcaacttcagcacatatcagaatgattaggaaggcttattaaaactgaaattactgggccccacccctagactgtctaattctgggtgggatctgacaattggtatttgtaaccagttcctacatactgctgatgctgctggtcagggaccacactttgagaactgttgttctactgcaggagctggcaaacttattctgtataggcccagatggcaaatatctaagactctgagggccatattatattcttattatattctctgttgctgatttctctctctctctctctctctctctcgtgtgtgtgcgtgcatgtgtgtgtgtgtgtgtgtatgtgtgtgtatgtaacaaccctttaaaaggctcggctcaagggtcatacaaaaacaagactttgctgatctctggtctactctaaaaaggggaggtgctttctgcttcagttcttatccttcaagagctggattccttagtacacttgaacaaacaaagctaaactttcaaaactgttctccaggtcctcatcagtcaccagccagttatccaggttaattagatataatggaccttggtctattcctgtatattacagactctgcctcaaggtcttcgcataagcacactatctacaatcattcccttggctcattttggtcaaatgggagaatgtaaacccaatttcatcaaaactaataggataatagtaagagtcagtcattttgagaggagctcctcaaataggggatggcatgagaggagtcggactgatgctgtctcctctaataagctccatgaagtcagggactttgaaaagtcacaccctgctccctccaactctgcccaatacacagtaagtacatgctaaatctttgttactgaatgattagccatgtacaagtctatcccctagtagatcttgagttcattgaggacccagaacttcactaataaactgttttatttccttcccttttgaaaagttaaaaaattatagaatagaaaataatgttaacaaatatttatgtagctgtaacccaaaattaacaaatattaagttattcgcttcagttttttttttaataaaaggactagaatgtcatagataaagctgaagttacccttaatcttcccataaaagccttacatttctttgctagattaggcagtttagaggattttgtgttgttatcataagcctatgacaagattggcaaactttatacctcatattttcctgccacgttcataactaagttatcctatataatgtagagttattgaaataatagcagaaatcattgtctttttcctgactttataggaattattctaaagttccccaattaaacatcacatttgctgtaggtttttagaagatacacttaactttaagtactctggaatttccaatgtgatgtcctctttaacccacgggttatttagcagaagaatttacaccattgctgagaagttggtaatccatggattatttagaggtgtgttattctagtttcctatcatatgacatgtttttaagtacctattattgtgacttctgatgtagttgcttaataatgtatgggcatggtctgtatgatgtagcttctttggaattttctgagaccccctttatgacttagtatgtggtgaatgtttgcaaaagctctgaaagtacaaatatatattcaaaaagtatatattctgtactagttgggcaggagagtctatatactcatatacatacacacatacatatatatgtataatcaaatttgctcattgtagtgttaaaatcttctaaatcttaaatatttcttgcctgctagttctatttctgaaagagggttgttaaaatcattcaacatgtttgtagatttcttgagttccccttatgattctgggtgctttttgctttgagtattttaaggttatatggttaggtagttttttatgttgttagttcctaggtgttatacccttttacggttccttttatcacaaatagtatccctttttatatgtattaatgtctttcaccctaagtaacattttacctaaagtactgctgaaacaacattacttttggttaatatttgttttgtatatctttttccatctattttcaacctttctacattaatttattttaggttagtctcttttagactgcatgcagttaagatctttaaaaatctaatctgatatctaatatgcagaaatcagtttatatttatagtaactattgataaagttggaattctttctgctgtcttcctctgtgttttctggtaaccaagctgctttttttctccttttctgcttcttcctggagaggacttttcctccattccccttttcattcctccactggtgtggaagtcaaacattttatttctatctttcaatgattacccttattttaagtattcacactgaaaacaacaaaatctgcagttagtatctctatcctcattctgaaagttccttgtaatactttacctccatttcttctactcttattattatttgttttttcttactatccacagttagattttttatttactaatttgcctacccatttctttgcttttcattacttcttgcatccctctgcttcctttggtgtactatttacttattagtgaagtagacaagtagtttttttttttccagcaatggtcaatctttgcatgcctaaaaagttttaccttcacttttgaataaatgttctaagtgagcagttatttccctcagcactttcagaaaattatttcactgtttcctggcaatactgttactgatgagaaatcaagtatcagtctgatttttgtttctttgtggatgtgtcatttctctttgggttgttagattttctctgtccttggtgttttttggtttcactaaaataagcattgagattaatttctttttccctatgatgctcagattttcttatggttctttaatctgaggatttgatatcttttataaattctgggtaactgtcaatgattatttcttctaatatcactctttttttccttctggaagtttgattaaatgtatattgtgtttctcatgccttttatttttccttacacatttttatctgttttcttcctccaatgatctgggtatagagtaagtacttgtagaaaaactttaaaatagtctgtgaatgtcctatgtcagttgtgaatatatagcagtataatgggtaaagaaaagcttctgcaaatcatggcccagctagtaagtactagtatctaatatcaaagaaaattctacacatatatgccaaatctttatagtcactacaagttcagcttaaactagttttgattgaaatgtagcaaatttttgtcctcctattccttgcaaaatggctacaggaagaaaaaatcctttaggaatttctgtgagcactactcaatctcctagagatcttatcaaaccaaaattcttgttagagggtaaattttcagtaatgaaaaacattcatatgatagagtactactatcaagagcacacagtagatttggtaaacagac

SEQ ID NO: 1563889 - DNA, 4001 bp, Homo sapiens
gatgaggatggcgggtgggggctggcaagagccagatcacacatggccttgaattacaggccaccataaagaattgggattttattctaaacgcagttggaaaggcactgaagggtttcaagctggagagtgacatgatctaacttgacatcatggtattgccaaaagattactgtagtgaaaatcagaagacatgagcactagtcctggcctagccaataacatcagggattttgagcaaatctcttaatctctctagacctcactttcttcattttaaaaatgaggaggttgccccaagatgacctttaagatcttgtttattgcctaatttctgcctgtattctgcttcctcccttgggcataaataaatgactattggggtgttactagctcattaggtcgaattctgagttacttcttaaaatattataaaccatgtattaacagctataatagttacatttctgtagaaagcaattgaagaaggatctctttattggaaccagctatattattagaaatgggaactctgggtgaaaagtgaatcaagtgcttttgcaactctctggaacaaagtttggggtgtgaagaaaattggcaaggaggtatgaaaagatttactgacaagtatttgaaaccgatttccatatttgttctatgtcatcaactgatgtataatctaggatggtttaaagttgcagggaacctctgctgagtactagtcaagatgtagaagcttaactcctttcacagtaaccaaaatgacaactgaggcaaaatattcactgagaatccactatattttaagacatgctagatggtttatgtttttttaaaaaatttaatcctactaactttattatttgcacttcacagatatgaaaacgggctcagaatagacaagtaagctatgtagtggcagggttaggattacaatcaatcttaaggtaggcaacatataaatccttatttaattccatatttacaataagttattccgtatgttttacaaaattactgtacaagcattaaatattcagttaagtacctgacaactcaagtatctgtgacatctggacacagaatgttcaaccaataaatcaattctggactcataggtactttgcaagatacagtttgggataagaacttgttccagcattggagggcctattttgtgggtagcatgctgggttgtatgaaagccaaatcaaacaaaatatccaaggaatttgtatacccaattaagtacacatcaatagtattatggcagtttccaggtacattttcgctagtgttgctggtgaaaggccagcagtggaaccgtggactggacaatgtcacccgtgttgtgggcctaacaagtatcctgcaagttccataaacacgagggcatgctaaaaacttaaccgatttccaacttacattaaccctttaaagggagcatgggacacaccacttgaccatttgaagcagtgcacacggcttgtcatggagaggaaaacctttgagacgtgcccagcatcattcctgtgagggtcgaaagggtccctaacacctcccacaaatacactcacaaacactccagcaaagttggggatgctcactgcacacctttcttaatacctggaacagagtacccacctgtcacatactcagcttcgaacctcctccgggtctcagagatgagcttggctttattctgggcgtgattctggatgggagacacgatgggaccttagatactacttgcatcaacccgcttaccctcaacccagcccacctgcacacgggcgctcggtccccgggcctcagaggcggcttccgggtccggggggccagcggcggtgcaataggctcctcacctctgccatgatcaccgtcgtggatgtgattgcggttgtcgccgtcgcccgttctaccgtcgccgaccgagtatctcatcacccggcagtcccgcccagaggtagacagagaagggtgggagggggaggcggtcgcgtgacaccggaaggcggacagaagcgccgccgcaccgcccaatccaatgcggacgcctgggtctggaggcgggaccaggccctcagcctaggtcccattcgattctcgtctggcctcgccccgcgacatcccccgcactgcggtcccgcccccgccagccgcgagatcgccggcgcttcccccgcggagctccgccctagagagctcgcgggctctctgctttcacaacactccccagggccccgcctcctcagcctcccttggccacctctcctggctggcttctaggctccgcctcctctgcgttcgacgcagcctccgcccggcctcccaggatgcagcgcgctggcgggaggtttggagcagatggataccgtatcgacgtggggcctccggtatgttgccgctgcgttgaggtaggatggggctggcgagtcttcccttcccaggacttcgcagagggggcgatggggctggatttcctccccttgtccccgcattgcgggagagagggaaggaagcgggcatcccgagacctgggtctgtcattccttgcaatgataattggattttaagtgctacattcgcttgaagtttttttcatcccttcagtatccttccaacttggagtgtgagatgcttaatgagcaaaatatctctgaaatctttaatctcaaataattatataaagttaaaaaaagcgtgtttcggcttattaaggtagttgtgttcagccgggggggtgggggggtgtgtgtggggggggcggttttaccacccaggggacctttggcaacctctggagacatttttagtcaccactgctaggggccgggggcaaaagagatgctcactggctactagtggatagagaccagggaagctgccaaacatcctccagtgtacatgaaaattcacaacagttatccagcccaaaatgtcaatagtgtcaaggttgagaaagatttagatttaaagggactggaacaaattttattcgtcagttaaaaacaattgaaagaaaatagttgcgcatacaatattgccttttttaaagttgaaagatactgaaaactacaaacaagttgtaagaatagtcccccatatttccatcaaccgtagtcatccatgacagaatggcatgttagcatcttttgtcctagacttttaaatatatttacattttttatgggaaaaaatgaacacattgtttaaacgttgtttgactacatccttaaaagatatttcagatataactaaagtctccttctacctctactcacctatcctggacacttccttgtccagaatcaacagcattcagaatttggcatgaaatgtttacagttttacatttttttattttggatcatactgcctgggtttgaatcctggctctgtcacttcttatctgcaagcctttgagaagatcctgaaactccttgcctcagtttctccatctataaaatgggatagtaacagtgcctatgtcataaggatgttgtgaggaagaaacgagttaatccaaagtgcttagagcagtacctggcactgtttcttcaggaaaaaaaaaaaaaatagtacatggcactatttcttgagaaagcactcagggactgtagtcattgtaggtaaatagaacatatataatgctgttttatttgttttacataaataatatgctgcagtgtacatttgtctgcaacttaatttttaattcattttatttttgaaatttaaccatgattatatatatatatacacacacacacacacacatatatagatagatagatctaattcattccttttaactcttgtttgatagtccatctatactcattcccctattggtgttcattgaggtttttactttttttatattgcaaatatcagcacagtgagcttctagagcaatgtattcattcatatgtgggattatgtctctgggtttatatctacaaatgaaactactgggtatatgcatttcagttgac

SEQ ID NO: 1563890 - DNA, 4001 bp, Homo sapiens
taaaaggctagaacttccatcttgggctatctcttggaacaccactctgggggaagccacgtcacaagcagccatatggagaggcccagatgacaaggaactgaagcctcctacaaacaactatgagcttggaagcggatcttccagctccagtcaaatcttcagagactgcagccccagctgacagctgagagtccctgagccagaagtcccccactaaatcacttccagattcctgaccttcagaaattacgtcagataactgttttaaactaagtgttggggtgattacacggccatagataatacactacccccatagttcgtttcccacccccttaccccccactcccccgctaaccccgtccccacatgcagaatttcgtgaaactgtgacacagactgcccacaaagaggacttctgctttaatgccagagaagataaaggggaatcttctagaattccactaatgtgcctgttttgtccaagaactaacgtcttcagaatctttgatagtgcttttaaatttctttgcatttgaaacctctatctaaagcagggttcaaacacttctaaacacctactttggggttcaccagtaaacactctggaactttccgcatccttcagaggcagggacaggggaaatttttgggtcaaatcgtagagggcagcctctgctatgtaggtaatggccttagcctactgccccaccaccccacccttctcgtttcccttttctcggctctgtggtttaagaatccgtaggaacccccaagattcctaggggaatactctgagctgccgctgttgaccactgacccctcacccccagctctagctagcattcaacagagttgataggtaaccagttttgcaaactgccatttcccccgtttttaaggataactaaaggaggaaagaacgattttgtcgttttacctatttacctagaatccagggttgatggcaattgtcctcagaattgtttatcctgtctccatggcagattctataattgctctccgtcgccaagagatcctaggttctcttgaggctgcactgtacctcacgacattcatttaaaacccacttcgaaacatttccctcagtagaaagagcccccagactttttttgatatacagatttgtgactgcaccaagctgtgagtcatgtgtgatactaagcaaccctgttcgctctggacatccaaaacaagtaacagaaatacgttcccaagagagctttaaaaaaaaaacaaaaaagctacgagttagtgaatactgtgaagtgcttttcattcaaagtcttcctcccccatataaactatcttgagttgcaggtcctgtgaagagaaagaccagctaatccaccctccccttctaaaaaacattttcagtttacaaaaaaggcaacactcaacttcggttcaatgttactttgtatttctttattaatcaaactgcaggtttaagtcagattcgcactgttttagagtcaaaaccgaggtcttcattggtcttttttcaggaggaatggcagttcagtgcttgtgacctgcagagatgagatcaggccctctcagttcttaagaagcttgtttcgggggctgggaacccgggctggtggcagcggcggcggtagccggagggtcgcgggctttagcctcggcgccgccgccgccgtagtagtagagtaggtagcgactggcctgcacactctgcgccatcacgttggtacagtggcacgccatcagcagcaggtttcgaggctgtacgcggtaggcgaagcgcatgaagatcgccgagtacaagatgagcgctgttgtcatgcggccactgatgatctccggcgacgccttcatgtctttaaaggcagccagcggaaggccccagctgaacgcgggaccccagaagtgagtgctgctcacgtattcccggaactccttgctctggaagttatctctcatcttccgccacagtaccgccatcctcgccatgatggaatagccgtaggcgtgcctacggatcaacagccagaccacaacgaaatagagcgcaaagccgagtacccgcagccgaccctgactgggcacacgctcgcgacctcgagccttcgcgtggctgccacaaagtgcgccgacagcacgtgccgctgttctgtcggaatgaaagggcgtggtttcaccctggcgccttcgcgttgactaccgtaaagtgctccagacggcacgtgccgctgtgctattggggcgaaaggcagtggtctcacccgcgggcctttgcctgaatgccgttaaagtgctgcagacagcacgtgctcctgttctgcgggcgtgcgaggccgtggctttgccctcgcgcctcatgtaaccgctgtaaagtgctccagactacatgccaatgttctgcgggaatgaaagggcgtagcttcgcccttgcgcctctgcatgactgctgtgaagtgctccacaagcacgtgcagcggttctgagagagtgaaggggcctggcctcatccttgcacctttgcctgactgccgtaaaatgctccagacagcagctgccgctgttctgtgggggtgaaagggcgtgggtttgcccttgtgcagacgtgactgctgtaaagtgctccagacagcacgtgctgctgtcgtatgttcctgtgggggttaggggaggggcgcagcctcacccttgcacttttgcgctttccgtggactgccataaagtgcatacagcatgcgtgcatgtgtgtgtcctctggcagaagtggaaccacagcctcagcctgcgttccccacaggcctgcagctgcttttaagtgctgagggttactcgtgccacccggagaggagagggtcaggctgcctgcttctcagccatgcaaagggaaactgcttgttctgcctagtccctggacagtgttgactagatgttgatacaaaattcctcaaccgggttcagaattttagcccttaacacaatttgcctgagtgttacttgcagacatagtgacatttcaccttaacattttagcatctgtctcttaaaaacaaggatggacccctacttaaccacaatgcaataatccacactgtaatatgcagagcatatttaaattttatagctttacggctgtatttttttttccttcttgttggagggggaagtcaggattcaatcaaaattcaagtttagttaactcctttgattaatatttaatctagaagcgttccctggctttttgtctttcatgacatggacatttttgaagagtccaagctcgtcgcttttcagaatgtctgtaagttggatttgtctgttttctcgttagatttaggttaaacattttttgataaaacaacttcacaagagatgttgtattcttagttgcatcacaatgcaaggcacatgatgtcactttgttccagcattggtggtactaagttcggccacttggttaagaagttatccgcggagaagctgcgaggatggtggagtgaggcgtgcggctgtaaattggcctctgggccgggggcgggctagctcccgggaggccgagcgcatctgttggactgtgcgaagagaagaaaaaaagagatcggccagaggaaaggaactaaccgaacattcttcctccctaccttgcagaggggagtggtcatctacactaaagcaaaggttccttatcacaggaagaaaattttccttgaccattaggtgcttttatattcatctcaaaaacaaaattctgaactcaggacttggcaaattcaatacagaggagctcctaggattccagttatcctgccaacttctccaggaagaaagaaacaacttgcatgggtcttctgctgtttgcttaattataaagacatcattttgcaagctgaaggctgagtttcattttaaacaggtgcttaggtggtggtattcgtgaatacttttcattccaagcaagaagactaaataagtagcaagtatggatgacttcaggg

SEQ ID NO: 1563891 - DNA, 4001 bp, Homo sapiens
gcccataagggaacacataggtttacataagaaccccgacacaaaatacatcatactgtaggattctatttatataaaattccagaaaaggcaaatctatagtgacagatcagtggttgccatgttccaggtggaggaaggtgactgactgccaagggtcacaggggaacttcctggaaccttgaaaatgtttattctttgtcatgattgtggttgtcgttacatgactatatacatctgtcaaatgtcatcaaactacacaattaaatttcatgaattctactgtatgctaagtgtacctcaataagacttccagaaataaatagattttttaaaaatagttgaggctcagccaagtgagtactgattgtggggaagaaaaaaatcacaagtccaagtttatggggaatcaggtaacagaacttgtaattttgtctcatcatctgtataacaatagcatctttcatgcctgtattatttctgcactcatttaaactcaggctgttgcaatcctgatttgaaatgacaggcaggtgtgaatgcctcactcgagtggaatataaagggtaaggcaatgcggtgcagcagacacaaaatctagcctcagttctgatgcccattacttgtttccttgagttaatgccacttagcccaaagagtctacagctctactgcttgccttatgttgcagggaccttcagttttttcatctgtgaaatcggagggttactgtaaatcccaaatgtccatctcttcagtcatttattaatttagcaaacatttctgaggacccacttattgggcacttaaagaagtgagtatgacacggccctgccctagaagaccttgcagtctaggaaggaggttcatgctgtgacttctgagcttctgcctggctctctggttctctctggacattttccccttgggacctggccagcatgctgtgaggaagaccaagccacagggagaggctgctggttgattttctggctcatggctcatggctccaaatgagtaagtgagccgtgtccccacctgacagaccctgagtgacgaccaccttgctgggcccaatcaaaacgaaatatgagagacaagaaaatgctcagtgttgtaaaccagcgagtttgggagagatttgccagtaacagataagcacaacctacccttagggcatctttgaggacggaggttaatagctatttaccagccatccatccctggaatctggattccttgttccacccgcaaatatacactggccaccctctttgcaccatagcacaaggggacctgcctaaatgaagaggaacagtgagtgagctctttagaaccagaagctggcttttacaatcatttctgctgacccaaacacaagcacttcaacaacaaccaggcagacctactccttgatgtgttccttaaagactttctgttactctgacttccgtccacgaggaagttttccttgcccttaataagcgcactgtccaggccgctgcctctcctgatttccaactggaaggactgctgggggcaaggatccactgcaccagcagcccggtacgaacccggccgcgcgctggccttgtcctcaccccgccggctatcgcggtctccgacctatggccaggacccgcaaggacaggccccccggggacagggaccgggacagggaaagtcccgagatgaatggccgagccccggcccagcgcccttgggactagcggggcccgctcacctctggccgactacgcttctgcagcaaatgctccaggtagaggtcggagagcgccgtgtgcatgctgcccccactctcgccctcgctcgccttgagggtcatctcgcagaagctggaacactggaacgcaagacagggcagcgctgggaatgacagggcccggggcctgcggggctgcggagaaggcgggagacgcggtgcggctgggccagtcaccgccccgcaggcggtgcgccgggagggcgcggacggagctccgcctacggcccgcccactcctgccctcgctccgcccatggaagtctcccacgccccggactccgcggctccctgcgctccgagaagcggcccttaaagggcctgaggaagtcgtagctgtaggtggccgcgtgagatgaatgccagaaagataagaaaggggagggggcccccagcttctgggtggttgagcacacggcccacgccccgttgggcctgagccgcccgggtgccctggccaaattcgtggggattgcagggaggcaacaagggaaatcagaatcggccggcttagtggagttcaaaagatgtaggtgaactctagactcttcccataaattgatgcgggcgcagcattaccctttgagatctggacattgcgaaaatgcctttaaggctgctgtgctgctgcaccctgtcatttaattgttgtgtgctgtttgatgatgaaacatcttattgccttcaaaaccaaactgtttttacttagggcagatctcctgctgtaaatgccacaaaatttttccggctcagcgaaagcaaaggcagcaaacattccttagtaaccctagaggaggattccttagcatcctaacgcattggagacattcaaacaccagtcacagcgatggaaggctttctgaacaaaacaaacatttaatgggcttgtacggctcttggtcccctaccccaagctagtagcctcacagtattagaagcagttcatcactacatgtaatcttattctgaccttcctcaaagcttcctgggaaggaggagctcatagccaagaggagaaaatccaagggcaacagtttagagctgcattgcccagttttctctaccaagaggccgaactcatgtgaatgacggttcccttcctcaagatcactctaaacgaacggggggggaggggggggtggggtggggggggagagattgaaattaagactgtgatattgaggcatggatagattaattgagcaatggcatagaatagagaaccccgaaacgcaaccatgcaagtatagaaatgtggtatatgatagaagtggcatgttaggtaagtaaacagggacattttattaactgacgctggaaaatggttatttatattggaaaagatgaaattggaatcctcattcatgtgatatggaaaataataataatctattccagatggattaaggaattaaatgtcaaaaacatacccttaaagctcttgacaggaaacataggcaaggaacttttagactttgggatacagatttctaaacaatgtagacaaaccattgaccatagaatggaatagtggtaactttgactttaagaattttaatttatgaagacaccataaagagcaaaaaacacagctgtgcattgggagaaaatattttcaatacagataagtggcaaggaattccaattgcgaatatataaaggactacaaattattaagaaaaacacaatccagtaaagaagtgggcaaaacacatgaataggcatttcaccaacagagagacgcatatggccaataaacatacatataaagagatgttcgacatcattagtgatcaggaaaatgcaaagcaaaactacaatgaaataccactgttcacccattcagttgtcaaaaatttaaaagtctaacagtaccaagtgttggggaggatgtgaatccatatgatttattgaatattgctggtgggagtctaaattggtaccagttgtaaggaaaacgggtttccattatctcttacagttgaacatacatctaccctctgagccagcaattctgctcctagagggaacaactattcccagtttggtctgtaaccttccaggtctccctctgtgcatctgcaaaatattcaggactagagttgccttgtttgtccaggtacgaaaaccatagtatggatggccttgctccaatttatactccttccatattttctcagccttatctacttcccaggcgatcaggcacttgatcaatg

SEQ ID NO: 1563892 - DNA, 4001 bp, Homo sapiens
gtattacttttatatcataaaaatctaaaacactaagagaaaacacattggataacatttatatcttgatttttgtattcttacaggcgagctacagcttttcttgccaatttacgctgtaatctacgattttcatcggtatcacgaagcacatgatcttctgctgcccatctatcccagctaattgaacaaaaaaggaaaattcagtactttagtttgatatgaaacaacgactaaaagtacctcaaagcaatagaaatgccccagaattacatttttagaaaacgatttaaatattttaaaatcacaaagaggaggcaaataaactgaaaaagtaactcattcagacacagaaacaactggggtttccagaatcacccagacagaatccaaatacaatcgacttaaaagtaactattcgtcacaataggcaagttctggtaacaaagtaaaaacaggaaatgaatcaaacttctctacaagtgtttctaaaacttaaagaagtttgcaacgctacaaagtaaagacaggaaatgaaacaaacttctctacaagtgtttcaaaaacttaaagaagtttgcaatgctacaaagtaaaagcaggaaatgaaacaaacttctctacaagtgtttctgaaacttaagtctgcaatgtttctatgcagcaaagacaatcaattttcagtctggtttaacaagttcactcaccttctgttccaaccattaaaatggatcagatattctgggatctttctgcctttttcgtctttcccaacaataacatcaacaatctgaaacgaagaaatatttcccacaaatggcagaacatacagaaaattagaagttagatcaggaaaactaattcacagacccttttttaaagaaagcattctctcctcttttagaccgacagccgggttgaaatatttttcctttcatttttttcccccaagtggacgccttcaaaataggaaacatccgtccaaccaccccgtgattggtctctgagcgtgagacagtgtgaggcttctgaagccattggccagccgatttgtcactaaggagagactccaggctagatgaaagctgcagccctgagagctctgggagttgtagtctcctgggctcccctatgtccagtgccaggatggctagctggagactctggaatccctccctgttgtgtccctagagggaacaactaaaactaatgatggggcgtgcccccccccctccgccccgaggaggctggagggcgaggagaaagagggatagcagacgcggttaaaagacaggagcagcaggggagggaactgaaggcagaatatgctcatccctttagggatgtcctttagcatctctaatggacagagctgtccagacatcgccaaagacacacctgggactgcccctgtccctgccgcctaaggcttcgcccaggtggccctaggaacccaggtctctgaaatgaaagcacctgggtgctttccttggggatctgggagacctggtgccaactcctgcccgccacccaaatctgaggagctgcaagatgtggctcagctcccggagacttaggtggaccggcccggggcgcgattcccatcaactatggtcagacccacgtaaatccttcagagtttgaaaacgtaaatgctgcaaggccctggggtacgaaaacactgggccaaccttgccctcgggatggggttcacggcctacaggcgggatggggcctaaactggactagggtcccagggacacaacgtcgcaagtcagcggccagcgccgtgtaactatgaattagaacctggatcggacggccagggcgtcccacaggagcccacccggcaccaggccgcacagaaggagacatttaacgcgaagacagaaaccgtattcgagaagcctcctccctcagcggccaccgttgcagtcgggggcgcaaacggtagccccggtaacgcgacaaagcatgggcgaggctcccaaccgcgcgtgcgccgcccggcctgacggaaggaagtggaagcatcccagaccccgccccgactcccgggcgtagcgccctgtgagcgccccctgccggccgcaccgctcctcgcaggccgaggagcccggccggtccctcagctccgcgcggccgtccgcccccgcccccgcccccggtcccgggtcccccagcccgcgcctcctccctgtccctccgcggcggcaccttggcatcgtacagcactcgcgccttggtggggtcaggctcgaagcacagcactttctcccctgagtggaatttaaatttcatgccctcgctcgcgctcatttgctcatcgtggcggagggcgaggctccggggcgggcggagcgcgcgcggtgggggagggcgggcgggggcggggaggcggtgcgccgtggccggggggggccgggaatggcggaggctgcggccgccccgccctcggcccctcctccgcccgccccgagccgctgccgggacctcggaggcgcctggcgcgcgcgctcccgcccgggcgcgtccccgcacgtccccgccggggctccgggaggggtgcgggcggggagcgcgaccccctggccaaggtctaccggcaggacgtctcccgtcgcccccatgggagagggtccccgcggcctccaggctgcgcccacgtgcgcgcagggtcgtccgtcgccccgagcgcccgctctccggcccgggcgtgggaggcgcctagggagagagagagccggtctggagtaggcacccggcggccgggaggctggacggcgtctgcccccaagagctccctggccgtgcgcgccgcgtcagcccccttggcagagcagcgcgccgatgagtgtggccacgcttggagaacgcagcgctggagctggccccaggcgggcagtggcctcgggcgagggcagaagggcactccgggctgtgaatagaacacttgcttatcccttcagaggacaagccggtggcaggcctggagcccccagtgacgggttgagcagtgggcagcgaggcagatgggtccttaaagagtagctgacgtcttcagtgtcagcttctagcgtggcctgacagcccccagcatccccggaatgccccccacggtctatctgctccaatagactaaaaattccctaaatagaagcacccttgaggccgctatcaatatggtacctgcacagagtggatgttaagtaaatacttgatgagcgaatgacaagtgatgggagacttgaaggacaaacttccagggacaggaaggacagtgctgggctttttcttttgagttttggaaagccgttgggcagtgtaattactggattaggaccgggctggagaccagcttccaggctaatctctgcggacctggtgaacttccccttctctgttctagcctccagaaagttgcatttgcttcccctctgcacgcttccttcaccaggttcctggtatacatccttcacatttcagcgtgggcatgccaacagaaaagccctcaggcttcccaagatgaatcataaagccctgaggtgttccctcccaggactctgcttaacccctttcttgcatgtaccactgtgctatagaatgggttgttcatttgcaaaatgacctcattaagacagtaagctctttgaagctgggggtaggggtcttatccaattcatcacggcgtattcgtggcacataatatggaatgaatgaacagattgatttaggaaatagaacccacaaaactcagtggccaattggatgtgaaggagagggaaggaggaatcttgagagacttccaggttttctggcccaaggaattgggtgagtaatagctgcatccgccagaataaggctatacagaggagttaaaggttgggggaagatggtcaaatggcctttggggtaatacggtgcagaaactagaactggaaccatgattcctctccaggttgtggtgtatcagagatgagaacagtagatggtggtgttcc

SEQ ID NO: 1563893 - DNA, 4001 bp, Homo sapiens
acaataggcaagttctggtaacaaagtaaaaacaggaaatgaatcaaacttctctacaagtgtttctaaaacttaaagaagtttgcaacgctacaaagtaaagacaggaaatgaaacaaacttctctacaagtgtttcaaaaacttaaagaagtttgcaatgctacaaagtaaaagcaggaaatgaaacaaacttctctacaagtgtttctgaaacttaagtctgcaatgtttctatgcagcaaagacaatcaattttcagtctggtttaacaagttcactcaccttctgttccaaccattaaaatggatcagatattctgggatctttctgcctttttcgtctttcccaacaataacatcaacaatctgaaacgaagaaatatttcccacaaatggcagaacatacagaaaattagaagttagatcaggaaaactaattcacagacccttttttaaagaaagcattctctcctcttttagaccgacagccgggttgaaatatttttcctttcatttttttcccccaagtggacgccttcaaaataggaaacatccgtccaaccaccccgtgattggtctctgagcgtgagacagtgtgaggcttctgaagccattggccagccgatttgtcactaaggagagactccaggctagatgaaagctgcagccctgagagctctgggagttgtagtctcctgggctcccctatgtccagtgccaggatggctagctggagactctggaatccctccctgttgtgtccctagagggaacaactaaaactaatgatggggcgtgcccccccccctccgccccgaggaggctggagggcgaggagaaagagggatagcagacgcggttaaaagacaggagcagcaggggagggaactgaaggcagaatatgctcatccctttagggatgtcctttagcatctctaatggacagagctgtccagacatcgccaaagacacacctgggactgcccctgtccctgccgcctaaggcttcgcccaggtggccctaggaacccaggtctctgaaatgaaagcacctgggtgctttccttggggatctgggagacctggtgccaactcctgcccgccacccaaatctgaggagctgcaagatgtggctcagctcccggagacttaggtggaccggcccggggcgcgattcccatcaactatggtcagacccacgtaaatccttcagagtttgaaaacgtaaatgctgcaaggccctggggtacgaaaacactgggccaaccttgccctcgggatggggttcacggcctacaggcgggatggggcctaaactggactagggtcccagggacacaacgtcgcaagtcagcggccagcgccgtgtaactatgaattagaacctggatcggacggccagggcgtcccacaggagcccacccggcaccaggccgcacagaaggagacatttaacgcgaagacagaaaccgtattcgagaagcctcctccctcagcggccaccgttgcagtcgggggcgcaaacggtagccccggtaacgcgacaaagcatgggcgaggctcccaaccgcgcgtgcgccgcccggcctgacggaaggaagtggaagcatcccagaccccgccccgactcccgggcgtagcgccctgtgagcgccccctgccggccgcaccgctcctcgcaggccgaggagcccggccggtccctcagctccgcgcggccgtccgcccccgcccccgcccccggtcccgggtcccccagcccgcgcctcctccctgtccctccgcggcggcaccttggcatcgtacagcactcgcgccttggtggggtcaggctcgaagcacagcactttctcccctgagtggaatttaaatttcatgccctcgctcgcgctcatttgctcatcgtggcggagggcgaggctccggggcgggcggagcgcgcgcggtgggggagggcgggcgggggcggggaggcggtgcgccgtggccggggggggccgggaatggcggaggctgcggccgccccgccctcggcccctcctccgcccgccccgagccgctgccgggacctcggaggcgcctggcgcgcgcgctcccgcccgggcgcgtccccgcacgtccccgccggggctccgggaggggtgcgggcggggagcgcgaccccctggccaaggtctaccggcaggacgtctcccgtcgcccccatgggagagggtccccgcggcctccaggctgcgcccacgtgcgcgcagggtcgtccgtcgccccgagcgcccgctctccggcccgggcgtgggaggcgcctagggagagagagagccggtctggagtaggcacccggcggccgggaggctggacggcgtctgcccccaagagctccctggccgtgcgcgccgcgtcagcccccttggcagagcagcgcgccgatgagtgtggccacgcttggagaacgcagcgctggagctggccccaggcgggcagtggcctcgggcgagggcagaagggcactccgggctgtgaatagaacacttgcttatcccttcagaggacaagccggtggcaggcctggagcccccagtgacgggttgagcagtgggcagcgaggcagatgggtccttaaagagtagctgacgtcttcagtgtcagcttctagcgtggcctgacagcccccagcatccccggaatgccccccacggtctatctgctccaatagactaaaaattccctaaatagaagcacccttgaggccgctatcaatatggtacctgcacagagtggatgttaagtaaatacttgatgagcgaatgacaagtgatgggagacttgaaggacaaacttccagggacaggaaggacagtgctgggctttttcttttgagttttggaaagccgttgggcagtgtaattactggattaggaccgggctggagaccagcttccaggctaatctctgcggacctggtgaacttccccttctctgttctagcctccagaaagttgcatttgcttcccctctgcacgcttccttcaccaggttcctggtatacatccttcacatttcagcgtgggcatgccaacagaaaagccctcaggcttcccaagatgaatcataaagccctgaggtgttccctcccaggactctgcttaacccctttcttgcatgtaccactgtgctatagaatgggttgttcatttgcaaaatgacctcattaagacagtaagctctttgaagctgggggtaggggtcttatccaattcatcacggcgtattcgtggcacataatatggaatgaatgaacagattgatttaggaaatagaacccacaaaactcagtggccaattggatgtgaaggagagggaaggaggaatcttgagagacttccaggttttctggcccaaggaattgggtgagtaatagctgcatccgccagaataaggctatacagaggagttaaaggttgggggaagatggtcaaatggcctttggggtaatacggtgcagaaactagaactggaaccatgattcctctccaggttgtggtgtatcagagatgagaacagtagatggtggtgttccccacaaatggcaggggcggcttggaagcacatgtaattgcacgtcctgtgtaaaccgtaactgaagtattcacctttttatttttcctgcccatgattggagagagttctgctgcaggctctaccctttcagggataggattttagatgctttcctttgtttctccgcatttccaccccttcttatgtcattgaggaattcctctttccccgtccctctaaaaagtccaagaatgcaaaagccttcaggaacctaaaagttaaaaagcctgccaatggcagcaccccttacagtcctcctccagattaggatccactagagagggctccacccttaatgcaggacatcatttttcctctcgggtgtaaaggttaagaacatggccagctctgcaaaccactctccaggacccagtcccatgct

SEQ ID NO: 1563894 - DNA, 4001 bp, Homo sapiens
caaagagaaagtttttacaataaaaactttataccacttcagtcttttcttcaatatcactttcttcacttatttcttcatccttgttttcactacagtcagaggaactgcttaatgctaggtgaaacaaaagcatccggtaaactcgcattttatacttcaccaacccttatgtctacagatcttcacgtgtagtgtgggtgctactggaaataataaactgcaattccatgtatttttaaatgccaaacacaaatactgtatctttcacaatagaaatttattttgacaaccaatttcaatggatgcaaaaatcacactagctaatgatcggaaagtgtattgtcagttaggatcctacagtttcctgttgcattcataaatgggaccaaggcctgggaggtgccaaaaagagaacagatcccatgagaacacacccatgaggggtttgtacaaagatgctggccgagagggcagtagtcacaagcatgactctgctaacgttctattactgatttactgacttatattgactgctactttaattgtcaaaaataaatggggcaaatattatacataatgagcttgaagtgtttccctgtctagaatttcagtgaatccttctctcagtctaggtggaagttctttcagccaaaagaaatgaagtgaagctactcacagttttcatcattttcatctttttcttcagtggggaggccttttaagacagagtccacaccaggcaacctgcagcgcttcttctttcttcctgtgctcctcctgaaaaagagtagcaaacaactgaaataagttttgacattgaactcgtgagtcttgagatcaaaacaagatataataaacaatgaaatacatttgaaaaattattaaactttagaacataaatggtaatttccatttcagaaaattatacaataaccactctgaaaacactgttatttagaataccataggaacactcttccccttacacactttaaatatttaaaattatttaataaatgatatttgtcattgtattacttttatatcataaaaatctaaaacactaagagaaaacacattggataacatttatatcttgatttttgtattcttacaggcgagctacagcttttcttgccaatttacgctgtaatctacgattttcatcggtatcacgaagcacatgatcttctgctgcccatctatcccagctaattgaacaaaaaaggaaaattcagtactttagtttgatatgaaacaacgactaaaagtacctcaaagcaatagaaatgccccagaattacatttttagaaaacgatttaaatattttaaaatcacaaagaggaggcaaataaactgaaaaagtaactcattcagacacagaaacaactggggtttccagaatcacccagacagaatccaaatacaatcgacttaaaagtaactattcgtcacaataggcaagttctggtaacaaagtaaaaacaggaaatgaatcaaacttctctacaagtgtttctaaaacttaaagaagtttgcaacgctacaaagtaaagacaggaaatgaaacaaacttctctacaagtgtttcaaaaacttaaagaagtttgcaatgctacaaagtaaaagcaggaaatgaaacaaacttctctacaagtgtttctgaaacttaagtctgcaatgtttctatgcagcaaagacaatcaattttcagtctggtttaacaagttcactcaccttctgttccaaccattaaaatggatcagatattctgggatctttctgcctttttcgtctttcccaacaataacatcaacaatctgaaacgaagaaatatttcccacaaatggcagaacatacagaaaattagaagttagatcaggaaaactaattcacagacccttttttaaagaaagcattctctcctcttttagaccgacagccgggttgaaatatttttcctttcatttttttcccccaagtggacgccttcaaaataggaaacatccgtccaaccaccccgtgattggtctctgagcgtgagacagtgtgaggcttctgaagccattggccagccgatttgtcactaaggagagactccaggctagatgaaagctgcagccctgagagctctgggagttgtagtctcctgggctcccctatgtccagtgccaggatggctagctggagactctggaatccctccctgttgtgtccctagagggaacaactaaaactaatgatggggcgtgcccccccccctccgccccgaggaggctggagggcgaggagaaagagggatagcagacgcggttaaaagacaggagcagcaggggagggaactgaaggcagaatatgctcatccctttagggatgtcctttagcatctctaatggacagagctgtccagacatcgccaaagacacacctgggactgcccctgtccctgccgcctaaggcttcgcccaggtggccctaggaacccaggtctctgaaatgaaagcacctgggtgctttccttggggatctgggagacctggtgccaactcctgcccgccacccaaatctgaggagctgcaagatgtggctcagctcccggagacttaggtggaccggcccggggcgcgattcccatcaactatggtcagacccacgtaaatccttcagagtttgaaaacgtaaatgctgcaaggccctggggtacgaaaacactgggccaaccttgccctcgggatggggttcacggcctacaggcgggatggggcctaaactggactagggtcccagggacacaacgtcgcaagtcagcggccagcgccgtgtaactatgaattagaacctggatcggacggccagggcgtcccacaggagcccacccggcaccaggccgcacagaaggagacatttaacgcgaagacagaaaccgtattcgagaagcctcctccctcagcggccaccgttgcagtcgggggcgcaaacggtagccccggtaacgcgacaaagcatgggcgaggctcccaaccgcgcgtgcgccgcccggcctgacggaaggaagtggaagcatcccagaccccgccccgactcccgggcgtagcgccctgtgagcgccccctgccggccgcaccgctcctcgcaggccgaggagcccggccggtccctcagctccgcgcggccgtccgcccccgcccccgcccccggtcccgggtcccccagcccgcgcctcctccctgtccctccgcggcggcaccttggcatcgtacagcactcgcgccttggtggggtcaggctcgaagcacagcactttctcccctgagtggaatttaaatttcatgccctcgctcgcgctcatttgctcatcgtggcggagggcgaggctccggggcgggcggagcgcgcgcggtgggggagggcgggcgggggcggggaggcggtgcgccgtggccggggggggccgggaatggcggaggctgcggccgccccgccctcggcccctcctccgcccgccccgagccgctgccgggacctcggaggcgcctggcgcgcgcgctcccgcccgggcgcgtccccgcacgtccccgccggggctccgggaggggtgcgggcggggagcgcgaccccctggccaaggtctaccggcaggacgtctcccgtcgcccccatgggagagggtccccgcggcctccaggctgcgcccacgtgcgcgcagggtcgtccgtcgccccgagcgcccgctctccggcccgggcgtgggaggcgcctagggagagagagagccggtctggagtaggcacccggcggccgggaggctggacggcgtctgcccccaagagctccctggccgtgcgcgccgcgtcagcccccttggcagagcagcgcgccgatgagtgtggccacgcttggagaacgcagcgctggagctggccccaggcgggcagtggcctcgggcgagggcagaagggcactccgggctgtgaatagaacacttgcttatcccttc

SEQ ID NO: 1563895 - DNA, 4001 bp, Homo sapiens
cagtcaatctgcataaaaatgccttcagtatttaggtaccctcattactccaggcctgactacaaacagcttatactccattctctctccattcccaggaaaacaataaacacgctgtcttgtcttctttgccactttgactcagatgagacggttaatgcaagtttgaagcaacttccaggcccatgaagctgtgtttcaaagtgggctatctcagaactgaggatgagatatgccactacagaagaaagaccgtggagcaatgtctattcccagagatccacccaactgttcaggcaaagccgcaccttaagaggagtcaggagtcaaccacagagagagacccaaagagccgctcctgacaggatctttataatcttgttttggcagacaatgggatattttcccctctctccaaaaccattactctctctctttgggggcggggactagggaacaaagtgtgtaaaagcctcatgtcctaaaaccacaagcaatttaaaggagatagacagtgaaagcacatactttttgaaaacttggtgtttctgaaggacaaggttctggaaaggcaagaacgacttggcagtgaggctggtatacagtaacgtggcaaccaaagctcatcacaaacccaaaaggctgggcccccaactctcctcctctcatcccaggggaccttcagcccttttcaaggctactagtcactatctcacctctacaaggctcaagcagtcctggggagacatgtttgggagcactgcattgcctaggccagctcaacaagctgtttggcctaagggactcaagccagggtggtcaccaggcctttctgagcaagggaagggcctcagcagccatttggcatgacttgcacaaaagcaagcagagctcattagtcaggcacacccctcctcccctctccctcctgggcatccggcccccctatccccactcccaggaggcttctgttcctctcgtaacagccagtggggtggagacgcatccccaaatcaaccaccactctagaaaggtgtggccccacgagaaaacccacaccacacaaaatagtccggaggggataggaggagatagagaggcattaagcaataggaggggcagggatttggaggtggagaggagggagaaaccggtcctctctcccaggagatggggtaggcctctcctcagactggtgcctaaataagtgttggtgctctcgggtgcagcctcgatgacgatttcctcacatctctctcctcacctcctagtggaaaacagctggagccacccggtgaggctgtgggaaagatgagtgggggtgccggatccgccccgagcggctccctcctttctccctgcttctctgttcccatgtcccctcttggacattggcagccttgccccagaaaggtgccaattcctgggttggggaaagtgttgtcttctggaccagaatcctctcctctgtgcccatggcccatcagggaaaaggggaaaccccaggccccaacgaagccgtcctgactgttgcatctcagacacagggaactggaacctgagaaagaggcaggcctcgccccgtccaaacttccagcctggacaccccctcaacccctgagggcgcaccagaccaggatcccactccggtcccctccctacccttggctatggcggagggcgcggcgtcccaggcgggccggtggctggccaagccctcagccatcagcaaagggctatgaggctcagccagagccattggggtcgacagcgcccacctccggcactcaccgttttgggcatggtggcggcaaaggcagcggagttggcgaagtttagctaggactgtcgggcagtgctgagcacgcagtacacacggcttggattcggctggccggggactcagattgggtccctcactagcgtcggggcgactgttaggcttcctgctaacgggccacgacttcacaaaccccacccaggaaagagccgcccctgtcgcgccgcccgctcctttatgtggcccggcttccgcgccgctccccgccctcgcgcccgcctccccgccgaccgctggccttgccccgcccagccccgcctggccaggcccggcgcagccaggccacagcggccacgtggggggcccggctgggcccgggcggacctagggtagctaccactccccacccagacccacccggctcctctcccaccctggtcacagcccctagccttccacgtcctggccttccagccccacccccactcagggcccagaccctgggccctgacagatgcttactcagcccctgactgcaactttccactgatggggagctcactacctatcttttccttctctagacagctctggctcttagaaagttcttgccgtgtctgaactccttttctctatggcttccatccatggatctcagttctgctccctgaggccacacagatcccctgttgtccctaacagctcctcaaaggcctgaagatctcaggtccacaggaaacttctcttcttttggctaaactgcctcacctcttaaaacacttcatccattctcttccgtaggactctccccatcatatttcctacccatccttgctcagtcctcatttatctttccttcatctaaatcccagtcttcaccttcctcaaatcagtgacctgatcctttagcccctctcccagtacattcactttctgatgtcctgatggggctggctataattccctcaggttagatgtgacctccctagtccacacccttggggtttgtctgccagctccctttctccttcttgtcaaggtcacagaatcccaggatggcagtgttctagactgttgaagtcgtctggtcaagtctgagttttaggctgagtgcggtggctcatgactgtaatcttaacactttgagaggctgatgcaggaggattgcttgagcccaggaattcgagaccagcctggggagcatatcaagaccccctcccatatctatacaaaaaaaataagtgagagccgggcatagtggctcactcctgtaatcccagcactttgggaggctgaggcgggctgatcacctgaggtcaggagttcaagaccagcctggccaacatggtgaaaccccgtctctactaaaattacaaaaattagccgggcacgtgcctgtaatccgagctactcgggaggctgaggagggagaatcgcttgaacccgggaggcggaggttacagtgagtcaagactgagccagtgcactccagccagggcaacagagtgaaactctgtctcaaaaataataataataatagtaagtgagaccatgtgcagtggcttacacctgtaatcctaccactttgggaggccaagacctgcagatcacttgaggtcaagagtttgagaccagcctgctcaacatggcgaaacctcatctctattaaaaatgcgaaaaaaaaaaacaaaaaaattagccgggtgtgatggcacgtagttccaggcactcgggaggatgaggcaggagaatcgcttccgggaggcggaggctgcactgagcccagattgggccactgcactccagcctgggcaatagcacaagactccgtctccaaaaaaagtaaaataaaataagtccgagttttagtttgaaagtggctggccatagtccttttttcctcctctccactggcaaccatgtgaaggcatggtctgagtatcctttgtgaggtaaggcaccacagatggtaagccagtttgagacaatggaaaggatacttgagaggtcaggacacctggcttctacgtatagctctgccattaactcatcctatgaccactatgtggccttgggtaattccctccccctctctgggcttgagtttccatttctgtagcaagaaaggactggactccggggcttccaaggtcctttcccactctgacattataaagggatgagaaaggaagtatactccctaggacaatagatgagccta

SEQ ID NO: 1563896 - DNA, 4001 bp, Homo sapiens; identical to SEQ ID NO: 1563271

SEQ ID NO: 1563897 - DNA, 4001 bp, Homo sapiens
tctaactatgaaaacagcaaaggatttgaaaaatacctctctaggtatttgaaatcacttactgtttgcatgtcggggtggggggaaatgtgagtaaaaatgaggctgggatgagcttaccatctaaaagacactcattggagaaatgatgactccaaaaaatctctttgattcagagatttacttttggatttatttcctttactggagcagcagctggcaatctaaaactagaaattcaaagtaatgcccaagtcattctcaatcatgccagcctgtttcactgtcattgtaaggtttcagagctctattttttctcatagcgctcatctctgccagaaaatatatcattgtttatttttttattgtgtgcctccccacatataaactctataaggcagggacctcagcagtggggctctttgctgtcttcccagtgcccaccgttggcattcttgtgtttgatgaatgaatgaaaccatcgacaacttaataaatgtagttagaactttaagttaaagagaccaatcatttactaactacactagaatctacaagccccccgtgaatgttatccaccctcaagcacccgggagggtactatacactggtgctgcaggcagcaccactggttcaaatctcccccatggtgtggaatctctgaaaagtagatttgattttgtgaagcagccaaaagccattcagaatcaaatctggtgaatacatgatcgtgcccaatatatatgttggatgaaggcaaacgtgtctgcaaagtaacaggcctgattgtcttatttggttggtaaaccgattttgaaggaaattcaaaatggtttgcagtctagcaaaattgctggctcagtctcaagactctaaggtgcttatttcacaaggaataatactgagctgtggtaaaaagaatccagactagacagacaccaagatacccccaaagagctggcttgtgatattagctttgccattaagttgccctgaagcccgggacatattagttaccctctctgggcctcagttcccccatccaggaaacaaatgaacaatgtaaacttcaggatgccagtcaattctaaaatgctataattttattcttgtgaagatctggtgtatctgtttcaaaaccagtcgcaacccacttcgcctcaaacgatgcgtgcgtctataaagctctaatataatttttgcagcagattcacttcttacttgcttaggcaaatactaaaattagttttcacttcctgagcgcagcaaaagacagttaagggaggcaacccggccacgggcgcttgctcgtgcctgtacatacttccgactgcgtatcagggaactaaccgttccctctaagatcttccctcaactgttgcaaaagcagataaacctctcgtgtatgacacagaaacactggccgagagcggccatcgaggcttcgcggccagtgccgggctgcggccgctccgcagggcccaccggggatgcgacggacgcccgctccgtgcggagggccaaggcgaggaccagccgcggagcgtcgccggggaggcagggcggacgcccggcccactcaccgccccgggacggggaagcaaagtccaggcagtggctgagacgtccgcccccagctccacggccagccaacccctacccccgtcccgaccttcgcccgccgccggccggccaccttgggcggggagaacgggaggaagccggaggtacctgcctgctgctccctggcctcagccctgccccgcggggacagcgacggcgcttggacgaaacccccacccaaccctgacggtgcggcaaggccccgcgcgacccgctggcccaaggagtcccaacttcctcctcccgatcccctcaccacgggtccccgcagtgcccggctccgagccaggccagccgtgagcgcgcacccacctcgggctccgggcgccaccgccgttgccaggctgctcggctgccgggccctgctccgccccctctggggtccgccccccacggcctgcccgcccccggccaccgcccgctgcccgcctccccgtgccggttggcgggactgcatcacgtgacggggcagggggcaggaagagtgcgccgggtcgacctggggagcagctccgaagggcggggctcttcgcccgagaggctgctgggaagcccattttgaagggtccgacgcatggaggcagctgggaattgtagttcgcaatatggtgctggggatgggcggggccaagatgccaggggccatccctgtaagggaagttggactgggcgccgggcggaggcggctgggaagcgtagtcccgggacccttgtctgggtctccccatttttcttcagtaaaggggaaatccagagggaaaacttctctatacaagactttagcggatgccactaaattgagctattattgggtacacagggttggctgcgtaaagttgagatagtataagggaaaaagaaatttcactgactctggggcaggatctgcaattcacaaactcaactaacagctggggtgtccctcagctgtgccagcacctttccaagaacgcaattgagacttagtgaacggaaacatttcagtccaaaattccttctacttgttgaggtttgggtcagacaactattgatacagtaaaaagaaagggacaggaaaaagagaagaaaggcaaacttcaagaagagaattcattgtgtaatcaaataaaacaaacaatctgggccgggcgcggtggctcacgcctgtaatcctagcactttgggaggccaacgcaggcggatcacctgaggtcaggagttcgagaccagcctggacgacatggtgaaacctcgtctctactaaaaatacaaaaattatccaggcgtggtggcaggtgtctgtaataccagctgctcgggaagctgaggcaagagaatcgcttgaacccgggagggagaggttgcagtgagctgagatggcaccactgcactccagcctgtgtgacaaagcgagactgcgtgtcaaaaaaattaaaaaaagaaaagacaacctggcacatagaaaaatgagcataatattctttgtactgcataatacttatacgcgagcagttcgagtaaataggatgactttatcatgacctgttttttttctcttgtatgtgttagttctccagcatctaaaaacagcattttacctgataccagtgtatatgtgtacgtgtgtttctacatagtcacacacatatacacatatattcatatatcatttatatatgcatatatatatgctttattgaagagtctagacttcttagaagagtaacaaagccatccagaatccaacccaacccactctttagccacttctcccagtgtgcctctttttgctcttcaccccaagctctggcctagttccagggaacttgatgcactgggttttttctttcctccagccctttccacttggtcctctctcctggatttgccaaactcctggaaagacagcagaatagcagctgctcctgggcccccgcacaattagaagtctcccccacccagcccttcttgttgtactgatgtcatcatttgcttacacgtctgctctgccaactcccctccccagactatgaactcctttgaatctcattcacttttgtgctgaatttcaaagcacgctcagtaaatttgcatgctagagaggctccctggtgggctgctgaataactctggattcctggtatctgtgaatcttagggcagagggatagaggaaaatggggatgggtggagggagggcagcagctgcctgggataccttgcatataataggcctggttaagtgtcccaagatgaggccaaagcttttcgatggagctgggaggagctgggggttaggaggtggggaaggtgcagagcagggatggtctcatcctaaggaggtaattcctgaagatttttccagggtccagccccagcccagccccacctctagaaaga

SEQ ID NO: 1563898 - DNA, 4001 bp, Homo sapiens
ctgacagtctctgcttcagctccttcccctttcactctattgtccacatagcaccatggagagcctactgaaatctacaacagatgatgtcactcctctgcacaaagtccccagtggctccccatggcctctgaggctctccaccatctggctctgtgacttctctaacgtcatcccttacttgtctctccctagctccctccctgctagtgacacctagtctcctcgctgatctaggaacacttggctcacattcacctcaggggctttgcacaggcctctgactagaatactatcacccccaggtatctgtatggctggatccctcgcctctttgggggcattactcaaatgtcagctttctcaggctttccctgatcatcaaaatctctgaaggaaaccagaagatgaggcatatttgggggtgacacattctggtctcctttggcttcttaaatgattctgatgcatgcccatcctgagtacttctgtgttcgcctctaccacctatctcatttatcacattcgatttccactgttggttggtttgtattctccactagatggtaagtctagcaaaatggtaaggcagcaaaagccgtgttgtgctattctctgaatcgcccagacctcgtgtgtggttgaatatttgcagatgagtgaagtcctcaccatttcaagtgctgtcttagctgtgactggttttcagtgacactaaccacttgggtgattaatttattaaaatatattgtaattacactgaggtagaaacaaaagtgaagggaatgtttcttgtttctgtgcttttggaaactcccaaaagtttggcacaatgggatgaccaagacaggcaggaatgggcatgtaaaactgactgagctacattccaacagtgcatgctgcctgagtgcactctggtgtcagggaaatggccaagttgtgggaaaactggatgttccgggttacacgataggccatctcttgtcgtcggaggaggcggtggcccctcccagttcgacacggtcactttatgtttctaactgatttctcttagttctgcagctgcctcagaagcagtaggcttgcttgtgtgttcatgaaaacaataaactggttccctcaaagtgtgaagaactgaaagtaaatggttctgttttcttgcctcctgagcagtttggacgttttccatctcagatttttgcctcgatctgcaccagctcccacgcccgcggggtcccatctccccgtcctcactcccaaccccccatcaaagaccctaagcagccacagcagaattggggtcttaaaaccacacgaggcaaggtgatgctagaagaggagagcccgggtgggatctccctcccaagaggattggtggcctgggcagggacagccaagcgatcgccaagggcagcaggtggcggcgccggaagtggtttgacagctgcgaagcccctcccggggttccaggagctggggctctcggggcggaagtgagccaggtgcgcggcccgcagcaggtccgagggcagcagtccccggatggggcgctgaggtttccgggggtgggggggaggagggcccagaggggatgaagaggggccgcccaccccgccaccgccaggccctgcgcagcgcgcggggagggggcgggctggcctcgcgcggggccctcgggagtcggggcgcgggaggccggggcagcccgggccccgcttacctgtccagggtctccacgctgggctgccgggagccggcggtggcgccccccgcggcccgaggaggcctcctgccgcccgccggccccgggttcgggcccccgccgccctcgcagcccgccgccgccgccgccgccggcctgtccatggcgcgccgagtcctgccgccttggggaagccgccgtcgggacgggagcggcggccgggaaggtttcgctgcttgcctcctgccgcccgctctataccgcccgcccgcctcaggcggccgccgccattagctgtcacctggcggccccgcgttacccacaaggccgcgcgcgcgggggtcggggggcgggagcgggggcggggagggcggcgcgcggggccggcgccgggaacccccacctcgcccagccccacctgggcgctcgcccacggagccttacagcggggatctgggacctcctgctccagcgacctgggtgcgtacagagccactggggttcggaatccccaaacggattatgcgtagcgtgcttcactctatagtcacaccgggttgactgcagagacgtggggtgtaaaaagaagtttgaagacattcaagtatcaaaaatgatttcccacctcagttgtccttcccggaaaaggtatagaacagctcaagctccctcggtcttgacatcttgaagcaggagcaattccgtgcattttagcaattcctccccaccccattcttccctccactctccccctccatacgcaccccgccgccccgccacaaacccacccccttgccatctgtagggcaaccaagtgttctgatgccgccctcggagcttccgcccatggtttatgttaagagtaacatttaacttctgttgattaaaaaatcactgctatgaacatcaagccaatatcttggtgaggcatttaggacatttgctttctgggctagatttatttccttgctcattttgtttgggttcgaatatccaacagctcatcccctctcacctcacccctgattaagttgggagtgggtgtgtggctcgtgattaagcctctttgcctgtgattgctctgggtgtagacaggaggcctgcgacccaggtctggaaaagaagatataaagggaacaatttgctcactgttaaaaggcagatctgcagacagggagttactcatgcccatcccagacccatcctgccccaccagcttaataacttcaaactgaactttgaggatatgatgcctgaagccccgacagccatcttacgcacaagaggaggtgagcctggggtaagaagatgacagagtgaggagggctaggaggaaggaaaggaagatccccagacaataatagctcctatctcacactggagaatcaccgactgcaggttgctggctttctaaaattattaaatcaaatggttaacccactgttatggactgaatgttttcatccccctgaagtccatatgttgaagccctaattccctgtgtgatggtatttggagatggggtctttgagaggcaattaggtcatgagggccaagctctagtctgatggaactggtgctttttaagaagggtcaccagagagcttgatctcatgcactcacatgcacacactgagaaaaggccgtgtgagtacacagcaagaaggtggccatctgcaagccaggaacagagcccttactaggtccctgctggacacttaatcttggactttccagcctccagagttgtgagaaaatttctgttgtttaagccacccagtctatggtattttgttttggcagcctaagcacactaagacacccacttttagttgggtattttgttacaagtagctgcaagcatcttagctgtgctgagaattgtcagaaagaaaacagtgcaactttaagcatattttaagtaccatattctttaagaaacattaggccaaagaggaattcactgtgacactgtcatacttccaattcagttaagtacacttaggatttagaggacagagatgaatctgacatatccctgcctaagatgttcacaatccagtgaaggggacagacaaattaacaatgacattacaagttggcaagtgctataatggggacaattgcacaggatgtggaacacctaccccaatccataggagaagaggaggtcaggaaaacttccccaaaaaggtgacataaaactgaatctttaaagatgagtaaatccttgatgaggcaaaggagtcaagttattccaggcagaaggcacagttatgggcaaaggtgtggattagta

SEQ ID NO: 1563899 - DNA, 4001 bp, Homo sapiens
ttaatattttaacactcaaggacaggagcagttctgcctccccatcttccccagttgtcaaaagagagaaaaaaggagtattcgagtgagctgattttgaactagacaagtaacgtggcccaagcttaggtgggttgggagaagagggagtctggacaacagaagttcctttcctttaatggtaccaccttcttataccatgtcagaggacccgtacaaatgacatgatccggaaacaaagggacacagaaaaaggcaaggctggctggcttttacacgggatgtggttatcctccacagagaaaggccctgaagaggagggagtcagaaaaaaaggttaaaggttggagtttgtgctttgcccatcaggcagcatcaaagttttatgctaaaaagtgggcaaaacattactagttacaaaaactctttcacacacatcctcttatttaatcccacaaccatcttgtgaagtgagccgggcaaatttcattatcctcatttggtaggtgtatcagtctgttttcacgctgctgatgacatacccaagactgggcaatttaccaaagaggtttattggacttaacagttccacatggctggggagacctcacaattatggaggaaggcaaggaggagcaagtcacatcttacatgcatggcagcaggcaaagagagagcctgtgcaaagaaactcccgtttttaaaaccatcagatctcatgagacccattcactatcacaagaacagcacaggaaagccctgcccccatgattcaaccgtctcccaccgggtccctcccacaacacgtgagaattacggaagctacaagaggagatttgggtggggacacagagaaaaaccctatcagtaggtgaggaaagctaaggctcagagaggttaaataatttgtccaaagtcattagctaagtagttggtgggggtgcagtgggcagcactttaattcaagtcttctggcttcaaaatccatgctctttccattaaaaacacgctggattttttaccaggacttcaattagcctggaccacgtgtgttatgatcaacaggaaaaaataaccacagactagttgtgaatttttcactgttccccagccccagacaggagaaaggagggaagtggatttgaaacagaaaggggctggcgttgggaagggagggagtaggatctggaaagatgagaggaaaaagtagcagaagtaactctaactcgggactggctaaaaacaggtgacaactggctagataaacctcttgggtttctcctaccggctgagcagagccagatccactctgccccactcctcttccttttccattgcccagctttggctgaagagatgctgtggcccccacaaaccctcacaggcatgccgtggagctggagcgagagtggggttctgggcaatccctggggaaggttagtggctggaggagccaagaggatggtgaagaaacgctcgataaaggaagtaactccgcaggaggcagagcaatgtggggtattcgcgaatggcggttacaagtgcagctagtataaaaagctgagataagggtgagtgtgaggtcaaggctagggaggagctggagtcagagggccagaacaggcgtgcaccaggagcgggggcggcgtcgcgtaaggggacagtggtgcagaccacctctttcccggccgctgacgcccgcaagcagatcctaagaagaggtgtttggttgaaagggggtgtggacccagaaagagaacccgggaccccccacaggaaagacgcgtcaaagaaggctgagaaggctgaggaggtgtgtctgggctcccaggtgagcaccaagaggaagctcgcggctgtcagcctcgcttaactcttctccttaccttgggtaccgtaatatgatccatgactgcagttcccgccaccggaagatctcagtgctactccagatgccgccgccaccggtctagccgcctcctgcctcaacccgggtttctacccccgccctcccggtcctggctcaaactctcgtcacctgatcctcggcgaaagctcctatcgcgacactttgaccgtagccgttcccgccatcttgcttcctggcaagtgcccttttcttcgggaaattgattattctggttcaggttcaacgtttggccgagtctttaagtcccagattcgagtactgccacccttctcacccttcttgatgctataagggctctgaacacagatatcactcctttactctaatattacaatgatagcatcctgcagcagtaacacaggctgccccatgctggcaattgggtttctgaagagcttcctagctgtgagaccttgggcaagtcaccagagaatattttttgaaatatggaaaggtatatcctcctctctatctctcctttatgtgtctgctgccatcaacctagttaaaatctggaatactacagtatcctcatcacttttgccatcgtagatatgggaagaggaccaagaaagggcccactggaccagctatcagatgaggggtaaataggtgcagaccctcagtggtgtgctccaagtcagatttgtggtggaaaaaagaacaatctgagagttgggaaatctggattctactcctctcaggtctgccactaacttgctatgtgaccttggggaaatcatgccacctctctgggtcttaagttgaccaaggttacaatgagggtattggccactatctcagggtaatttctagctctactattgcagtgttatggtttgcaatctcactgcccctacaaaataattttgttcttctttgagttcttataacatttgctagcaaaattactcgtttatcatattctgccttcttccctagcctgaaggcccttccctcgatccatgaccctattctcccttgtaccatcgttccatcatgttcagccctttcactgccaaatatctcaaaagaatagtctacttatcatcaccttcacttctccataacaaactcactcctccctaccactccactcaattggctctttcacatcatcctaaattccagctgctgattccaacagctcttctcagtgctcgttttctatttgttttacagcatttaaaactattgattcatattcctttttgacattctttcttcccttgacctttattataaacaaactcactgcctgcatccccaactgttccttctctgactccttcccagcaactttctcttttttttaagccattttcctggcttctatcctcattcctcttctattttctttcttttggttatcttgatctcttccacaagttaaacccttactcctggatatggcttggatctgtgtccccaccaaatctcatgtttaattgtaatcccttacgttggaagtggggcctggtaggaggtgattggatcatgggggtggtttcttctgaatggtttaacactagcctccttggtattgtcgttgccatagtgagtgagttctcacgagatctgatggcttagaagtgtgtggcacctttccctgcccattttcctcctgctctggccatgtgaagtgcctcactccccatttgccttccaccatgactggaagtttcctgaggcctccccagaaccagaagccactatgcttcctgtacagcctgcagaacggtgagccaattaaacttcttttctttataaattacccagtctcggttatttatttatagcagtgtgaaaaggggctaatgaaccctcagtaggggacacccaacttcatatctcaagtaccatgacctttttcctgagttcaaatttagaacttccaattgccctctgacagttctacttgcatgttcctgctagcacattaaaggcatcatggcccaaaacaaactcatctttcacactgtctcacaacccccttgcattttcccacctctatcacttgctctttctcaagtttttcctatccctactaattgcaccaccatatacccag

SEQ ID NO: 1563900 - DNA, 4001 bp, Homo sapiens
cataagaatagggtggttaaaagaagggtcttggtaatgaaatttatggtatagagttctggtgaatatatggtatgtagtgctcctaggaagatagtggtagttagggcatttattatgataatattcatgtactctgctataaagaagaggacaaatgagcttgtggcatatttgatgttgaagcctgagacaattctgactctccttctgttagatcaaaatgggctcggttagtttctgctggtgtggggataatcacattatggctaggggtaatgatggtaggagcagtcagaggagttcttgcattgtgatgaatgcatataagttaaatgaaccacttatcagtaaaactgataacaggataatggctagggtgacctcatttgaaattgtctgggccacagctcgtgatgcgccaattagtgcatattttgaattagatgctcatcctgatcatagaataaatggctaggattgatatggctagtataaataggaggcctatgttaaaattaattagaggatttggtatagggaggggagttcataagaggagatcgataggaagggctaggattggagcaataatataaagggtaatagtagatgttgagggctgtaagggttctttggtgaaaagttttattgcgttagcgaatggttgaagcagcccgtagggacctacaatgttaggtcctttgcgtagttgtatgtagcctaagatttttcattcgatgagtgtaaggaatgctatagcgatgaaagtagggataataagtaggagaaggttaattataggtatattgttaatgagaggagttgaacctctgattataaagttttaagtcttatgcaattgccgggctctgccatcttaacaaaccctgttcttgggtagggtatgtgatgatttgttagattgagatagcatcatctgtggagcgagggcactttatgaagtgggccctatttctcttgtcctttcatactaggggaaatgttaaatagatagaaaccgacctggattactctggtctgaactcacatcacgtaggactttaattgttgaacaaacgaacccctaatagcggtgacaccattaggatgtcctgatccaacatcgagattgtaaaccctattgttgatatggactctagaataggattgcgctgttatccctagggtaacttactccgttgatcaaattatcgggtcaatatatattaacttgcttaggctagtgcagtcttagtttaggttgctcggaggttgaattatgctctgaggtcaccccaaccaaaaattttaatgcagggatagtaggctagggcctgtaggcttaagtttttatttgcattaataaattaaagctccatacatagggtcttctcgtcttatttgtttatatccgcctcttcgcggataggtcaatttccctgattaaaagtaggagacagctgaaccctcgtgtggtcattcatacaagttcctatttaaggaacaagtgattatgctacctttgcacagtcaggatactgcggccattgaacgtatgtcactgggcaggcagtgcctctaatactggtaatgctagaggtgatgtttttggtaaacaggcggggtaaaatttgcggagttccttttactttttgtattctttccttagagcatacctgtgttgggttaacagtgtaaataataaagagcttattatatcgtttattaatattaggctaactgtcagtgggttattccagtctgatgtaagcttatgcaatggagaatgttttcatattacttatattaacattattgcttctattaagtaatagattagtccaatgtgatgttaggagttcagtagagtgactagaatttaagatagatgttgagcttaaacgctttcttaattggtgattgcttttgggccaactatggtggaaatattttttactctctgtaggaaggttgtttcctagggtctaaagagctgtctaaacttatggggagattaagtaattctgtgggtaagtttaaagttgaattaagatcccatcttggacaaccagctatcaccaggctcggtaggcttgtcactgctacttatgaatcttctcactattttgccacataggtaagtgtgctctttcagctgttcttcggtagctcgtctggttttggggaacttggctataattctctgtgtaaagttatttctagttaatacattatgcagaagatataagggtttgtctttgctttttgatgcttgatacagttctttcatctttccctgacggttctatgtctattgcgccggggtaaaaatttctattgcctatacttttgtctagggtaaatggtttgattaagataatttaataatatttttagtgaggtttggagctagagttggctcaaagtgatcaggtcgtgatgaaatcttccgggtgtaagccagatgctttgggttaagctacactttggtttgtccaagcacactttccagtacgcttaccttgttatgacttatctcctctatatgtgtgtagaaaatttttagtagtagtgatttctggagtaatacttgagggtgacgggtgatgtgtgtgtgtttcatggccttattcaaccaagcactctgctcttggtttacagctaaatcctccttgagccttggatttcataaaggttgtcgtgagagtttctgaacatagaaaatgtagcccatttcttgccacctcatgggctaaaccttgacctaacgtttttatgtgtgtacttgtgcttactttataacctttttagggtttgctgaagatggcagtatataggctggggggaagaggtggtgagatgtgtcggggttcattgattatagaacaggctcctctagagggatataaagcaacgccaagtcctttgagttttaagctgttgcttgtactactctggcgaatggttttgttaatgtaactatcagggtttagggctaagcatagtggggtatctaatcccagtttgggtcttagctattgtgtcttcagggtattaaagccactttcatagtatattttatttcagctgaagttttttacaacttcgttggagtttagctttattgagggcagaccttaaacactctttataccgagctctattagctcgggttaatcctatggccgcggtggctggcatgaaattgaccaaccctaaatattagtatagtttagttaaactttcgtttattactaaagatttattactgctgtttcctgtgggggtgtggttgagcaaggtgttttgagctgcactcgtgcgtgcttgatacctgctccttttgatccgggtgatctagagggcattttcactggggcaaggatgcttacatgcgtaatcttactaagagctaataaaaaggccaggaccaagcctatctgtttatggtgtcgtgtggacccatctaggtattttcagtgtcttgctttgaatagttaagctacattaactatataaatacttaaatgtaaaattaaaatatgaaaaagaaataagtacgaatggttgtttacagttctggaaattcagggtctttaaaattgaattggcagaggtttggccgagagggttagttataattagagtataattgatttaggacataatatatggggcagtgttttcagagggatatgctcaaagtatcatgttagtattagggcagaagtatagttattgcatttattgtatgaaatggaggataaatttggtgggagggtcttagattttttagaaaaagtacatcaattgaggggtagctgttggggtgttcgtcgttaaaacacgatttctcggctccgactgggttgcattttagtctcttgtttttggggtttggcaagggtacatttacctaggttgatggtaaagtcagagatggggggaggagggatttgcagattcaatcggagatagttcttgaaatcatacatgca

SEQ ID NO: 1563901 - DNA, 4001 bp, Homo sapiens
gtaatggtttgctctgtatatttctagatttttttctgtagagacttaccaatgtggaagctttttgaaactagaccctttattcctccagtaatatatttgaacatctttccatatcaataattattttccatatcatctttttgtgaattgctttacaaaattttttccacatttctaaaattttatgtttttctcatgatgaaaattattcaggcttgctcttttcaaaatgaaatttttaaaatggggaaatgtaatacatagaaggttaaaatattctgtctattaattggagatatgtgtggagatataagaacacttatatctccaattaataaagtggcatgtattatttccagatttctccaattaataaagtagcatgtatatttccaggtttttattgcatacactgtacgaatgcatgcacattctttttggtaaacaaataggattacatgatacaggccattcttcaatttgcttatttttagaaactaccttggacatttactctaatcattgcatttagagttaactcattccttttacagctgcgtagtattcaacattatagatatactatcctatatgactatgtcataatatgtttaaaacattttacgaattattcctcaggagtataaagataaatatgttctgcttgaaccagagtctggactatagcctcaatagttgaattgcaagaaaagcacaagcaatcaggtaatgagccttctcagacccatagaaaaatcctactgcagctaaagacaatggaatgtgtgtgtggctatttgctcaagtgtctgtaacaaaagtgattattcccttttcagctccattatcgtttccaaaagaatctaaaagtacataaaaatctaaagatgaaaatacacatcatcagtactcaaaccctgagttgttcacggcatacatttgatgtctaatcctttttatttttttcctcatcacatacatgtttgaatatactatttaaaattacatttatttagccacatatttgaacacctttccctgtttatatatgagtttacgctattttggggaaagtagcttttccccatgattttaagttctcatctcagtttctatgccgacatagaaactacatgctaagtaaaatgtggaagaaagaagtggaaaatttcctcctttttcccctgacatccttttttatcaggcatcctttattactaagtatattgtttgttgtgttttattatactaatgcacgtctgttattgttatgatcttttagattttttccattgcagtacaaataggaatgtacaattctcttgagagataggtagaagtacagacaaagatcatattttgcacattatttaaaaagctattatattaagtcattgtgtatcccttgacaaataaccaaactaattctcagagatactcgaatttgcacagttatgcattactttaaattactaacatactccaccaaaacagtaagatttgttagaaacacaacacattcaaagtaatataaaaaaccaacatccccaacaacttaatttttcatttaagactattacaacctttttcaaaataaggaagattaaactcccaagttttgtttcatcatttatctcagccaccactgccttttgatggaaacataaaatgctctattaaaaagttagcttttgctacctctttaagaatatttttccacaggtgtaatgttgattaccacctccccgactgtggacttttaaaataatctgaaggaacacaaaacacagatattaattccctcacagaaacaacgaccctcacagaacgacactcctttcccgttattcctaagcagcactctcttcttttctcacctttattccaaatcttcgagaactctctgaaaataactagcatttacgacagccattacctccaagcttctccacggaagcctccgaagcctgtgtgtaatgcagctcctccccgaagactggctgggcgcagctttcttccaagctcctagaggatgctccgccccctctccgtgatggggaaagcacgaggttcttccttcgcttaggagaaaaatgaccaacttaaaccgaaatacagttaaagggaagaaatgttcctcttaaagtactttaaagtgtaatggtaacctatgtctgttcaatttccattcaaccccctaggataggtgttttaatggaaaaagagaagcaacagcaaatctctttttcatataataaagatgtggttaaaacgttccttacatatattttttctgatcctcttttgtactttatttctggtaaatttaagacctactggccaaacttcacaaaaaaacatacgctaagtattttgatttggattacagtgaattaatactttattttaggtagaattaattctttacaattttgaatctgaacctgggacataatatatctctccttttattcaagtttcttatacttctttccttaggtcatttccaaagaaaaatcctcagacaaaatctgattatactgaaattgaaaaaaaaaatgtattaagcgtaaaatcaccataggccaagttaaaaaatcagccgcaaacttaggagtgcttttcaagtgcttttgtttgtccatatgattagataaacaaaaatatacccaagctagttctttcatttcaataagaaagaaatgaacaacaaagtagagaaaggggcaaagaacacaagcagagaattcccaacgtccttccctattcctgatattcacttcactgtgaagaaatctcaaagcagtgtaacttgaaggctctctgcgtcttctagactagagaaatatgcttctaggctgatggataggtttccttaagtctggagttctgttagtctcatttcactctcacaagcaaagtcctgcaatttatcttcccctcttaataaagctgacaattttggtttcatctgctattcaacttatttttaccacattttcttcattatttttaagatatgacaattgtaaactttttgtacccacgagattacctcaaaatgtataataatgcaaaaatggatagaaatacattattgggcaagtaagaaaaatttgattagctcttatagaagtaaaaggaactggtggtcagtgcctcctcctgaggctcttttacctacaaagtactttgatctctcccagattaatgtctgtttattttggtcttggaatgtgatttttttgtacaattgacaaaaattatatatattcaagatgggtaatgtgatgatttgatatatgtgtacactgtgaaatgattaccacaatcaagccaggtaacatatccatcacctcacatagttaccatttcgtgtgagatgagaacgctttagatctaccttcttagcaaatttcaaatatacattacatattattaactacagtcaccttttcatgtaccttttgaccatttgcacattttcattggaaaaaataactacccagtgtcttttactcatttttaaaatcaggttacttgctagttttttcttgacattgagttttataagtttcttattgtgggtattaattttataagtttctaattgtggatattgactccttattggatgcatggtttgcaaatattttctcccattccatgggttaccttttcattctgttgattattttctttgttgtgcagaaactttagtttgatgtagtcccacttgtttattcatgtgatttctaatagcaagttatctcaaaagctctgatataatttcaaagctcaaagcttctcagtattgcagctctataaaaaccgcttctgttcatgaaacattctgcaaaattgtgggacaaattctgctaatgtgtaacaaggacataatactaagaataatagtttattgaaatataacaacatcaagaacagagaactgataaactgtgttctataaagtcacaagaccttgagaaacattgcta

SEQ ID NO: 1563902 - DNA, 4001 bp, Homo sapiens
cggtgatcattttcttcttgtcctggcaatgcctatgtcatctaacatttttgtcatctcttgaatggcgttcacttaaaaatagtgacacacatggaaagtaaatagggatacacaacaaacacgcgcctgcccattcgcccgggttctgaacgagcgcgaactgctgattaaaattctaaaacccaggccggactcggtggctcacgtctgtcatccaacactttgggaggccgaggcgggcggatcacctgaggtcaggagttcgagaccagcctgaccaacatggaaaaaccccgtctctactaaaaatacaaacaaacaaacaaacaaaacaaaattagctgggcgtggtggcgcatgcctataatctcagctgctcgggaggctgaggcaggagattcgcttgaatccgggaggcagaggttccggtgaaccgagatcgagccattgcaccccagcctgggcaacaagagcgaaactccgtctcaaaaaataaaaataaaattctaaaatccttcctataagagaggaacatcccaaacctgtagcttttcctgcctttaagtgacctagaaaaggttattctcttaagcccgggggcgcgtctcccttcagctgcccataaagaactgatggcgcacaggtagttttgcaaaaaagcaagtccgggctccgcctctgggcgctggaacaaaccggctcctgcagctctgcaaaagtcctcggagttttctctctcgccagagcccgggctttccccgcccctgcctgcgcgcctgacctcggcgctgggctggttccaagggcagccgcgccagtccccagcgtcctgtgcctgcgggcggacttggcccgggcgttccataggactcttcagccccaactccctgtccggcctcccaccccggcaccaacctcccgggagacccaggaaactcgcccccagacaaccctaatcccggggactcggggtcgggtctctccgccgcggagaaagcggcctggcgccagctaggccgccagagacggtctgcgaaccccgccgggaagcaggggtgggggcgtgaggccgtctgctttcgtcttggccctgggcagacaacctggagtggccgggcgggcagccctgagcccctggccggcttccagagtccgctgggtcgcgtcgagctggctgcgggatgaattacgagctttcccggaacgcggctggggtggccctgcgagtccccgccgcccgggactcggacaccaaaccccttttgtctgcgtgatgactgtcccggtttttttgcatggctcggatcactctaggcgttgggctgtcccctttccagggaaagcctgggtaagagtaggaggaaagaggcggggaaggagagggggaagagaggagggagaggagacttgaagtagccacagcctgagcaacttggaaagaggctcctcaagcgtcctttcccccaccgattgcaagagcagagtgggcttcacttaggaattccgttggcagcttcctagaaacgcgggatggcggggttgaaggtctccagagagagccagggatggggagcgctttggggagagggaggaaaggaggcatgggatgtctgggcttaattagacctattcagtgcatcctccttcaagatccggctctcctccctatctgatccttagctacttaaaattgcaggaattcaggtatcctgatttcttagcaacttcaaacagtgctggggaacggtgcaatctgcctgcatgcaggccctttacccccagtgtttcccttgggtgtctcaaatcccttcaccccctgcaggcagacacggcagccctggggcgccctggccaccctgggtcctcacctgtccttgggaagccgccgcacacgggagcggtgcgccgggagcatccaccgagccggggcgcgcgagtcacggccgggagtttgccggggccatgcccttcccggggccgggggtgaggcagctcggcttcccagcgcggcacagcaagccggcgcccttttattcccggcgctgcgaggcttccccaagtccacgcctcggcacacccccaccctgccccaccccggggagacggggcgcgggcccgagccaagggaccctggccgcgccgctctgcgctcagccttcctctcgcgtcttcattgcgcctgggcccgggtgggcatgcctcgcccactccagctgcaagaaccgcaggcggctcggggaaggagggctctttgtcagagagaagtccaggaccccaggagggaagggcgagatgcagggagcgcggtgggagccgcagtagagtccgcgcttggagagcgcctaagcagcgctgggaacgtttccgttcctttcaggagagagagaaggagcagggtttgcgcttctccgggccagacggtgttttctcggcagctcttcccagaccgtgtgcaagcaggagcgggctggccccgccggcatcccactagctgcaggcagggctgcaacgtgagagccgccgccacgccctcccgcctctccaggactccccggcgcccgcctccctccccttgccagagtcttcctgccagaaaggtggaacggctcccctccggcttggggagcattcgaggggcaaggcgagggttgggacgttcggagagtctgatggtattgtctggggagggggcggtgggagggtgggagcgacctggcgacaaggcaaaaagtagagggtgcagagggtaggtccctattccaggaggcagaggaagaggaggcggcggctgcctggcttcctggataagtcagacctggaatggtggggagaggtcaggcgagtatcttcagtcagcagagccaacctggggtaaaaacatggagctcagacaggtgtgtagggcccggaaaggcaccattgcaccagcttgttgtagggtgcaccagcgactgcttttcgctatacctctggttagccgtattcctctccctgaaccagcattttgacatgtccttagggtcagtgtttgcctgttgtgttctttgatctacaaaagacatctgtgagtataaaaaaaattttttttacaagcccagtggtaccatgtacttgtacaacgaatcctgtctgctgagatgcccctgaagcaggctgatggcgtgcggcatttatgtatgtgtgtatgtatgtatatatgtatctatgtatttgagacagagtctcgctctgttgcccaggctggagtgccagtggtgcgatctcggcttactgtaacctctgcctccgaggcgcaagcgattctccacctccgtcccccatgcagctggtactagaggcttgcgccaccacgctgggctaattttttttttttggtgcggacagggtctcactatgttgctcaggctggactcgaattcctagcctcaagtgatccatccacctcggactcccaaagtgctgggattacaggcgtgagccacccagcccagcaggcatgcagcttttaaaaggcaatgcatggagaaagtataattgagaagtgcctgctctttagattcagaagtcctgccctacgtccagcactctgtcagggggctttcaggaggaaggaaggactaagcctaagaaacaagttgcttcccctgcatgaagcgtggttcatcttagctcctcctaagaaacacagcgtctaggaattcctcaccacctgcctcctgcgcctagggtggcttccacagagttgatagtcaggaaatactggttcataaatgggaattcattccttctctagctttagttttcagtgtgtgttgacatagttccagggattagtcaaataatgcccttaggtagcctctttctgggcatgccccaaacccattgattaaatcacgaaacaaaacaaaacaaaaaacaactgtctcttgaacatctctttacccttgttaatgatgttgccacccatctcgtcagctaaactagaaactcaagccatc

SEQ ID NO: 1563903 - DNA, 4001 bp, Homo sapiens
atagtatgattccaactctgtgacatcctggaaaaggcaaaaccatgcaaacagtaaaaaatcagtggttgccacgggttaaggagagggagggatgaatgcgtggaacacagtgaaactatcctgcgataatatgaaggtggacacatgtcatttggtcaaaaccatggggcttacaacacaaagagaagtgcagtaatgtaaactatgggtttagttaataataatatatcggccaggcgcagtggctcacgcctgtaatcctagcactttgggagacagaggtgggtggaaacacctgaggtcaggaattcgagaccagcctggccaacgtagtgaaaccccattgctactgaaatatacaaaaattagccaggtgtggtggcatgtgcctgtaatcccagctactaaggaggctgaggcaggagaatcgcttgaacccagggggtggaggttgcagtgagccaagatcacgcgactgcactccagcctgggcgacagggcaagactccgtctcaaataataatagtaataataataatagtaacatatcacattcatttatcacttgtcacaagtggaccacacaaatccaacatgctactaacagaggaagctggcagggaggggatgctgaggggtgctataagaactccatgtcctttctgttcaatttttctataaactttcaactgtactgaaaagaagaagcctattcattttttttaaagcccacagaggcatccaccagacacgtgtagcttctgtcttcctccttggtgactcacattttggccaggacataccccacaatcttcccattctcgtcctcagcaatgtaagagagctggtgacaggaaaacagagtgagaaaacttcttgtcggagctagaagagccctttagagggacacaaactggacgagtggcgagttgtgtgatggctcatgacctccgggctgagtggcttggtctccccctcgccacactgtgccctgcccatacccagaaagaagacgcaaagtggggatcctgcccctattctctgctcccttcgggcgccttcttttcctttgcccctgtctgccagctgaaaacacccaggacgccaccgaccatacagccccctgggctctgacagacttgtccactccctccaagatggccagatgggattttcctcggcctgctttcccccatgcccaaattcagaagctgcccacctggggccaggaaaggccatggtagaagtagtatttcatctggtagttctcgggcaggcagaggaggttgcagtgctgcatgttcattaggtcctctggctgcagggaaggagggcagtggaacgcgctcagtctaaggcggcggtgaccacgggtgagaagcctgctccccgtcggtctgctcggccccgctccctcggggctgggcaggcactgtgacgatctgactttgcacaacgcccggagcacaggaacaggagtgggcgccccggaggtccccggagcccacccaacggaggcccgacatcacgcaaacaggagggaatcgcagccccggccccgcgccccggcctcttcggcgggctgggccagccccataggtccagcggccgcaggcacactcagggccaccgggccgggctcggccggggccctcgggagcatgcgcggcagccacccggcccggcgcccacgcggcgcggacagcctcccgccccgggcgctcaccctcgcattgcggatgttcataacggcggcggggctcgcgggtcccagcggatcgtgaaggcgcagtcagctgccgccgcgctccgaagcgacgccgggacggccggggctgggaccggagctgggctcgctgggcgacggcggaaggggcggtgcgcgccgggccggccaccggccggaagtgcacggccgccgggcccgtcctcccggccgcttggccaatgcgcgggacaggccagcgcacggggcgggccaatgcgcggagccggtcagcgcggggcgggcctgggggcggggcgggcgctgccccggagctggagccggcccctccctcggcgcgacagcccccctcccgcgagcccacagacgcgcgcacagccgcaggtggagcggactcagcctttattccgcgcctcggcaggcgggggtgggggcgggggagggggcgggggcggggcggctcagcagggcgcccagcatctcctcgcacatggctaggcaccgcggcacgtggaagcagcctgcgggtagaggcgggcaggtagtgagggccgggggcagccgagaggcgcaacccctgcggccccgccctctcccccactcacctttgaaaggacctcccttgatggagagggccaccttgccctctcggctcaggtagccaaaccattccccgtactcgggatcgcgaaactggaataacagagacagtgacagctagcgcctgcaggacccgcccagatgccactgcatcgctaccaggggtcagagcctgggttgaccccaggtgacgtggctccagaaccagcgatcttaaccgcgacactgcgtcctccacaaagatgaaagcaggggtgggcgcagcaggcaggctacaactatataaccgactgggcaaggggatgagacactgctagatggaatgaaagaactctgccctggggtgtagaaacgttgtctatcgggccgggagctgtggcttgcgcctgtaatcccagcactttcggaggccgaggcgggcggatcacctgaggtcaggagttcaagatcagcctggacaacatggtgaaacctcatctctactaaaaatacaaaattagccggacgtggtggcacgcacttgtaatcccagcagtatactcgggaggctgaggcgggagaatagcttgaacacaggaggcggaggttgcagtgagctgagatcacgccattgcgctccagcctgggtgacagagcgagactccatctcaaacaaacaaacaaacgaacaaacaaacaaacaaaaaagttctctattgtgattgtagtcgtggttacgttgattcaaagaaacaaagaacccggccgggtgcaaaggctcacacctgtaatcccagcactttgggaggccgaggcgggcggatcacaaggtcaggagatcgagaccatcctggctaacacagtgaaatcccgtctctactaaaatacaaaaaattagccgggagtggtggcgggcacctgtagtcccagctactcgggaggctgaggcaggagaatggcgtgaacccgggaggcggagcttgcagtgagccaagatcgcgccactgcactccagcctgggcaacagagccagactccgtctcaaaaaaaaaaaaaaaaaaaggaaaagaaaagaaacaaagaaccctgatggaggcgacgacctgtcatgaaactcttaagaagtgactcccttggagctcccattcccggcttcacaggcctgtcttccagtagatgcacaatctcatctgactcctgtcctggctcaccattggtcccaaactcatctcctcctccctctgcccctgcccagtgcccattccactctctttccttctctctccactagcattccatggggcacctgtctcagggaggcttgtcagttcagccccttctcaaaaggatcatggactcaattacattgaagtccactatgaaaatgtctctttaaatggtggcccataagagttggtgtattcttctttgtaggaagtaaaactagtcctgggctgggcacagtggctcacgcctataatcccagcactttgagaggccgaggcgggaggatcacttgaggccaggagtttaagaccaggctgggaaacatagtgagaccccatctatacaaaaaaaaaattaaagaattagctgggcgtgatggcacacagctgtagtcccagctacctgggtggctgaggtggaaggatcgcttgagcccaggaggttgaggctgcactgagccatgatt

SEQ ID NO: 1563904 - DNA, 4001 bp, Homo sapiens
gattaagctacacaacactatactagtgttttaaatcatttaccacagtgtacatttcttgaaaacattctactactaaaactcaaggtcaaattaattagtttttgaacttttcttatatttttgaaacatatgttttaactaacactacaagaaaaatacagaacacaaggcttcttataccttgagtaactatatctagggcagttaatttcagggccatgtatactctgctctaacgatcaatgtcttctactaatgcctcaaggtttttgcaacaagctttaacttcctcaattgcagccatccaattatcataaataattttgtcataaattgcatcattaacttctctaactaccccctcctgctgagattccagtgcatcacctgagaaaaataatactgatcttggaattatgtaagtacgtaaattgtgaccaagtaaaaaatcatcatttccatcccttccatttgaggtgattccatgaggagagaaaaaattgaaaaatgaatccttgggaaaatcttcagttacagttcggattgttccccagatccgatgtttctgtttcttcttgatggttttcaaagtgacattctttccttcattccaatctatctcacagcctgtggaatactcaatcgcagttcccctatagggatggggatcataatatgctagctttgacttcagcacataggtctttgtcaacaactcatttttgaaatattcattgggtttgaagtgaaattctagtgtgaaactgaggggctcgccaggatctgaaagcttaactttaatatctgtcaggagcttcagaataggctcatcatatttcttaatcaaaggagtgagtgtatcaacgttttttaaaacagttagccaaaaatcaggaattcccttaggatcctcctcttctttattctcttctccagtagcctcaatgtcgtcctcctcctcctcctcctcctcctcttccacagcataatcataataatagtcctcataaccatcgtcctcatccacatattcatgtaccataccctcctcattaccatacatctcttcatgacacatttcctcatcatcacagtcctcagagtctgatttatattcacattcctcttctgtaggttcatagattgcattgatgatctgacgtcttttttccagtaagggttggtacatttcagcaaactttctttcaatgtcatgaaattccctcaggaatttggattctaaattggccgctctagtttgaagctttttaagggctaacacacggtacttaactttcacaggtagactttcaacaaagtctgtatctaaaacataaccgataagtccttttggacggtctgcctctgagtcctcatcagtatcgccaccttttttcccatcttccccggacccagcagcagtatcttcaccgttttccccttcttccccaagcccagcggcagcttcttcaccgcacttcccatcgtctccaagcccagcagcggcatcttcaccgcgctccagatgttccccgagcccttccaccattatctgattaccagcctcttcttgactggattctgacagctccttgcggttctctgactcggccatttttcaaaggaccgtacacgcctaaggtggctaccacagagatcgggagaccaaacctccacaggaaaagactcaccgaaatatcagaagcggcggtggtcggacctagcagtggcgtccggactgagggaacgacgatccaggctgctcggggataaaagatggtgctgaggctttgagaaccggactgaagcagtggcgacctgggctgggtgcagagggcggcgacggctgcgttgaccgatcctgcaggagagagccggagactgcagagagctgcagtgggcagacctcctccgcaagcagctactgctgcaagaaaaaaacggtgccgcagtatgattacgcagctatcacttgcctaaaatttctaggtgcaaatagattgctgcgtcacctccttccctcccacaactatgctctaatctcatttgctgcaatgtagtgactgacaaacccagagccagtaaattattagatctatcaagttttcaactctgctcaccttcccaggctctctaacatggctgattcatccacctcctcctcgtcctctagcccatctcccgcagagttttctggaatcccattgcgttcattagttcattcatccaacttttaacagatattatacttttatgctttccagagagctcagagaaaacgtaactaaaatgtcgaacaatgagagaagacaaggcacccacccatcctaaatcaatctctttgattttagatcggggacctggggaggggagaggtggatggtggaagagctgataaacaaacgcttcaaagattaaaaacaccaggaattagcactgatggtctttaggtggcgtgtcagttatttaaatattctatattatgtttgtcggtatttttcacaagctatatgattttaggttgaaaaattctcgaaacatttcctgtgaggggaggaggaggaagtccgatggcagtgggggcgaatgagggcctgtgatgaaaaactagtatggtgtatacaactacgtgactagtaaacataccagacaattaaccacaattaaccagttgcctggcttataaataaccccagtcccaatactgactttctgcttctccttcttaatgctggctttaacagccgttagaaatatacatatatacaaaagccaaaatggaaagttatgtttattcttagaaatcataacatttgcttgatgcttttgagttaattggaaataatctaaatctcagcattaaagaaatggttaaactatttgataatgtatttataggatggaaagctttgcagtaattaaaatttcctctctatagtaattattggtgaggtttattttgttcatatttctaacttggatcatttattaattgaacaattttttaaaattttaagtgactattattttccagatttaaagaatttgttactatcacagatattaaaactgtttacatattgttgtatttatttctaaattctgtcagtttatagataaatttttcctttaagtgaaaataccagatacaaaagaacaaatattgtatgattctactttaattaggtatctagagcagtcaaattcacagagacagaaagtagaaacatggttttcagaggcttggggtagggaggaaaggaagttattgttcaatgtgtatggagtttcagttcaagaaaaagaaaatattctggagatgtatggtgatgatggttcacagcagtgtgattgtacttaatgctcctgaaatgtagatttaaaaataggtaaaatggtaaatattatgttatgtatattttatcataatataaagtgtagagaaaaatattttaaagaccatattcaatatagtactggaagtcctacccagagcaattttgcaagagaaaaaaataaaggacatacatattggaaaggaagttgctaatttatatccttgttcaaagaagacatgatcttatatttagaaaaacctaaagactccacaaaaaaactgttagaactaacaaattaagtaagtttgcatgaagcaaaatcaacacacataaattagtagcatttctgtacaccagcagcagacaatttgaaaaaatcaagaaaacaatcccatttacaatagctacaagaaaataatacatctaggaataaatttaaccaaagaagtgaaagatctacgcaataaaaactataaaaacactaatgaaagagatgaagagaaccccaaaatggaaagatatcctatgcttatggattagaagaatcaatattgttaaaatgtttatactacccaaagaaatctacatattcaatgcaatctctatcaaaataccaatgacattcttcacagaaacagaaaacaatatcctaaaactttt

SEQ ID NO: 1563905 - DNA, 4001 bp, Homo sapiens
gtgttcaggttacaggtcagggttttacttttttcaaggctgtatgaatctgcttcacttcttgagattttaagattcttgaaaaatctttcagattgacttattttctgtatttcttgtttccataatgtttgccaaattgatagtaggtaccattgacttctccagtatagtaatagattgatttcaggatgacattatcatgtaaaatctgcccaatttcaaagtcctcatccaggatagcatcttctcgtggttccagcttcccaatcataggaatctcaggaggactaaagaagttgaagaatgatgcattaggaaccactcttggctggatttcaatttctccagtagcagttgtgcgactctgggtagttgtcacagtaacatcttttcctcttctccagtctatcttgcagcctttgcaatcttcaatttcccatccccaagaaaagaagggatcattgtgatctggttttgcctttattatatatgtcttcaccagcacctcatttctgaagtatgggttgggtagaaaatgaaattcaaaggtgtaacttacaggctggccaggttttgagaacttcaggctaacatccgacaagaacttcagaatgggctcatcatacttctgaatcataggcccgagcttgtcaacattctttaaaacaatcagccaatagtcaggaatgcctttagggtcttctcttttaggctttcccttcctagctcttttaagatctacactgtcctgaagcctttcctcaggaactcttttatgagtctctcttactgcagcccttgccttagcctctgttgctttaggctgttctttatcatctgcctttacctgggggacttctttaggatcttcttttacttcaggggttgcctccatacagtctttagaatctgctttttcttcagcctttacctcaggaatttctttaggaacttccttttcttcatccttcacctcaggaatttctttaggaacttccttctcttcagctttcacctctgggttttctttagggttttcttcttcctcaccctctaagggaggcatttcactaggggtgttatcctgcacctcctcatcactgctgaactcctcatcctctgaattccattcacattcttcttctgtaggctcgtattctgcattgatgatttgaaaccgcctatcatacagaggcttgttgagttcagcatattttctttcaagatcatgaattgcttttaagaacagggtatctaccttgtcacattcatcttgaatgtttctaagcgcttgcacacgatttctaactgcctgaggcagcctatccacgaaatttgttcccaacggggcccgccgcgcccttctggaaggctcaggtaccctcttctttctatacaagcggctgcggctgctagtgctgccgctgctgctgctgctgctgccgctgccgctgctgctgccactagtgctgctgctgctgctgctgtcactagtgctgctgctagagctactgctgtcagattcttccccagaatcactagtcgagctagccatctcctcttcggcaaccccatgggcgacaggttccgagaccattttaaaatctgcttctgccatcttgcaagcctacaaactctaccagggagaccgcgcgaccagagatgggcagaaaatgactcacggatgcttgagtggcggcggcggaggcccgggctgcggaggtggcagcggcgatggcagcagcggcgcagagcggagctggagctggggatgcagaggccggcgctgaggtggcagcggcagtggaggcttgggcgacagcggtggcggcaaggcctctcccggctgcagctagagtgccgagatgtaccgcagccgaatggcgcagtatgagaccccgagatctcttctcgttttagatcgcgagccccctccccttgcagtcagacctcccgttaatttcgttcccagtgtgcctttagttcgctcctcatttgctggtccaccttaattgacaaactgtacgcccaacgaacggccaaacgccactactcctggctccgcccaccttcccagacgccgctcgctggctgaggtgcgaccccttggaaggtgtccccctgccccccaaaaagtctatatttatagttttataattaaaaaagaaaaaaaagcgtagacatgaggtaaaaataccagccatagttcctaacaagggcaaaagaggcgtgtcttccttctcccatccgcccaccctgaattcccgtttagtttgtcacgggtctcttgacaaaaagctgtaaaaaaaaaaaaaaaaaaaaaaaaaaattgaatgaaaatggtccaaatggcgtcattgggtagtgtgactatggacgatttaaaaacaaaacgattttctctaaatattctatgagcatgcatttttacactggataaaaaaggggagagtcggttattggcagaggagggagggactagacagcaggcgtattgcattccacgaagctgatttaataagtgctgtctgtgatgtttggcaagcctggtttatatccatctacaaggtttgcgaacccatgttgccgtgagtcagttacaccatttttattatatttctctttttaggctggcatattatataccccaaccttgctgctaacttgccacgtagcccttctcaatgcttgtaacaaccttgtagataaaacaaagaggtattaaatgttaggtagtattgttaaaaagcaaatgatttgcgttatacttttgtgcagcaggtttcaattccaagaacagtgggatgggagggggaatttgtgctaatgaatgtgcatcttctgtcagtgtatgcgatgtcatctgccaccaatttccttctaatgttgtaaaattctagccatactatagtatgatttacaagtccagtaatatgtgaataaacttttgcaaaatgaagtttaaaaacgagtatttgttatttttatttacaggatttttttttctgctacagaacaactcccttggtacaataaaaaagacgagtatttacttttcattgaaaggtaaggatcatatttagcacattttaaagaatgacaaaaattactcatctccatctgaataaaagtttacaggatacagtcatttaaagatttattttagagaattatcttgataattctatggaaacaggaaaatccacagaggtaatttggcatactaatgtagacaattacatacttaaccgcattaactatctaaacctggtcatagaatacaagtggtaaattaaaatatgaaatatgataaattattcatttcaaatgaggaaatgtattaaagttagattaatctttatagaatttgtgctttgtcatgtaatcacgttttttaaaagttaggaaacgcttttctgtttcataaatgcatttacttttattgtttatctctaattgtcaaagtctgtgaacattgcaaagataaaacaatatagaaaattccaacagtagtaaaaacacaaaatcttaaccaccaaatgataagaattactagcattttgatgcacttccttccagaaatttccttgtgcatatacatacctgcctatttatgtatactgctttatctatgtgacaccatattatgttttgtaatcttttcatttaatttatcaattactaatggctatattttcatggcaaatgatcgacatcttatttttaagtaagtgcatattccatggaaataattgccttaatttatttgaccagattcctgttatagggtggccatttctataccatctctccccttaaatacatactattttcctgctataatcaaagtgtccctggatacctaaagcatgtatttctatgcacttgtgaaaattggtcataagataaattcctagaaatggatggcttggggatgatcatttcatattatgaaattattattgtatacatattgccaaactctctgcagaattatt

SEQ ID NO: 1563906 - DNA, 4001 bp, Homo sapiens
ctaaccgcagtttttttaaaaaaaaattacaataaaattttacagcaatggaatccatagtgtcttttatggctttcttgactaatgaataccccaaagttgtaaattaacctattcaaatatcagattttcattcagcgatgcttattgggctggttatcagagaaaatcagaaaagttttgcataaactgtgtaccaatttgcaatgaaaactggcaaacaggaccataaagtttccttgaattagtaagactgatgagaagaaaatgagcagatatttgcatctggtttaaacgctcagttgagaagcattgtgccgtccccgctgtatttggttgacacccacagcaactccccatttcagtcatctctctgttttcaaatgcacctggtatttaatcttatgtgttggggtaatttgccaatgccagctccttgtaattaaaatacactaatattagaaatgaaaagagacatgtttcacagcagccatatctgttattaatgagttacaaagaactgtacaagggactcccatcttgccaaatagcttcctttcccgcacctgaatctcagtaaagatgggagtctgcctctcatggaggcttatctgggtttgtctattacaatgagcctcagttactgggcgttctgagtcattaacattctgtacacaatcaaacttcccgtcccccaagaaagagttatgcccaggcctcctacagctcaattgttcatttaaagagagaacttgtattccaaagtttgaaagaaacctcggaatatcccgcaggtaggagtcattcctacaggtcctggtctctgtgctggtgggagcatcctttcccggtcactccttgaacatcatgctgcagggacgagctgatgactaaaaataaccccctgcaataagtccaaggcaaacagcatgcatttcctcggactttttgcccaatcaaaatcatacagtaaatccatcctcatctcctcccggtgctccccaatgcatctatggaagcgaagacctgcacgctgaaagaagagtgcaagggagcaggattcctgcaaagcgtgacacagaaagctagaaataaatgttgcctattgtttgaagtcattctgagcactccggcagagccctggcaggagatcagcagcatacataagtagtaataaaagtaaacagtgcgcttttaaactcgcagtcttgcctgcgttaatagtgcccccattgtaagtgggatgagggtgctggggaagatactgggctccatgaatccatgttggcaagttgctgcttcgcagccccctttcacggggtcaactataagaaccatcacaaagttacatctaactacgcagagagtttgaaaagaaaaatctctttaagtcaaaccaaaagatattttcaagcttttctaggaggctccctgctctgtcacagacttcaaagacccgttcatttaagaaacacaatgctagcatgctacagattaatgcaaattaaagtaatgcaaatttaagtggtatttaaaggttgtctctttgtctgagaggaggatgaaatgctcggtttggaaagaagcgatttcctaggcaagccggcagcgcttgttttcctgcttaccttaggggaacgcagggctcctttcttctcagacttttctgagagctagaaagaggtcctgttacttccaaatgcttttgttcttctgtccctctgtcacatggcttgccttttatatttgcaacacacaaaagttaggactgttgtttaagcgacacagggagagagagagagggagagagagagggagagagagagagggagagagagagagagaatgtcaaatggaaaagtgccattgcagtcatatatcaatcaggcgtgcggccgcagcagcgcactagcaaatgggaatgccacggaaatgtgaggcgctcgttatcggggactcagcctctgcccaccgctcggctcccttccacggagcatcttacgatgggaacagcgtagcagaacaagggcgaggaagtttctttctttctttcttttttaatggtattatggaactaataagaggccaaatgaatattctgaatttaattctttttcaagcatgtggctgccataaagatgtgccgtccgcaatagagacgtatagttttggaaatacaaaggcagtgtggcattctgttgaacgattcggcagctgactgtgatgaagttgaaattttaagtaagagaggggaaagatgggaaccagaaatttttttctcaggcgatgctgttaaagcaagtgcaaaacgctgccctattttatcacgatgtgtgtgggtggtgagagttctttttttccgggttgttcatccattaaatgatttttagcagcatatacatgattaaattcacaatggcactttaataagccccttcatctgcatcatttagaataaaactttaggtctgatttagaaacaatgagaacgtgtattccttgactccttgagctatatgaaggagaaactaatagataaagctaacccattacacaacaactagtagaaaagtgacaaaggtaactatgtgtgtgggttaaatacctgcagctgaatcatgctgtgttatgagctgtgggactacaaaggcaaatatttcataattcttgccctttgaaagcttaaaattaacacagaaaaccgtcagggattttggaggaaaatacaaagaacatttaataattattttatgtcaggtaaatcagacccagaataatttgttttattaatactactgatgaagaattaaactgagaatttaaaatatatatatttcgtggaaaaaataatacattataaaactcaaaaagaaatttttcttgggagcttcatgtaattgttgatgctgaaactgtcttgttcaactctgtatcaaactatttgttattcattaataaatttacattcaccttattacttttccatgggacctttactccagtcactgatatttgcaagaggtgtcttaaaactttcagttttattgccagaaatcccttttcttatgctccacttggaaaaaaaaataccctgtctaccttggaccagccagtcacaaacagaatccacctgcgaagatcatggataaatgacaaattcaaagccttgaaaaaaaacctggcacttggctgatgatgatattggctaaatatcttaaaagcagaagatcaaaaagcaaatggaaattgggccttaaaactggaaataatctgaaaggggaaatgacttgtagctgagtaagagccatggaaacagtcaggaatacattttctggcctaattttgtgggtcagattgggagggggaataaactctttggccaccaacattttcaaatatcagaacttgacatccgtccaccttctcatttctcccaagaaataatctgtggctttctcaacatatgctcgccactccaccctgccatctttcgccttcaggttgtcagggttgcatgaattctgcccagttcctgggcagaattttccagcattctacaatctgcccttctgaaagagcaccacagaaagtgtaaagattgcaaacacattgactgcttggccacagaagacaagatctctcccagatggagtcctactgcttcttccagccgttattttgtcaggagtggcgaagaataccatctgctgccccattcaagaggaaggctttgcctccccacattgggctccagagaacccatttctaagcctgtcaatagagagctggcaacagcaactgtttttatctcatcaccatgctttttagaaaggtcactgtgccacgtgtagtttctttactggccatcattaatgttgctgagaaagaaggactccctttaactttgccaaagggatgaagggacccctgctgttatttcgtatgtattaagggagagaagagtttgcagaaggagatgtctatcagctggctgagaaatc

SEQ ID NO: 1563907 - DNA, 4001 bp, Homo sapiens
tgaatatcaaaatttagaactacctgatgaaaaacatcataaagtaaaaaagacaaacagcagactgggaaaaatgtcatatataaaatagacaaaaaaattaaagtctagaatatataaagaaccatagctcaaaaagaaaaagacaatggaacaggcaaaggatataggcaacaatccacagaataagaaatatatgacagaagaaaaactaaaaaaaaaaaagaaatataaaagattaaatatgtaaaaagatgccaacctcactagtagataagaaaatgctagttatatattagcactgtatgacccttggcaaggcattaccagaacccacctcaaccctggcaaaaggctggcatcagagtggcatcttacctttgacacatagtaacgatcaactccagagatgcgcctatctctttccatcagactccagtgatacccaaaatgagcaacccttttttccttcaaataagagacaattattgttgcagtttataaaagtgagtgacccaattgatagatactacaatttttaaaagggacattccagagaaatggaatcatcgtttaaataaaaatgcaaattagtagtacaaagaacagaatctcctaaataaaatcagaccactaaactttaggattaagttggtacctgtgactttttacactattttaaccaacatgaattttttttcctttttttttaaaaaaaaaaaaaaagaaatatctagttgttgtcttttgggacactaagaaacaacagctgtagatcacacgtgaagaacaataacaaaatcaaaaagtaaataaatttatatcctgtactcttgagatgatgtgaaggactaggaagaggggaaaatgaatcctgatgtaaaaaaacaagatctcgcagtaaattcctaaaggcttgcaagagaaagtggggaataaaaaagtcaagggtggccggtcgcggcggctcacgcctgtaatcccagcactttgggagatcaaggcgggtggatcaaccgaggtcagaagttcgagaccagcctcgccaacatgatgaaaccccgcctctacaaaaaaaaaaaaaaagccaggcgtggtcccggctactcgggaggctgaagcaggaaaatttctttctttatttatttttttttgagacggagtttcgctcttgttgcccaggctggagtgcagtggcgcgatctcggctcatcgcaacctccgcctcctgggttcaagtgattctcctgcctcagcctcccgagtagctgggattacaggcatgcgccaccacgcccagctaattttgtatttttaggagagacggggtttctccatgttggtcaggctggtatcgaactcccgacctcaggtgatccgctcgcctcggtctcccaaagtgctgggattacaggcgtgatccaccgcgcccaaccaggagaatctcttgaacccagaaggcggaggttgcagtgagcgattctcaggcttgagccaccttttctaatctaccttcccggcccccgcgtcgctactctgccctaaggcccactctgatacacccagaaacgctgtttttcactagagcaggatgtagtttctatcgggcttcgtttcgcaagcctcggcttctaggcaaccggaagcaagtagagggccgacctcggagagagggttcgcaggctgacggtctccctgcccaccacccttttcggaaatcagcccgtggagtcggcccccgggccgaagccggcttaccttgcccccgttagtgaacctgtggatgtacgcagtagccagtcctggaatcaacaagcacacgcccatgacggagagtccggggagaatctcgaaccacatctctgccccgttacctaggccaaaaccctacttctgggtccttgaaaggtgacctggcttcgcctctcttcccagcaagccccgcggccgcccgcgagcggggcggtgccacgtacggctccggaagaagcgacggaatctgctagggcacaagagagacgggcgctcgggctctcgcagtcctcttccgtcagtgtcttttgcttcgactcccggcggagcgcgcaacgtggagtgacgtgcaggggccaagtgcaacccaggcagccacggctgtttcggagctcaggactctaaaatggcagagcagctttctccaggaaaggcggtggatcaggtgtgcaccttccttttcaaaaagcctgggcggaaaggggctgctggacgcagaaagcgcccggcctgcgacccagagcccggagaaagcggcagcagtagcgacgaaggctgcactgtggttcgaccggaaaagaagcgggtgacccacaatccaatgatacagaagacccgtgacagtggtaaacagaaggcggcttacggcgacttgagcagcgaagaggaagaggaaaatgagcccgagagtctcggcgtggtttataaatccacccgttcggcgaaacccgtgggaccagaggatatgggagcgacagctgtctatgagctggacacagagaaagagcgcgatgcacaagccatctttgagcgcagccagaagatccaggaggagctgaggggcaaggaggatgacaagatctatcggggaatcaacaattatcagaaatacatgaagcccaaggatacgtctatgggcaatgcctcttccgggatggtgaggaagggccccatccgagcgcccgagcatctacgtgccaccgtgcgctgggattaccagcccgacatctgtaaggactacaaagagactggcttctgcggcttcggagacagctgcaaattcctccatgaccgttcagattacaagcatgggtggcagatcgaacgtgagcttgatgagggtcgctatggtgtctatgaggatgaaaactatgaagtgggaagcgatgatgaggaaataccattcaagtgtttcatctgtcgccagagcttccaaaacccagttgtcaccaagtgcaggcattatttctgcgagagctgtgcactgcagcatttccgcaccaccccgcgctgctatgtctgtgaccagcagaccaatggcgtcttcaatccagcgaaagaattgattgctaaactagagaagcatcgagctacaggagagggtggtgcttccgacttgccagaagaccccgatgaggatgcaattcccattacttaggtttcccataattcttaaatttaaaaaataaacgttttgttcttttggaagtcttacttcgtgtccttcctttgtagagaaagtgacagagcaggcgggtggtgaagtagggtcctggattaaaagcttcaaggtaggtataatcaggatttttagccctaggataaccattttgcctgtgtttcttttcagaacactttggcataaattataggggtgggagtagtttgagaaaagagctataatttgctcgaagtaaccaaagccatgatgaaagcaagacctctgagcctgtttattatatcacatttctgtatcacttaatagtttacaaagtactttcatgcattctttctcttgggagcctgtactacaaaatatacccgagccaaggtgttggggagaggggttgtgtttggggaactggtagctagcaccacaggcttcacatatgggaaatgttccttgctgtcttggttatttatttatttatttgtttttgagacggagtctcgctctcttgcccaggctagagtgcagtggcgcgatctcagctcactgcaacctccgcctccccggttcaagcgattcccctgcctcagcctcccgcgtagctgagactacaggcgcatgccaccacacccggctattttttttttttttttttgtatttttagtagagacggggtttcaccatactagccaggatggtctcgatcgcctggcctcgtgatccacctgccttggcctcccaaagtgctgggattacaggtgtgagccaccgagcccggctcccttgctgtcttggaag

SEQ ID NO: 1563908 - DNA, 4001 bp, Homo sapiens
aagtagcatactttccccattctctgtatatcatacattctcatgttatattatctattatactactttgtattattgttttctaatattttactgtttattttctgtcttccccactatcatgtaagctctatgagagcatgggctttgtctgatttccacactgctgtatccccagggccctgaactgagcctggcatacagcaggccctcaatacatatttacagaatgaacaagcatcctatatatccaagccccttaaccagaggttagtattgatgaagtacttattatgtgccagtcttttcacatagaaacacctcacaatatctcagtgaggtgaaacatggcaataataaacacattctagtgctgagtacatacttacgaagtgccagctgctgttctgaccatttttactcatttaattacatgaggcaggtggggtgtcctattttttagaaggtgtcctattactgttcccatcttacagacaaagaaactgaggcaccaagggtttatgctaccaagatcacacgggtgggtaaccgtcagtgctgcctgatttcacagcgtctgctattaatacagcacagcagacctggtagccctaaattcaaataccagttccacctccaccatgtattcagttatgtgagctagggcaatccacttaacatctctgtgcctcagtttcctcatctgtaggatgagtataataatagagcccacctcgaaatggggtttgtttcgagtataagatgagctaatgcatgtcaagtgtttagaacacagacggggcccggagcggtggctcatgcctgtaatcccagcaccttgggaggccgaggcgagaggatcgcttgagccaggagttcgagaccagcctgggcaacatagcgagatctcgtccctataaaaaaaaaaaaaagaatgcagacggcaacgagcaagtgccatatcggtgtttagtattatcgttgtactatactgcttctaacgtgttttgagcgctgtccacttgaggtgtgatttctgtctgcaaaataaaaccaatcctgcctctggccctggaacgaagataccgagagacaaaggaggaacacaaggtaggcaaaattcccaagtcttctaggctttcgccggccgcgcagtcctctactgcctaagaacgtcctctacagcgccccatctgccgatcccggactgaccccttcggggttccgtccccactacccccccccccccccccgcctctcaccttctcatacaagttttcgtcctcgggttctgggtcctcttgccacggtgtggtcggttctgggggccgctttcccgccacagcggacggggcgaccacagtcctggagaagctagattcccagcggacgcgggcggccgggagccctcgcgtcgccgctgccgccaaaagacggcgagcgctcaaaccaaacagcccagccgccatgacagatggtgctgcagggtctcaggggcggggaaagaaatgcgactgtgcgcagctgcagtgggtgcgagcgcgacaatcatcgccccgcctccgccacgctatataggtcccagatctgatttggttttccaatgaggcggggcgttgagcaaccctctttgcctccagttgtcgtggcttcgtggggccaaccattttcggccaggctgagaaatttcttattgatgggtctgctcatttcctgcataggaagaaatcggtgacatttgggtggatacagttcccagccaatcgccccgagttccctcgcccactggggaaagaggcagagcttccgctagtctttcatcttcaaaggaaatcaagcttctaaaaagcgggccctgccgaattggctaatagctactccttttctccactaggggagcgttcgcaaggggtgtggggaggtggccagcgcttgccaatcagaggaggccagggctgtcccctagcgggcggtgaccaatcgccggggccggccagagcgcgcttccttagtaggtggatggtggtcggagcgccgactcccttctcgtcgtcgccattttgagctggtgactgtggccggctgggagtaggcggcagtgagtttccctgggagggcagcgcgcttggcgcttctcccctccccccgatctgcctccagtctcggacttggttgttgcgcgctccggctccggctgagctgggagagttggaggaggtggcggcgggcagaggtgatgtctgggagcccttccttgacagcccgggccgagaaggtgagcgtcgacgctggtcgtgggggcggaggtaaggggcccggggcggggacgtagaggaggcgcgagggcggacttcgggtcgggggagatgcgcggaacggaggggttggtgcaatgtctcaacccgggagggtttttttttttttggttttttttttttttttttttttttttggtgtgagcaaaggcgcgtgcgcgactgggacatgggatgggtgcatgcgggttgggggaagggagggacggatgggagtgggctactgtggatcactgtgtcggctacatcgaagtttatcagtggggaagcggttgtctgcgactttgagtttgtgcataggagaggggatgctgctctgtgttactctggtgtttatcggtccatggggaaatattctgtggttctggtctctattcctgggggatcggaggggggatgtgactctggtctttaccctttgagggggggcggtctgtgactctgatccttatccatggggcggggcttgggggacgactgtcttttgattgaccctaacccacttattgggtgggaaggggcatgcagggaatgtgtgtgtgactcattgccccttcttttggggagtttgtatctgtgacactgacgctcatccatggaaaggggacccactgtgtaattgtggtccttactgtgtgttccttctgtgatgtgggcccgtagttatttggggctcgtgtctgtgactggcccttggctgtggtggatgttactgtgtgactctggcccctttgccagagtctcttgaaggtttttgtgctctcagacgccagtgcctctgtgtgattctaactcttgcccacctgggagcaggtaactcgggttccctgtggcttgaggaggaagagaaaattggagtgtgtttgtctgtgtatgtgtgtgcacgagcatagagcaaaggtgtggcagcaacctagtgttgagcaggtgctattattgcctggctttacctgcttcttattcagagggtggggcctgaagatctgggattcatcctgacctctggctgggtcacagggttctcaggactccctgagttctcaccacagccctgagggttggatgaagtggctgctgctccatcccaatagaagagcacagtggttcagaacagcctccaaaagggccccttttgcctctggaaaccgggcttgagccctggggagggaaccaccttaggaccgggctgcacataagagacagggctcagggctgagccagttgctgtgtgagggccaaggctgtgttggccaggagcccagggaggtggcagctgtctcgtcgccaagttcgccccttcacacacccccccaagagcctttcatggtcttttgctgccttataggggacagccagcagcttgttgggaggatgagatggtcccttggggcctgtggaaggagcctggggcccccattgttgtgaagtcttgtctgatgtgctgaatctcaggcaagactttcagccctgagagtcccctacccccaccctgggatgcagccccaggcttgaatttgtctacctgtcttaggtggcaaagccctgatcacactgtgggtggccccgccaggtctctctgcaagatgccccctgtctgctgaagtccttgctgttttctagggcagtgggctctagccttatgtttgcggggaaagggaggagcaggccaagtaggggctaccttca

SEQ ID NO: 1563909 - DNA, 4001 bp, Homo sapiens
gtgtgccatcacgaccggctaattttttgtatttttttttcagtagagacagggtttcaccgtgttagccaggatggtctcgatctcctgacctcgtgatctgcctaccttagcctcccaaagtgctgggattagttaacacacagaaatgttcaccaattaacactctagtgtatttaatctcagatttttttttagttcatctgttatatgtaagtatacatttttaatgagacaataaatgtatagattgctttttaaattgctttattagctttaaatttttccatgcaaatgggtgaaactactgctgacagaaacttacactgagtgcaaaggcaatcttcaaatagaagctggcaacacaagacccacttgacacatggaaataacatagggttcacagcaaacggatcagtaaaggcatattaggaaaatgcaaggaaaaagaaaacagcgggaatcacagtattaatctcatgataaatggcaggagtcaaggcataaggcaaaattcatcatgatggtcatggtgattagagagctcccccataaggatacgcagacaattcctcaactgcagctccctaagttttcttctgatttctctcatctcctccatgaatatttccatatcatctccatctccacccatcccatcattgatctgcctattgggtatggcccatcgaaaattaggggcaagtcggcgagcctgtccccgtcgatttcctgcaggctggtggccttcacctcctcccaaagggcggtcttcctctccattctgcataggctgctccatctcttcgttttcctggtgaatatttgccatgatgagattttttttttctggttgtttttctttgaacacaagtaagacaaaggcaaggagagagactgaatgcttggtgctctgaccagcaggattcagagccctgatatcaaaggattttttaatttcgttttttcccaccttagaagttccgcgcgtcctctacggggcctccaattaaagcccctccctccagctttctccccttacctcccttcccccaaacccaccatttttcgtttcccgggattctttcccagagctttgcaggcaccaaaatggaggaccggtataggagtgggggatggggtggagggggttggggtctcagactgggctttccttacgttccgacccccgccccaccaccgtccctcgcaccgacctgggcctatccttgcagtctccttctcctccggattctcgccgcgaggtgcgccgcggagacacttagcctcgcagacctgcagtcgagccggggtgggggttgtggggggtgggggctgctgcagcggaacgctagcgaagacccgccgccgcccggccctttccgtgctccgagcccgggctcccctcgctgccagcgccccgcgtctcccgccccccacccccaccccaccctcgaacgcccagccccccgcggtgttcgctgttttcctgcagggactcgggggtgggtttccatcgctcttggtggctctgccgcccctggaaacccagccgcccctgcttccccatccctgggggcctctgtgttcccaagcatgttggggtgtggagaaagctggcggggaccccctgcgctgttctgcgcctgtcgccgaggtcggtcagccgctgctggcatggccggggctcacgggccccggagcccttacctgctccgcttttccccgggccgaatgccagcccgccgagctcagggcagcggggagctggtagccagacgcgagtgacgactgcaccgaaggctgcgtcgctctgcagctctgggtcacgtgagggccgcgcgtcaccaccgagctcgccccccaacttgggcggccagtgcagcaggatctcccccttccccccacccgccaccgccatatgcacgcgcaaaaaacagcctccctactcccgtctgcatgaggtgccccagagcgcacagccctgtcactcttctcggtcctctccaatctgagggcccacaagtggcatcactgctctgcggttggagtttgccctcctctggttaccagggagggtctgcatcatcctccaccactgccccctctcacttcaggccttggctttggccttttctgctttctctccttttctacctggcaacatgctttgcgctgcactcccacttctaccccttgcgtgtgcacagccatcaatgcccacgtagcccctgaattcctacccttctagaaaatttagagtgagggctaaggtggggaggcaggagggcatttgtcagaaagcggggcaaggaagtggagtggactgtatatatttctttttatttccttaaaaaatctgcatgcttcagaaaattataaattataagtttttaattttgaaagaaatgctggttgggcgcggtggcgtacctgtaatcccagcactttgggaggccgaggcgggtggatcacttgaggccagtagtgtgagaccagcctggccaacatggtgagaccccatctctactaaaaatacaaaaattagctgggcgtggtggcgtgcgcctgtaatcccagctactcggggggctgaggcaggagaatcgcttgaacctgggaggcggaggttgcagtgagccgggatcgcaccactgcactccagcctgggcgacagagcaagaccctgtcaaaaaaaaaaaaaaaaaaaaaaaaaaaaaaggaaatgctttatcctgcacaatgaaatctctcattgtttatgttgacctgtaccacacaaaatattttttctgggctccacacaacatcaagccattacttttgatacatactagctcgtttaaaattttatttttggccgggcatggtggctcacgcctgtaatcccagcactttgggaggccgaggcgggcggatcacgaggtcaggagatcgagaccatcctggctaatacggtgaaactccgtctctactaaaaatacaaaaaaattagccaggcgtggtggcacgtgcctgtagtcccagctactcgggaggctgaggcaggagaatcgttgaacccgggaggcagaggttgcagtgagccgcgtcgcaccactgcacttcagtctaggcggcagagcgagactccgtctccaaaaaaaaaaaaaagaaaagaaaaaaatatataaaaaggcgggactctttctttttcttttttttttttcccccgagacggagtctcgctctgtcgcccaggctggagtcagtggcgcgatctcggctcactgcaagctccgcctccagggttcatgccattctcctgcttcagcctccggagtagctgggactacaggcgcctgaaaggcgggactctttctgaacacagttggtgttttcgaaatgatctgtaaagtgaatcttcagggagcagtctggtcgtcagatcttcaccattttatgtaactttgatgtttttgatatcacagtcatcagagaaagggagtcttttattccctgctttcctttccaaacctttcaaaccatccctacaaatatcttcttagtatgagctcagaagttaagtacatattatgcagaaagtagtttcaaaaccatctaccctttggtgcgaatgtttcaaaatatattagaaataagcagggggtgtgtgaaacaacttaacttgagactgaaccttatcctgagtgcaaatgttcctttctccaacttgaaatcatttttaaaaaaattatcacagctagaaaatagagatgtctttagaaaagtggcattgttataaaaaatatttgatatctgttgtttatgataaggaaccaaaagcattaaatgcagcactgaggcaagacaagccagacaaatgcttactaactctagttttggccccaaactcctgtagaatttcctaccctgctaaaccagatgacacagtgaataaaggaagagtatatgcccagtgtgtatgtagttagacgttttggagatatgtattccatata

SEQ ID NO: 1563910 - DNA, 4001 bp, Homo sapiens
ttgaaggagttatgaaagaaaaccagaaagggctatttttctaagaaccaatgtaatcccaagaaccacaagagttgtactcaccaggataaatataactctcaagttataaagacattctccacaattctatagaggtcaaagggggatttggctcaccagagactccagagaaatcagtggggcttgttaccttgaagaccctagcacctcatcaacagcaacagaaataggatccagcagaagggaaagtgtggccaatcaagaaggcagtaatcaggggagcaggaggattgcaaataacaagaatgatatgggggaacccacctattttcactgtctggacttgtaaacatgagtgataattcctccagtcctaagtacctgatgggggtcccggtcctgttaaatgttggggagttggggacagaagccagcccaacacagttccacatttcatcagttccactcagcagccctgtaagacaagcattgttccccatttcacagagcagaaaacgggctctttaaaggaatgcatctgtaataaagggaaggtttattattccagttaagactgaaggatagttagagtttactcttcaaatttgttgagccagtattgttacgtatctgcactacattcataatctcattgaaaaataattttcattgcttctcaaactccagataataaaaggaaaaaaatgtcacatattacttttttttttttgagactgtctggctctgtcgtccaggctggagtgcagtggcgtgatctcggctcactgcaacctccgccttccgggttcaagccattctcctgcctcagcctcccgagtagctgggattacaggcgtgtgccatcacgaccggctaattttttgtatttttttttcagtagagacagggtttcaccgtgttagccaggatggtctcgatctcctgacctcgtgatctgcctaccttagcctcccaaagtgctgggattagttaacacacagaaatgttcaccaattaacactctagtgtatttaatctcagatttttttttagttcatctgttatatgtaagtatacatttttaatgagacaataaatgtatagattgctttttaaattgctttattagctttaaatttttccatgcaaatgggtgaaactactgctgacagaaacttacactgagtgcaaaggcaatcttcaaatagaagctggcaacacaagacccacttgacacatggaaataacatagggttcacagcaaacggatcagtaaaggcatattaggaaaatgcaaggaaaaagaaaacagcgggaatcacagtattaatctcatgataaatggcaggagtcaaggcataaggcaaaattcatcatgatggtcatggtgattagagagctcccccataaggatacgcagacaattcctcaactgcagctccctaagttttcttctgatttctctcatctcctccatgaatatttccatatcatctccatctccacccatcccatcattgatctgcctattgggtatggcccatcgaaaattaggggcaagtcggcgagcctgtccccgtcgatttcctgcaggctggtggccttcacctcctcccaaagggcggtcttcctctccattctgcataggctgctccatctcttcgttttcctggtgaatatttgccatgatgagattttttttttctggttgtttttctttgaacacaagtaagacaaaggcaaggagagagactgaatgcttggtgctctgaccagcaggattcagagccctgatatcaaaggattttttaatttcgttttttcccaccttagaagttccgcgcgtcctctacggggcctccaattaaagcccctccctccagctttctccccttacctcccttcccccaaacccaccatttttcgtttcccgggattctttcccagagctttgcaggcaccaaaatggaggaccggtataggagtgggggatggggtggagggggttggggtctcagactgggctttccttacgttccgacccccgccccaccaccgtccctcgcaccgacctgggcctatccttgcagtctccttctcctccggattctcgccgcgaggtgcgccgcggagacacttagcctcgcagacctgcagtcgagccggggtgggggttgtggggggtgggggctgctgcagcggaacgctagcgaagacccgccgccgcccggccctttccgtgctccgagcccgggctcccctcgctgccagcgccccgcgtctcccgccccccacccccaccccaccctcgaacgcccagccccccgcggtgttcgctgttttcctgcagggactcgggggtgggtttccatcgctcttggtggctctgccgcccctggaaacccagccgcccctgcttccccatccctgggggcctctgtgttcccaagcatgttggggtgtggagaaagctggcggggaccccctgcgctgttctgcgcctgtcgccgaggtcggtcagccgctgctggcatggccggggctcacgggccccggagcccttacctgctccgcttttccccgggccgaatgccagcccgccgagctcagggcagcggggagctggtagccagacgcgagtgacgactgcaccgaaggctgcgtcgctctgcagctctgggtcacgtgagggccgcgcgtcaccaccgagctcgccccccaacttgggcggccagtgcagcaggatctcccccttccccccacccgccaccgccatatgcacgcgcaaaaaacagcctccctactcccgtctgcatgaggtgccccagagcgcacagccctgtcactcttctcggtcctctccaatctgagggcccacaagtggcatcactgctctgcggttggagtttgccctcctctggttaccagggagggtctgcatcatcctccaccactgccccctctcacttcaggccttggctttggccttttctgctttctctccttttctacctggcaacatgctttgcgctgcactcccacttctaccccttgcgtgtgcacagccatcaatgcccacgtagcccctgaattcctacccttctagaaaatttagagtgagggctaaggtggggaggcaggagggcatttgtcagaaagcggggcaaggaagtggagtggactgtatatatttctttttatttccttaaaaaatctgcatgcttcagaaaattataaattataagtttttaattttgaaagaaatgctggttgggcgcggtggcgtacctgtaatcccagcactttgggaggccgaggcgggtggatcacttgaggccagtagtgtgagaccagcctggccaacatggtgagaccccatctctactaaaaatacaaaaattagctgggcgtggtggcgtgcgcctgtaatcccagctactcggggggctgaggcaggagaatcgcttgaacctgggaggcggaggttgcagtgagccgggatcgcaccactgcactccagcctgggcgacagagcaagaccctgtcaaaaaaaaaaaaaaaaaaaaaaaaaaaaaaggaaatgctttatcctgcacaatgaaatctctcattgtttatgttgacctgtaccacacaaaatattttttctgggctccacacaacatcaagccattacttttgatacatactagctcgtttaaaattttatttttggccgggcatggtggctcacgcctgtaatcccagcactttgggaggccgaggcgggcggatcacgaggtcaggagatcgagaccatcctggctaatacggtgaaactccgtctctactaaaaatacaaaaaaattagccaggcgtggtggcacgtgcctgtagtcccagctactcgggaggctgaggcaggagaatcgttgaacccgggaggcagaggttgcagtgagccgcgtcgcaccactgcacttcagtctaggcggcagagcgagactccgtctccaaaa

SEQ ID NO: 1563911 - DNA, 4001 bp, Homo sapiens
tattgagcctaaactgaaacttctggcagggccttatttctttggtactctcccattacttagttcttcaggcctaataaataaagactatctggctgttggacgctctctcctgaatccactgatctgtatgaaaatgtatgaatgtaggcccttagttgtcttccttggttccctgaggggaattgggggtttgggtggaagtgcagttcttacttcttacggctgcacattggaatccacctggggagttttaaaaacatgcactgttatcgggacccactcccagagattctgatttgattggtctgaggtgtttaattgttataattggcctgcccatcaaataatggttatttatcataaatatatatgatattagggacttgcatttgaacaacttctctgccataaaattcagaaaccacaatgtcctgaacaaactgatagaggctccatgacacccattggaagctgcctggttcacaggaatgcttccttcttctcctgagcgatcttaagtaacaaagctgcacacaacagtgcttccccatcatcatggcctggaaaggcagctcagagagagtgttctcagacagcaggtaggacaaacccttcattaagaaaggctgcatacacggtgttggtagctgttgggctaataggagacccttgaaacttggccctgtgtcagcctccgcagaggcagtggaggcaaatgtgcagtgaaggggtttagctgaggcaaggagagtggccagcgtcaactgtcacactggccacctcctgcagaacaacctaatagcgcatagcaagaaatgaaagtaaggcactgtccttgacattaaggagcctgagttacaactgaaggactaataaccccagtgttggaagaatactgtaaaaagttcaatgcttttcaaatagggttcaattgcatggccaaacttatgtgataaagaagtatagtgaaggagggcttagagggctaaagaaatcaagacaggccccacagtggtttaacagatttgtgtaaggccattgaagatgtaacagaaacgagaggttgggggatttgggtctggggactctcagtttagggctgttttggggacactgggagataaacaagtctttctctgtaatctcaggatgaaggtaagatactgaagaattccaagaagactggagggggcagtgctggaggagaagaaagcaacatagggcctggtgcaagcccatgcaggatggggccccttcccagaagtcctgagctagagccccggaatcctgccctggaatctctactggagctaccctctggcccttctttaagacgttcaaatgtcggagcagaagaggagaaggaagaaagggttgtcctctttgtcttgggtagtttgatgcctcagaaggagagcaaaggcgaaaacgttggccagccagtatgaacaatgcaaggtcctcaaagcttaggagccactgaccctaaatgtcaaagtcagccttgagtgagggtcaagtgcagattcccctcctcacagctgttcctgtgaaagggctcactttcattgggaaacatagttatcttctctcccagaataggaagtggctacagcacaagcccctcttcgttagacccagcctccccctcccctttgtcttgccaagaaatgctgcaaaccccaaatacctgcattcttgggcatgcagcaggccagagccatgcttggattcccgctctgctccttaaggaagggccttttcttttatgcaaagacgtctctgaatgccagagagctgaaagctgatctgcttaagtcagcaagcacggcgggggggatggagggcgagagagggcaaccttctgcaaggaggatggcagattttcacagaacctctgtgctgcatctaggactcccccctggagggggagatggtctcacccaagtgctaggctggctgctaatccctccagggttcacttgaatggcaaatcaggactccagggcagcctggacacaccctgtctccagaggaggggcttagcactttcctttttcatccctggagcagtttaggttgcagtgggacttctttacagccttgctactccaattgcagttggccagggggttaggagcataggcatcaacctgggagcttgttagaatgcagagtctcgggccacaccagtttaagaagctctgccaagtgccatgtggctatcgaaaccattagcacactgccagagacaggaagctggacaaataaatccagggagccacagcagcccagcccctacaccaactgcctgatcaggagaaggaatacatttcatcccatcactccatagctgccccaggttgccacccattcttctcaccaggatggggctggcttacttggctgtgaaattttaggttggtgtgagggtgcgctattcaacaggtttgcaaatatttgcgcacacaccgaaaggacaagaatggtgcaggtggaggcgatacaactggagtttgctctttgcaggttacaaatcaatttctgatcccttcccacccacccgccctcaacacacaccacctgtatcaacatgttagactctcgtgatgctgataacagcagtaatagcgcatagcaagaatactcaaaccacttcacaaacagcaaccatcctggaccctgttcagatcttcctcttggcaagaaagggagagtttaggtacttccacatctttgccctaatagccttatgttgtcatggcacatgatttgcctcccacctgagcccagcaagtgaatctgtgtgcagaagctgaaagggaagagagaaggaaagaagataaactaatgaagagtgggagacgagcttttcctctgcagtccagagagaagattaaaaggactactagtgaggcagatagacttgcttttttctcatctgccagatttgtgctgatggctgtgactccctgtattggatacttctgctccttaatcatgcgcagcaagaaccagaatgggcgacttcatttccgaagaggaactgaacggcgctgaggctctgggatgcattaagacagcccagatcaacagaaagtctggctggaacctcagagaaatgacccagacagaatcttcagcctcccaagcatctgtcagtggcatcagtggctggcatggctgattgcactgatcccctccctttagcagagagtcaggctcctgattgagggaagaaagcaaagggctggagaaaaggagggaaggtcagccagagatgaagacagaagagagagaaagcaaagagggtggccctgggctttacagggatttgtgtgggttcttaaaagcaatcatggtggccttttgagtagaaaaccaagctaagctagtatttaaaaatcttcttcagggccccaatcttgcctcaaacaacaatcactcataaaaagactgtcgcgaatgaaaggaaatgctgccattgttttattttttctgggaagtcataataggttttaaaaggttaatctccctctcagccctgttttttcccttccagtgaccccaagctgaaaaggaaaaatatttgcacttggtgtttaaaaaccaccacagtgaattagcttttgttgttcatggcaaagccactatttagctgcccagaatcaaaccagatgtgagggaagaaagaaggccctgcatcctgtgaacttgcctttcacctttgcagaagggctgaggggaaagctgggctgagatggcaaaataaaaggagtttggtgctcaacaaacctgatgtgcacttttgatgcaagcactggttagctcttgctggggtgctgtccgtaggtctagaatgtaacagctctaggaccctggatgcacaatgcctcctgatttccagaagttttcttctgtggacactaggccagcagccctattcccataggtagcaaagatcagagatggagaagagaattagaagacagaaataa

SEQ ID NO: 1563912 - DNA, 4001 bp, Homo sapiens
gaccgtcgcgccaacccagcgcccctgtctacctcctgggtcgttcctaaatgattctgccgtcgccagatttggacgatccggagccaaggggaccgcccttggaagggagatgacatagaatgactatttattgggagcccttgggtgtcgtaaaagcgaagtcaacggacagcaaagacgcccaggggtctcccagacttccttcctcgtcgtttccctgcagcccgcctagcagactagttcatacctaagtccacgtgccagtaaatttgggcgacagtgcaccggggaggaggaagatagtctgtgggatcctctgcgggcagatggcacagagccatttagtaggaaccctgggctgttcagagcagaaaagatgcccaggggtctcctccatctccccggggcccctgacactcccaccctcatctctccctgaccctccccgcggcccctccgggccacaagggttttcggcagaagcactacgaagttcagtctaggaggcgagcagcgccacgctacgtcgcacacgagggcaaggcacaagttcggagctcggggcagcacctgaggtcacagcgagtgacgaaacagccgcggtgctgcagcagtctcaaaagaacactcactactcctggaacccccaaccctgaacatgcatggtgtgggctacagggctcagggctgggcttctggaaaccacaggagttgcaaccctcctccctacgccccgtgaaggacgtgaaaggcgagccccggtggtgaaggacagaccctctctgcctcctgtgctccccataaacgctccctttctgctccttctcagcccacgctgcctgcgacttcagaggtcgcccttttaactttccaccgtccacgtctgcatcactgaatcggggtccagcccagccactcagccccaggaggattggggtgggtcccaggggatgggaagggtgggaaggcgagagtagtaaggtgcaagctgcaaccggagcggcgccgcggggctgggattgccgctgctggggagggcgcgagggtgcggcgcagaaacccatagcctggcgggcggacggcgcgggtactcacgcactgcctcctgcttagggtcaagcgtgctgaggacgcgctgcacgccgccgagcttgccctgcagcgcccagacgcggcggtgggtgagctggatgtcgctctcgagctcctggaagaggctgcaagcgtgccgggccacgtccgagagctgccggaggacacgggccagagcggcgttgctgaccgcgcataggtccagcatgagcagcacggccgccgccgccgccgccgaggacgcctcgccggctgcgggcgccgcctccgggatccccgccgtgctctcctcgccagccacggacgcctctccgtgcggcggctgagtctggtcggccggcgcgggcagtggcggcggcggcggtggcagccctgaaggtgcagggacggcgcgggctggctcctctggccctggcgcctcgacctcgtccaggtccctccggcccggcggctgcaagggcggcggcggctcagcgctgcctccgctcgcgtccactgctgggccgggcgcagggcgccgctgcctgcacagccattgcggctccacgatccgcttggcgaaaggcatcccgcgcagccaggcggcgactttctggtctcctccaagcgcccctgtgagctggagaccgggcgcgcccacctgagcagggagggggcaggagtccggcaaaagcgcgatctggcagtccggatacgcagggggcttctctgctcaccttgcctcctcttccccgccctctccctagcaaatcagtccagccagtcctcctttgggtgcaccgttccctggggaggatgacaagcgctccgcacagaaatttaggggtgcgcctggtctcttctcacttgcttccaaccagggtcgactggctcaactccatcgtttctgtgctcgccgtcgccaccccggccactgccgtcgccgccgcctatataaatgggcgtgcgtgtgtctgtgtgtgtgtgggtgagtgggtgggtgggtgtgagtgtgtgcgcgcgcctcagtttgaaagtaccccggcgcaggcctctccccgcgcgcccctcggccgctccggggagcgattgcgcccgggatctctctccctggctgggcggggaggaggtttcggaaaggcgctctgaaaacccggagagaggaatctgcctccagcccgggcgcaggaggccgcgcgggggtgacggggcggacgcagggcgggggaggccggggcgaggggggcgcagcgccctgtgcggccgctgggagtcactggtggcctcgccgtgctgggcgcgttcaggcgcaaagacacttcctcacatccaaggggttggaattgagactgtcagcgtggtgggggcggggagtcctcaagttgggagtaggggtgtgggcagtaagcgcagagggaagagggtggggtattgaggatgcggcagatttggcgtgttggagcaagtttttcgccgaattccagctctgtacaagacctttgggttcttacagggaaaactgggctgctccttggagatccccgggctctatgaacgcaaggagacaactggggagggcaaagggcgtaggcgcatctccatgtggccagagcagccagagtgctgtttataccccttcccaggcatcacgtggccccctgttttgggcacgggctctatagaatatcgtgaatgagacccaaaccaccaatgagcaaaatccccagaaaactgcttacgaaactcattgcacgttgggtgagataaacggcattacctcctcgtcaccctactgtgctgatcatacacaggatttttaaagttctccatcagagagatgatgatttacagaagaagggaaagttttccccttcagttaactgaaaggtataatttctaaaaaggcatgcattttcgattgcagcaggctgcaggctgtatgccgtcagtaaaaagagtttgggaaatgttaataaaacacgtgctttcatgcctccaaaaagtatactgtaaaaatattttttattttaaagccacaagccagatcttgggaatgcagcctcttttcgtgtttctaaagagaacatggaaaaaatatgttttatggcaacaataaagtcctccagacctgcggtggtgtctcctctcctccctctaaaggcgggagagggaggaggctccaacagtcagcactttggactggcccacgctttggttttaaaggcttcaacagacccttgtcttattctacaaaacaaaaaaaaaaaaacaaaaaaaaaccaaaattttcggcaaggacatatccttgttcataaaagatccaggctgaggctttgggggtaaagggccatgatgtctgcaaagtacacataaatgtttcagtaacaacaagaagaagaatgatgataataaagatgtgtatgtatgaagggagaaaaaaacaaaatatggcaaaatgttcaaaatagtctaggttaagggcatatcagggttcattgtacatttcttgcaactttaaatttggttttgtttccaaataaaaaatgaaagaaaagaatattttggaacaaggtcttttaaggtttgttttttatctcacaaatctgaaaagcgttgagctagctgtttttaaattgagcttgactttttaatacgttcaaaattctgaacatgagttctgctgggtaggcaagccagacacttctccctaaacacatggaagcatggagaacaatgagggatattaaaggcatctggttagcaagccttgtggcaacaggctgccctgcctctcactctcccttacctagcactgtcctattaatagcaagggtgccagtggagcgggcccatctgagcattgacaggggcaatgaataagtggtgtgggactctcactcctaaagggagtttcagattattggcaa

SEQ ID NO: 1563913 - DNA, 4001 bp, Homo sapiens
tcttcctgctcttgaaaactgccaagaagccaaaccagtggtaatttaacttaacaattgttcctctccattgcaagctatccattgcataaagccatctccttctaacctggcagatcaccggagagggttaggtcccaaaggtgacttggtgaagccctgccttccctcccacagaaagggcttgctaattcagtggacaggaaggtagagttgaaaaaactgtccttaacttaccctactgaactcagtaggtggctctctgcaaactgtgtagggattttgaaaactactcctcaagctgacttatcaaatttctcctagactaatcctgtaatcagtgggaccccagcaaaaaactgagcccctgccatgcagaggctcctggtccaacgtctacattccatctggcagtcatctgtggcttccacctttcttttccaataggactcagttcatttatctccaccagagacctctgccatctacctcagaggtcagagacctttatgaagagaggtgccagggcctgactccagtccttctggaaggggtggggatggggtggggtctgcaatgaagaggggctggcccaggcaattctttcccaagttagctggaagcttgcactcagaaatcagccagcagtcatcttctgcccccattggaaactttctggccacactgctccttctctccccagctttctggaggaaccgattggccctggtacctggcatgccccagctgtagtcagcatttccagcctactcagtccccttgctttcagcagaagtcccacactctcaggggcactgcatttccacagacagaggattccccgtgtaaagtgctgggatccaaaacagtaaaggacaagggctcgcgtagcccccctaccctctcacacgtcccgcgtgctcagtgagggcaccactggaacctggtttctcaggcatggctgattcctaaagtgaatgcgcttcaggaaactgatgatagtttctttaaatgattctctccagcaaataacagccagaccctagcggtagtgggtagggggtcagcaaagccccggacattctcccctcccccctcccggccactccccagcacagcggcccaaaacgtgcggagagaagcaagcgggaggacgctcagacactcctgtgagtgggagccgcgtccacgctccagcgggaagttgcacaggtttaaagcctgtaggcaccaccgccggctcctgccgccgcgtaggttgcggtcggctgcggcgcgctttctgaagtggccgagctcctagacaggagcaaagaagccagcggctcggccatttagctcccgacgcggcgatgaggacggcgccgagggcctggggctaggtgggcgggtagggggagtatcgcccaagccgtcctggacccagcgcgtccccagccaaaaccccaggaggcggccaccaaccccagggtcgggagtcccaagggcacggggccactccggacggcgcgaccgggtccaagagcaggaagttccagcggtagggcgaccgtggggcggaggcgggggtcggggaaatgggatcccctcactccccgaatggaggggaggggaggggcggagagaggcggggagagggtgggcacagcgctaagcgccgaccggcgcccctagaggcggggtagacgcggggccgcgagccaccggggcgccgtttttacctagctcttcctcgtcctcctccgggccaagcaggcggcagggaaggcggcggcggaggcgcacggtgcgccggtacaggctgtctgtgcggcgccccagggccagcaggtgcccctcgaggtcctcgagcagagccaacgagtggccacagaggtcggcgagctgccggagcaggctgagcgctgccaggtggctcacgtcgcggagctccgccagctgctgcggcgggttgcgcgggcacaggcgctggggtaccaccgtgcgcctgtagaacggcatcccggccgcgggcgcgggcgcaggggaccagtctggcggcgcggcgggctcaccccgagcagcgcccctggcccgagcgcccctgagcggcggccccagctccgggtgtagcaggcccctgggcgcgggccggagagcgtgcgggcgccaaagacgacgggcgggtaggcgggctgacgggttcctcgcctagagcgccggctcccccggggctgcacactcgccggagccaccagtccctctgactctgcttcgccgggctcctcctcctcctcccccctcctcctcctctcttttctcctcctcctcctcctagctctgctacttcgggatccccccacccaccttttttttttttcttcttttgcggtcagagattcgcagattaacgcttgatccgggagagggagaaagggaagtaggagtaaaaagagcgagctggagcgtgaaagaaggaatgtctgcgtgaggggggacgtaaggtacggtgtagaatgtgtgccccggtcctcctgaggagctccactcccagttctgatggttaaagttattttttgcttttttttttaacttaaactttttcttcataattacaaaaaaaaaaaaaaaaattcaagcacacccgcgcccacaccagcgggtaatcagcgaagaccgaccgaatagtttgactttattgatctagatttcctttcccaaacgtactcggtgccacgcacgggctagactaggctgtgaatacaaccttctagcacccaggagcttggaaataaggaccaaaaaaccaaatatcttattcgactgttcaagaagacaatgtctctagggagtcccacagtggctggacattgtaaagccattggagtggatgaatagaaacaaacccattttctggaacaatagacttaattcagatagagggacgccactccatagtttatgcaaaaagagagcccagggacgcctccttctggtagggtccgccagctgggataggctctatccctggccaggctgggctgctgggatgctctccgaagagggttacaggagccgagatgtgctttcagtgcgggcaaccctgtggtcacggcctgatttctctccattccagaaggcagaaaagagggggcacattattgtcctcagaaaaccagagtacgtgagcatatgtcctcatgcacttaggacctttccactcagaacgcttattttcaacacactgagctcccatctgactctcctctaacccacttctttgactttggtgtacttcggtttcttccttctcttcattctcttctcatttttcctcttacaaatgttcacatccttataatcctttataatccattagcaaaacacttttttttttaagagacaagatctaccactgtcaccctggctggagtgcagtggtgtggtcacagctcactgcagccttgaattcactctgggctcaggggatcctccggtctcagcctcctgagtagctagggctataggcacgtgccaccactcctgctaatttagtttttattttttgaagagacggaatctccctatgttgcccaggctggccttaaactccttggccccaagcaatcctcctgcctcagcctcccaaagcactgggattacaggcatgagccaccacactggccagtaaaatactttgaacagaatacctgcatctacattaatgattctaagcgtggcctgttttcatgcattccttcagataattaattgtccctgaagcagttcaagaaggttctacaactagtatatttcaaaattgctaatagattctaaatgttcacaccacagaaaaatggtaaatatgtgaggtaatggatatgttaactagtttgatttaatcattccacaatgtattaatatatatacatcaaaccacatcgtgccccataaatacatataattgtttgtcaattaaaaataaagtaaaagcgtaatccgatttcccttttcagcatata

SEQ ID NO: 1563914 - DNA, 4001 bp, Homo sapiens
atgccaccacgcccagctgatttttaaaacactttttgtagagacagggtatccctatattgcctaggctggtcttgaactcctggattcaagtgatcctcctgccttggcctcctaaagtgttgggattacaggcatgagcctctgtgcccagccaaaaaatgcatagttttaaggagaaaggaaaaggctcataattattgctgtgtaagtcttaatatcttgtttattgttaaattatgtgtcaggcactgtactaagttatttacgtgcacttatatgtttaaaaaaatgagaaacttagaaatattacaggcattgagaggtaggttaaagttccaacagttgggagatgtcttgagtctttttcttccggcagtgggaggtaataaagtatagtgatgaaaaggacaggctcggcagggcatgtggggtcatacctgtaatctcagcacttccggaggccaacgtgggaggatcacttgagcccagaaattcgataccagcctgggcaacatggtgaaaccctgtctctaccaaaaaatacgaaaataagccgggtgtggtggtgcgcacctatagtcccagctatgagggaggctgaggtgggaggatcacttgagcccaagaaggtggaggctgcagtgagccaagattgcaccactgcactccaacctgggcgacagagctagaccctgtctcaaaaacaaaacaaaacaatccccaagctatgcatttttccactccaatactcactttgattagagatctagtctcatcctggcgtcatttttcgaggtcaagactgagaccacttaacaagaccttcctcaaagtggggtcatctatagcttatcagatcacttttcctacatgcatctaatcgtcttgtctgaggggaaggtttatttcctctccaacttaaacccttgatttcattccttcctaattccccacaaaacgtttctacataaatatcctgttatctcagacctgtaagttccttcattcaacaagcaatggttgagcgcctataaagtaccaggcacttagaattctgtgatcagaattctcctccgttcactggctcctcctttccatgagctcagtctagtggggaatacaaatatattcacgaatgataatgacacaaccaggtaaatgctacagttctggtaggtctgaactctcggcaatattcgctaacaagacaggaggcggaagggggtagcgggagaccagggcactatatgaaggggcctgagggtaagggaaaatgaaaaggacgaataaagggttgtcgtgggtggattaaagaaagggatgaaaatgggcgcaaggcaagcagagtgagcgaaatgcgaatagtcagaagcggaatgaatgatagatcggactccaaaggcacgtaggctcgtacaagagaaagtgcggccgtctcactcacttctgccgcaggctctcctccctctccttgtcgaggaggctaggccaaggcttgtcgctcccgtaggggcgcgagtagctgccgtaatagactgacgaggaggcagaagcgaaggggatgccccggggcgcagagggccgctctctagaacgcgaccgcgagcgtgagcggtaggactggtttcgggagccttggctgaggccacccagctgatgggtgagtccattccggtccccggaccgagagcaagagtgcgagcgagagcggcggccccgcggggagcgggcagatttgctgggcttcggactcttcgacgaactgcgacgtcttccccccgagcccgaggcctccctatccgggctgcgtgagccggacaccggagccatggctactggggggccccagcagccgtgggacaagggggcgctctcgcgagcctaggaagatgtctgttgccttggttcccgggacctgccgctgcggaacagcccaaatctgaggaaaccttggacacagttctgggtacttctgcaaaacccttccccggatctaggcggtcgtcaccgacaggaagcgatgtgtgcatcaatataaataagccggtggggcaactagattgcgtgcatccttccagttccgagtgaggctcctcaagtctaagcaagagaccaagttctttctcagccttgaacttgaaacacttgaagggaagtatatatttcaaacacaatatacagtatacatttcactgagtggccgtatgaacaagacagttaattctgcttgtgtttcctgtgctttctgtgtgtatttatatataaatgtgtgtgtgtgtgtgtatgtcatgtatgaaagtatgaatgtgtattttctttttctttccaatcccaagcaaatcgggagggtttttcgcgactggggattagctatggtgtctaagccccatattgccgtgttagcttagagggcgcaaattttgttaatgactcgcgcctgataaacttcaattaagtttcccgcctagagaaaaactgcatacttatcccctagccaccgtctccaccaatatgccccagcaaaaggaggttttttttttttgagactggaactcactctgctcactctgtcgcccaggatggagtacagtggcaagatctcagctccctgcaaacctccgcctccccgggctcaagctatcctcccacctcagcctcctgaatagctgggattacaggcgcatgcgacaccaagcctgggtagttttttttttgaggggggtcgggggaaacagggtttcaccttgttgcccaggtggtcttgaactcctgggctcaagcgatccgccagcctcggcctcccaaagtgctaggattataggtgtgagccactgcgtctggcttgtatttttttccccaaaaagtgtcattttattttttatttttttatttttgagacaagggctccctctgtcatccaggctggagtgcagtggctatcctggctcactgcaacctccgcctcccaggttcaagtgattctcctgcctcagcctcctgagtagctgggattacagacatgtgccatcatgcacagctaattttttattattttttaaatttgtacaaatctatgggatacatgtgaaattttgttacatgtatataatgtgtagtgatgacgtcagggtatttaaggtgtccattatctgagcacaatacatttttgttaagtgtactctcggcctggtatggtggctcacgtctgtaatcccagcactttgggaggcagaggcgggtggatcacttgaggtcaggagtttgagaccagcctggccaacatggcgaaaccctgtctccactaaaaatacaaaaattagctgggcctggtggcacgtgcctgtaatctcagctactagggtggctgaggcacgagaatcgcttgaacccgggaggctgaggttgcagtgagccgagagtgagattgcaccactgcactccagcctgggcaacagagtgagactgtgtttccaaaaaaaaatagtgtactctcactctaccatgctgtcaatatcaaacattgaatttggggctgggcatggtgacttacacctgtaactccagaaatttgggaggccgaggcgggccaatcacttgagcccaggagttggagaccagcctgggaaacatagggagaccctgtctctacaaaaaatttaaaaatttggcgagtgtggtggtgcatgccagctactcaggagactgaggtgggaggaacacttacttgagcccggaaatcgaagttgcagtgagccgtgattgatccactgcactccatgggcgacagagtgagacactgtcttaaaacaacaacaaaaaccattgaatttatttcttctatcttactgtatgtttgtaccctttaacctatttctcttcatccttctgcttcctcccacataccctacccagcctctattatctatccagcaaaaggaatttgtaatcccctctttgtccagctccttaaactagtctcattgtatgccagcccagca

SEQ ID NO: 1563915 - DNA, 4001 bp, Homo sapiens
ccttcccaaatatggcagctgtggctcagtggaaagagcatcagtctgggtatcagaagacctaggtcctagccccagctgtaagaccttggaaacgtcacttaacttcttggcctccactgatttagcagtaaaaatgagatgccacctaatccccaaagttgttgtaggaaatgaaataataaatatttaaaatgtgttgtacatcataaagctgtatacatccactcactccacacacatttattgagcagctattatttagcaggcaatcttctaggcactgaggataaaggtgtaaacaagaaagcaaaatccctatccttaagggagcttccattctagtgggaaggtaagatttattattaacacaaaggatagttatcctcatttaagtttttgtttttattttaaggattcagatttccgacagccttctgtgatattatggagacttacgattataggataaaggtaacttttgaactcaagaacaacactgttaggcaaaggtcaagtagatttatctgacttgttcaataactaaggcttcttcagttgtaaccagttcctcctaatcattatctctggaggtagaaattatgctaaccttgagaagacagaaaagtaatgtctgtgatgagagcaaagtatatcacactgaatgccatgttcaataattaagggcaggaggagacaatcctatttttctgcatctgttacagtcactcctggaactgaactggccaaaattgacatgatcatattccagaatctctcacccttcctgatttaaaaaaaaacaaaaacaaaaacaaaaacaaaaaactatgattgcaggaatgtcaaaagaagtcgtctcccaatctatcaaagaatgaatagtctagtatagggccgatttaggggttctgaaggacagaggtccaagtagcctcttcaaaaaaaaaaaacaaacaaaacacgctgcgttggaaccatactgcagtctccattgaatgcaaagagctttcaaagaggcctgttcaaaacgtcaccaggttctaggaaaggggggaaaaacaaacacacacacacccccacccccaccacagacacacacacctaaaacctcactcagagccaaatgttaatccttctgatcccatttagggtaaaaagagggcaatccatttttacagtagatatatccatttctttgtttgagtccagacacattatgcgcaaatctacaagcaaggctgacgctgctgcggctcagagagctgatacgtaccgcctccccaggagaagacagtaagaccctgctagggggctgcaagtagaggggggtatttaagaggaatggaaaaagagagtggtcaggaggagactagaacagtggggtcccctcgcccttcccccacaactccaactgtcgaatatattctctgcggatactgcatccttggaaggccctacgcaggtccgagatgctgctattcatcattccccacgtcctctaataccgccaccaactacaatgaccacctctcaataatcctcttctaggcgctgcttcatctccatccctggtcctggagaggccgcttccgcgatctctgcaccctcctagctgttatgtcatgcccagccaccacagtcggccaccccacccccaggccaatagtgatccctctagtgccctccagcacctccaaatctccagcctccaacctatcctccgcatcccgcccccgtccctatcccaaccaccatcatcgatccctccagcgccgtccctaacccgatcccccatcaccgatctctcacccccgtccctaacccgacacccacaccttcctcacctgcagcccaggaagacgtggttggtccaggcggcggagagcgcgaggagctggtcgagggcagccccgggatagctgtgcaggtgccgacagatgaagctgcgccgcagagcccactgccagtcactttcgtggctatagcgccactgctccagcactggctcgggcgggggcggcgggaggggcggcagcggcggcggcgggagggggggcagcggcggcgcgacaggaagtcgccccccaacagcagacgtcctccagccatcttctccgcccccaagcagggaccccagggacgaagccgactacggaccgcgagctaggcagctagcaagcgggcggaaacggggggccggtgggaggggccgggtaaggaggggcgcgctgaggggagaagatcaactctcggggggactggagtgtgtgcgtgggggccaccgttaggaggaaaagaggagcacgagctcgcgtcccgacactgggatgcacgtcccctacactcctctaactcgtggaggagcagaagggcttccgccgcactcacgcgcgagccggggaggccgagtcaggctccgcacctccacggatccgcagacccacgcactgcgcggagagcgataaaagaccccagcacgctctgctcccctcctctaggttctagcctacctacccgcgtgccgtccggggttgtgaggccagtgcgcttgcgccgcggctgttccctaacttccaaatcccgtcgcagaatctcgcgcgacgtacttttttccctccagtgacgactacgggcctttgacgcactacggtgacaagcggagggcggggactccagaaagggaatttaggaaggttctctgaggttcgagaatatggttagaaggtgccctcagatgaatgttggtagcccacggctcgtctgacgcttttccctggatttttaagcggcgcgacagtgagaccatgttccttgtaagggatttaggtctgcactggactttacattaaaacaaaacaaaacagtcagctccccgaggtgccttttcttcagagagtagcttgaaatgctctgtgcatcgtgcatcattagctttgtgtaatagcttactgcggaaacgtagtaaaaatgaaacacttgccaagaaaatcatccacagcgccgcttctcaagttagccagtttcaagtccatactgtatcccaattacgaacacagatactgtttacacagttctgatcacgattgcaagtctgtatttcacgtatcaacttaagtgcaaaagattacaagatacaaaaggggcccacagaagagggtactgcaaggtagagccgctcaatcactgtagccaaatgtatcactccacccggagtcagcttcactcaataacttcagtccctatctgccaacctgtgtcacgaaagcagttaatcaatgagtgtctgtcggcgggaatttacacagcacctactgtgtgctcaatacagcaagagtacaaaaaagaaggaaagaaagtgggttttctctgttgtcctggaattgactacaatcttggtggggagaaatagccctgcataaaactaaatgttccaccaggagccggaccattggatgaggtggctttaacacactaccatctttaactctttaatgacgtatttctaattatatgacactttatgttaggggtgtattagactgagaggagcagaagataacagcactttacacactttcataatttatttccacgtctgtctttctccgtggtgggcattcatgtttattggggtaacaatcgaaatgtttttaaaaagttcacaaggtgatacatgctgtgaagaaaataaaacaggctgggtgcggtggctcacgcctgtaatcccagcactttgggaggccgaggcaggaggattacttgaggtcaggagttcgagaccagcctggccaacatggtgaaacccctgtctccactaaaaatacaaaaattagccgggcgtggtggcaggcgcctgtaatcccagctactccggaggctgaggcaggagaatcgcttgaacccgggaggcagaggttgcagtgagccaatatcgcgccactacactccagcctgggcaacagagtgagactctgtttcaaaaaaaaaagaaagaaaga

SEQ ID NO: 1563916 - DNA, 4001 bp, Homo sapiens
tgctggcaaaatgtgtttgttcatttacctcttttgtttgagggccataaggatcttcctgtctttcatcttttgaactactagctacaaaatgtacaggctcaaaacgaggtctcgcatggaatttggaaccggcttgctttttaggaggattttgacctatagaatgagtgaaatttacaattcattaaaatgggaatatttcaaaagaaccaagcaggaaaatagtaccaaccatattatttgcaagctgcattgttggtacgagatacttccatcacaaaaacttcacgccatttgggtgaagagactcaattatcaatgtaagattccagcataaggagggatgctccctgtctttccacatgtaagggaagacccttgatagaaaatataccattaagtcaagtatacaggtcaccaccacacatgactggtagctgcttttgcatcaaatgagctaaagcacaggtgaagtatactcttcacttgtgctggaaggtgaagtggactggaagattgttccagtacaatctcataccacccatgctgaaaagctcacttaaggattgaaaatggaacagatggctctaatgcaagacagataatgagcagaggcagttacaaagcctttctcttttgtatcagaggtgagtgactctgtgatggtgctttacatagttgtgactaaaaatcaaagaaaaagaattatcaaaagattcagaaagttttcaacttcaaaacctcagctctgacccattcatcacaaaagggtgtttgctctattttctttctagaacaaacaacagctggaaactaatgatttatgtgagatgccaaatttaaagctatggaagaactctgatgaagctatactagacactagagcttcctccctgtaacactgctcagtagaaagctcgtccatcctggacccatccaagaggatttagtgacttagatgctcaagtgatcacagtataagattttatttagagggcggttccatgacataaatttcaaggactgcataataacatgatttcaatattcttagttttcaattctatttagcatcctcaaaaaattgtatataattaaaagctaaaactcttttacccgtaagaactaatgttaccaatgttatttgaaatcttataccacactcatatcatttttttaaagccatgttgtttcttcaaatcccacctttcagaaacaagtatactcaccatcacatgttgagaggtggcgtttttgacctttggaaggtttggacagcaccagatcatatgaaggcatctccccaatatcaataccttcagccatttggagaattttttccatcaagcgtgggctgtacctatttaagttaatataatctacagttaaaacaggtaaggatgtcttttttaaaaagcttcaaaataagccagtcttataattgctcccacaagactttatcaacagggtatcttggctataaaaccaaagaatcggccctaaaatatttacccatcaaatgaataattatgttactaattaggaaacaagatttttcagcataagacatacaaatataaactcaaaaaaatttagcaaaaacctcatctttaatttgaattgaaaatatcagtataaattcatgacttgttttgattgtggtctctatcatttctcatgaaatggaatcagggtccttagagaaatggctgattctaagtctgtggcaggaaatgtctaaggtgagcctgagaaatcatctagcacctaaaaccaaggaaactgtcaaagatcaaaggtgttgtgtcaaatggactcagaagccaatttgaatagactcttactggcaaagtgagccaactcaaatatcgataagaacaatgatggcaatggattgaaatatatcaaatatgttgaaaattcattagttcataatgatacttacaaactattattggtcacctttggaggatggaaggaaccatgtcattattctgcaaacaggtaaatatgaaaggaagaaagcaaacatttatcctgtattctcctgtataaattgtacttagagcaaccaaagagatgatgaggaaaatgtcttttagagaagcattccagctaataaatgaaggaatggactactaccattttgtaacctataataaaaaatgatcatcaggcgggcatggtggctcacacctgtaatctcagcactttggaaggcctaagcgggtggatcacttgaggtcaggagttcgagaacagcctggccaacatggtgaaactccatctctactaaaaatacaaaaattacccgggcatggtggtggacacctgtaataccagctactcaggaggcggaggcaggaaaactgcttgaacctgggaggcagaggctgcagcgagccgagatcacgccactgcactccagcctgggcgacagagctagactccatctcaaaaaaaaaaaaaaaagaaaaaagaaaagaaattatcaatggctgctaaacctattaggtgaaaagctaatgggggaagaactcacagtcagacccaagcaaatattctcaactgattattgacaaaggtgccaaggcaattcaatggaggaaggatagccttctcaacaaatggcgccggaactagtaggcatccataggcaaaaacaaaaacaaaaacaaaaaaaaaacaactctacacctaaacttcacaccttatacaaaactaactcaaaatacatcataaacctaaatgtaaaattatgaaacttttactgaaaaaaaaaacacaggagaaaatctgtgggatctagggttaggcaaacagttcttaggcttgataccaagcatgatccataaagaaactggtgataaaatggacgtcattgaaattaaaaagttttggctgggtgtggtggctcactcctgtaatcccagcactttgggaagccgaggtgggcggatcacttgaggtcaggaattcaagaccagtctggccaacatggcaaacccccatctctacaaaaatagaaaaaaaaaaattgctggacatggtggtacacacctgtagtccaagctacttgtaagactgaggcaggagaatcactcaaacccgggaggtggaggttgcagtgagccgagattgtgccactacactccagtctaggtctgggtgacagagcgagactccgtctcaaaaaaaaaaaaagagtaaaaagttttgctcttgaaagactgtgaagaggatgaaaggtcaagctgcagactgggagaaaatatctgtaaaccacacgcttgacagaagactagtagtacctaaaactcaatagaaaaaaaaatcaaattaaaaaatgaacaaaagacataaacgaaatacttcaccaaagaggatagacagattgcaaataagcacatgaaaagatgttcatcactagccaccagggaaatgcaatttaaaatcacaatgaggtatcactatacacttattagaatggccaaaataagtgacaatggctgggcacagtagctcacgcctgtaatccccgcactttgggaggccgaggggggtagatcacgaggtcaggagttcgagatcagcctgaccaacatggtgaaaccctgtctctactaaaaatacaaagattagcctggcatggtggcatgcgcctgtaatcccagcttctcaggaggctgaggcaggagaatcgcttgaacctgggaggcagaggttgcagtgagccgagattgtgccactgcacttcagcctgagtgacagagcaagactccatctcaaaaaaaaaaaaaaaaaaaaaaaaaaaaaagtgacaataccaaatgctggcaaaaatgaggagaaactggatcactcagacattgctgctgggaatgtaaaatgatacagtcactctggaaaacagtttggtagtttcttataaaaccaaacatcaggccgggtgcggtggctcacgcttgtaataccagcactttgggaggccaaggtgg

SEQ ID NO: 1563917 - DNA, 4001 bp, Homo sapiens
gatgctcttccggtgtattataaaataaacaacggagcatggggaacacatattcagagactcatagaaataaactcacaaagactcaaagagggaatgagagagaccaagccaggatcacagacactgcgatattcactcacagagacatatattccaaacccacagagatcccctcatatagtcccacattctgagacagagcacctcacacagccagagcctcacagaatgatacattcagagacacacatagagacttactgaaatataatcacacatacccgcataggtaaatatccagacacatgcagcataatggtgacacataggtggagacagaaacagaaatagcaacacactcagacacataggccttctgacacagttacacagtcaacacatagacacaggcacacacagatactcccgcatgctcccgcacacacacgcacacacacgcacacccacgccacatgcacatttagttttcctccatttctcccgccttcccagattgcaggcctgctcctttaagaactggctgaaggggtgggggagggagattgggaacgcccggcaatcagccaccacgagaggggaatgagaatgtgtgtgtgtgtgtgtgtgtgtgtgtgtgtgtgtgtgtgtgtgtgtgtctgtgtgtgtgtgtgtgtgagagagagagagagagagagagagagagaagaaaaaggaagaggagggagggcgggtaaagtggctaaaggggtgggggctcagaggaaatgaggaaatggggagcaaagtatggggggtaagatcccagacactgcccagaatgcacccgggtgtggggaggaggggaaggggaaggaaggggtaggagtagggaggtggggcaggagggagtgggtgggtgtgtgtattggggggggcatagtccgcagctgagttcacacaatccccccattcaccgtctccatggcaactccagggcacagaccgctcattcacacagcttccccaccagcaacccccccacattaaccccctcggtgctgcccccaacccacaaattccattaaccctttcgggatgccctcctctccagtaacccttcggcgccaaatgccaaattctcctttgagtcaattccctgcagcccctcccccgtgaacacctagacaatcggaccgacccccaaacgccctctgtaccctaggacccactgtgaatccccaaggccaagatctccatcctggtccaacttgcaatttgggagaagacaaggggaggcagcaatgccggggatgagaatggcatctcggggtacttttggggctgcagcggtgctgggcgcggggcattgtgcaggaatggaccaatattgagaactgcagtattgggggctacgagggcttggaatggattgggggatggagttgcactggaatgggggaggataggataaaggcctccattgggtgggggggctgcagatagtgggggagggagcctggctatgagatgctatgatggaagggggatggggctgcactgcaggggaggggggactggcaatgtgcaatcccgggatggggctgggggccctcaataggggtattttgatgagcatgcgggatgggctgtggaaatagagggaccatgggcgggaggatgttagggatgcgggatttagggaggaggtagaagggagaacagaagcgggggaggatcgggggtcaggggtaccgatggagaacatggggttgagagggatgggggccactggctggggagtggaggagcctgggattgggaggggttaggatgggggcaaggtatgggcagctagaggatgagagaccggggcaggcggcctcacctgttccccgggctgctgcaagcgactgaaccgggccacggaccacccatatcgcctccaggccaagggctccgcacccgaatccccgagatcagctctccggcagcctggctgctgtgcccgcgcaccgagggggcgcgctgcgcgttcccggacacgggggggcgcggtccctgccattaactccttttgtgccagagatggctcaagtcctggggcatggcccaattccccccatgctcaggcacgttccgctccctctctctcacgcgggcgcgcacacacacctcagattgcaagctatcagacaggtgatcttccagggcagctagcccaaactttacccgcaaagcttgagactttgtcccaaagggagaaactgaggcactgcctgcaggaaccctcagtcatactacacaaaaacacacctccacctcaatcagcatcccttatttctcagcgccagcactacccaagcagcaaccagtggggccactctgctctcatcctgtcactctcccaaaggtcaatgctgttcccttctgctgcttctgctggggcatgtcagactgtcagcatgccagttgtctgaccatttcagtctctcccctccaggttcagtgtctttgtgtcttgtgtttttgtatgtggcgcacctgccatttgtttagcaacccccaagcccctctgaatgtccctcatcccagccaagcctgtactcctgtggctcctcagaatgtttatgtcaggatagaataagtgagaagaaagcttcagtcatgtttgcctttacactgttggggagttccattccttgtgcacgcaactcttaaacttggtaagtcccatataagcaagggcttcgtgggcctcaaagagggctattttattttttataacttgggtactgattggtgctcctggttttgccagcacactagacacttcccagtaatagggtgcaactatggcttgcatgttatccttaagttgtcaaatcatcctgtaccacccactcacaaggctgaggctgatcctcttccagccctagctaggcagggcagaagactccaagactccattgtagtaaaccagttggctctcctggacagccttggatctagaactcaaactggaaagcaagagggcgagaatggccctgccgcagctccaaatgtgactctggggcaacagttttgagttttctctactgtaaaatgggagcgagcaagtcatcctgggtaactgccaaggtgggtcacgtgagaacaggcagttctggcagtagggcagagagagaaagggtgcttatttttactggtctctcttcctcctagaaccaaacggtccttccacgacctattctatgatggcacatgccaatggagggcaatttttcatccaggaatgtgactctcagggaagttctctgtcctatgaaaggtatgccacttggtgcatgatggggaccacacaagatgacaagaagggtaggcagtgtctgtcatctccaccctccccagcttgtttgaggcccaacatctggggtgttgtggaagaagaatcaggttctattgatgtttcccctggcctaatggcccctcctcaatcccagcggtatatcccccatggaggaaagctgtaaagaagctccaacatttagttgagaatgttcattgccccttcttaaaagactaaggggacgggtgtggtggctcatgcctgtaatcccagcactttgggaggccaaggcgggcagatcacctgcggtcaggagttcgagaccagcctggccaacatggtgaaaccccgtctctactaaaaatacaaaaattagccaggcctggtggcatatgcctgtaatcccagctactcgagaggctctgaggcaggataatcacttgaacccaggaggtggaggttgcagtgagctgagactgtgccactgaactctagcctgggcgacaagagcaaaactccatctcaaaaataaataaaaagagactaagggcctataccttaatgtgttgccatgttgaagaagaggaagagagggtagcaatccaattagaattaagaaatttaggccgggcgcggtggctcacgcttgtagtcccagcactttgggaggctg

SEQ ID NO: 1563918 - DNA, 4001 bp, Homo sapiens
atccccgctcgcgcttccgcaggtcaggccacgcgggtgccagcgcgggctgtgggcgccccagccgcggccttggggaggggtcaggactgaagttcactctctctctgcgtggtctcgaagcccctcgcccaccccgcactgtctcctccgccgccggctgcgcgcttggcggatcttctccatcagttctgcccactggagtgggaaggggctgagccgagccgcgcgggaattgggaggcggggaagcggggaggcgggggaagagacgagatgaaatcggcccgggacagcagagaggcttgggatgggatggaagggaagagggggtggcggttgcgttttccagggctgtagaggtggtgcgcctattggaaccgactcctcagcctcctcccccgtccccacctcggggactggcggaccgtgcgccccgcaggcttaacactccccccgacaccctcgctccgagaaggggtgttctcagtgggcaccgactagggctccagatcccccgagacccagaccagggctccggtagtctgtcctcgcagcttccaacttttccgctccttcggaaaagcgggcagttcagagatggttcccagggcggcagctgcaagcccccccgcgcccccctcaaaggttcagactacactcaaaggctccgaaagaagcaaaaccaccagctctaccctccttctgcggcttgcctcacccttcccacccgcctcgaaacccacacacacgggaaaggggtgcatggagcccgctccccggtttacagaagcagcccggagctaccgtcatttcatcttcacgcggggtctccagcgcgcctggatcgttccctagccaagccaagccaggtctaatcaatcacgtgcgttatttcgtgcatcacccaagccgtcatcttatccgaggcccggagatgaaggagggaaaaaaaatcgcttaaatgcgaccccaaccaagccggttttccctttttctttctggttaacagcacccccccaacccctcaaaaaagcaccccaggcggtggtagctgacagttttcttaaagaataaggggggggggtggggggggagagaaaaagaaaagaaaagcctcccatgcctcacagtttgcagaagtcttcctgccttcaccatctccagccctggccgcttctctccttcttctccctgtactgcagatacatatatatttttttcctcctctccccgccacagtcttctgtttatttgtgtggaaggcagcgctactttgtaaacacatcacacacggccccagagccgttcaaatagctgattgcagcaaaacgcttccaaacaacggtggtctggatttttctctttaagtgaaaataaaaccaaatatttctgtggagaggttgcatgtaaaaaccgtatgaaggtctacactcccacccacacctaagaaatgcagcgagacagatgggagaaagtcctgtccaaattttccaaaaataatattaataatcataaaaggaaaaaataaagatcagatgaagtgaagctcaagtatctgcagtgaggctttccatcctttgctgcaagtcaaaatgtttaaacggctttttaaaatgagaataatgtcccagagacaggtcttaaaactgcacctaccttagctttggaagagctgcatcggccgttaagagttctttttacacgtccagatttttctagggaacccgaaacgaggtatgattcaggaggatgtattgaaagcccaggagccttccccttctggaaccccccaactagatttcctcatccagaggaatgcaagagccaccaacaccgcctagtttggaggaaattcgttgtttctgccgccaatagtctgtggacgggcagaacaagcattacaattgaagcaggaagggccaagctagtggctgaataagagctctgtgctaagagacagagaagggagagagacggttctgcaagaaaaagagagattgaggagagaggtcctgctgtctccggggctctccctctgccattggaccaaactgaatgaaatttacaaagccagcagccaatagatctccggagtcggccccatcactacagaaaccacatccacagctacaacctcatgcaaagagctgctaatcccaatgcaaaccagctgtaacggagagatcccgggtactcgggagatagagcaggtgggcatggcaaacggtgccaccgcaccagacgcgtacagcaaaccttcttcctctttgcttttttaggactctctagataccctccacaccaaacatgctgcagtatatgcaaacatctttaactgtttaaggtcacgatctccagcagtctctatgtctgcgttattgtaattcatttgggaagcaatgatataaaaaaaatttttaagagcagcaaaatttggaatacagttctgtaaagtacaggacctgttttatgctcagggtatggttgagaggggatcgatgaaagctttttgtttacttctattcttatactttcatgattttgataaaatgttggaattgtgcccaggatgaggcatttgtttttaaatacgcctcttcatttccagggtccaggaggttatctttcccagggagtttcaagttgcggggggcgaggacgggggtatgacccctgtacttaaagttgagttggagaaagttggatttaaattggcaatgcaaagatcagagggcataatagagtgttgtgacaatgaacacggattttaaaatgagattgcttgggttcaagatgcatgtgaccttaggtgtgtattttaatcgtttgcctccatttctgtatctgtaaaatggaacagataatcaccgtgtaatactgtaatgattagctgagttaatgtgtggggccaggtagtcttcacaacaatattacatggtgattacttttattcttctgcttggccagaaaagttagcttttcttaaaattatttcatggcccattaattcatttatggaaggaaaaagatagtgtccgcaacacataggatatcctcctaattgcttcggctttaggcagtaaaccaaagcatgaagcctgccatggtgatgtgaaggatatttgggcagcctgaccaataatggggaaggtgatagacaccaatttggggacctggtttcatgttaagactctatcctcacaaactttgccttgttgtaaagtcagttatgttctgtgaatctgttaaactgagattaaaattacctttcctgtggatttcttgtggagactaaatgaaataatatgtataaaagcaccttttaccaacaagataggtacataaatatacacttatctattaatagatatctatacccaataataaaaaaaaatatatccatccatacatacgtgtgtgttccaattattggatagatatttagaaatatgcatgtactttttccgttattgtatagatattgaagacccattaacatagtaatattgttaataagtatagcttattccccaaatcagtgatatacatggatatggatatatagctgcagatatatggacatatatatagatatctatatcctaaactaaagcagaatctcaccttgaacacagtaatttatagtaggccagaaagtcatgggttttgccaagaatgtattaattcattgacttattcataaattcagggttgttttttttttagcactggtgcagtcctaagcactgacatgcatctgtgagtgaaactcatccatttatttttgagaaagcatacagtctagtggacaagatagccaaaagcatgagaaaaaatatgattacaagaaggtgtgcacaaggaatacatatgaattcatagggacccatggaggtgaaaatgattaaagaagggtttgcaaaggaagaactttctgagtagggaagaaatggtacacagacactgattgggtcaagaagttgagaaagaagccatgga

SEQ ID NO: 1563919 - DNA, 4001 bp, Homo sapiens
tttttttctggaaatacagggattaatgcaaccatgtgccattagccatccctcccccacttaacattttgctcatttccacaggaaaatctatgctgaggatttaatggattactgctaacatcttccccacagccaactaaaggtatgaaataattctccactctccaaatctgcccccacaaaacggcagatttctttgctatctgatttcaccccgctctgccatcccctaggaaaaggctcagtgcgtccattcaaaccatgcaggtctcttgcagtttctgccgctttgttctcatcaaagtcaggtgtttgcaccctggccatttaatttctagctggagaaggaagctaccccggatttcttaagcatgcacttctatgttgcccgcagaacgcccacacaaactggcaattctgcttcgtcaggataacgaggtctccctaaactttttcttttccttttttttctttctttttttcttttttttttttttttttttttttttttttttgcttttgccttcctcacatcaccggaagggctgattctgagatgggagctcacgcacaccaccccctttcaagaaaatataatgcaacgcgctccgatgtaaaccctacgggcaacggatgccttcaaaaagcataagataagagcaacaacaacaacaacaaaccaccgccccccccaaaaaaaatgaccaaatagaaataaaataaaataaaaataaaaagaagccatactaccaccttgtggatccagctcgcaagaacatcacctgcttagttccaaaacccccacccaacccccaccccaaatttcttaagttgggtccaaatgacagatcgggatcctctgtcctcactccccgcagactcgcccaagccctaggctgaattcgtgacgcgcgcgcccagcacccgggcgagttgcaagccccggcgcaccgcaggggccaaaaccccgccggaacctcctaggaccccttcacgctgcctcctgcaccccctcccccgccatccccgagatagcagcagcacatacacaaaaagaggctgacacctgccgtaggttcagaggaagaaggcagagaaaaagaaacccgcagtccggaaaaaaaaaaagccttctggggaaggggaggggtatgatgcggaggacgtcctccggctgcccctcgctctccatgcagaacatccgttcccagggtggcccgggccaggcctcgggggtgcaagggttggcctgacccccctgctcccgcccccgccgctccgggaagaaagggcgctgtgtctggcggcgagcaggcgccggaatcgtgcgctcgggcccagggttgcacggagcactgggcccggataccgggggcgcaaagcttcgggtgcggcccaggagaaccccgccgagggaccccagcctaccggttctcggaggggcgaaagagccaggtcaggttgagggacaggaggaggaaggggtgtccaggagactgactgaaggatgagagtgtcctccggggtagcgaccggcctcttggaaaaccagaggcggagggagcagccgcggagtggagggcgcaggccgggacctgggcctctcctcccacagcaagccccccacccacgcatcatctgcagccgagcggcacctacctccctctccctacctcatccccgctcgcgcttccgcaggtcaggccacgcgggtgccagcgcgggctgtgggcgccccagccgcggccttggggaggggtcaggactgaagttcactctctctctgcgtggtctcgaagcccctcgcccaccccgcactgtctcctccgccgccggctgcgcgcttggcggatcttctccatcagttctgcccactggagtgggaaggggctgagccgagccgcgcgggaattgggaggcggggaagcggggaggcgggggaagagacgagatgaaatcggcccgggacagcagagaggcttgggatgggatggaagggaagagggggtggcggttgcgttttccagggctgtagaggtggtgcgcctattggaaccgactcctcagcctcctcccccgtccccacctcggggactggcggaccgtgcgccccgcaggcttaacactccccccgacaccctcgctccgagaaggggtgttctcagtgggcaccgactagggctccagatcccccgagacccagaccagggctccggtagtctgtcctcgcagcttccaacttttccgctccttcggaaaagcgggcagttcagagatggttcccagggcggcagctgcaagcccccccgcgcccccctcaaaggttcagactacactcaaaggctccgaaagaagcaaaaccaccagctctaccctccttctgcggcttgcctcacccttcccacccgcctcgaaacccacacacacgggaaaggggtgcatggagcccgctccccggtttacagaagcagcccggagctaccgtcatttcatcttcacgcggggtctccagcgcgcctggatcgttccctagccaagccaagccaggtctaatcaatcacgtgcgttatttcgtgcatcacccaagccgtcatcttatccgaggcccggagatgaaggagggaaaaaaaatcgcttaaatgcgaccccaaccaagccggttttccctttttctttctggttaacagcacccccccaacccctcaaaaaagcaccccaggcggtggtagctgacagttttcttaaagaataaggggggggggtggggggggagagaaaaagaaaagaaaagcctcccatgcctcacagtttgcagaagtcttcctgccttcaccatctccagccctggccgcttctctccttcttctccctgtactgcagatacatatatatttttttcctcctctccccgccacagtcttctgtttatttgtgtggaaggcagcgctactttgtaaacacatcacacacggccccagagccgttcaaatagctgattgcagcaaaacgcttccaaacaacggtggtctggatttttctctttaagtgaaaataaaaccaaatatttctgtggagaggttgcatgtaaaaaccgtatgaaggtctacactcccacccacacctaagaaatgcagcgagacagatgggagaaagtcctgtccaaattttccaaaaataatattaataatcataaaaggaaaaaataaagatcagatgaagtgaagctcaagtatctgcagtgaggctttccatcctttgctgcaagtcaaaatgtttaaacggctttttaaaatgagaataatgtcccagagacaggtcttaaaactgcacctaccttagctttggaagagctgcatcggccgttaagagttctttttacacgtccagatttttctagggaacccgaaacgaggtatgattcaggaggatgtattgaaagcccaggagccttccccttctggaaccccccaactagatttcctcatccagaggaatgcaagagccaccaacaccgcctagtttggaggaaattcgttgtttctgccgccaatagtctgtggacgggcagaacaagcattacaattgaagcaggaagggccaagctagtggctgaataagagctctgtgctaagagacagagaagggagagagacggttctgcaagaaaaagagagattgaggagagaggtcctgctgtctccggggctctccctctgccattggaccaaactgaatgaaatttacaaagccagcagccaatagatctccggagtcggccccatcactacagaaaccacatccacagctacaacctcatgcaaagagctgctaatcccaatgcaaaccagctgtaacggagagatcccgggtactcgggagatagagcaggtgggcatggcaaacggtgccaccgcaccagacgcgtacagcaaaccttcttcctctttgcttttttaggactctctagataccctccacaccaaacatgctgcagtata

SEQ ID NO: 1563920 - DNA, 4001 bp, Homo sapiens
aaaaagcataagataagagcaacaacaacaacaacaaaccaccgccccccccaaaaaaaatgaccaaatagaaataaaataaaataaaaataaaaagaagccatactaccaccttgtggatccagctcgcaagaacatcacctgcttagttccaaaacccccacccaacccccaccccaaatttcttaagttgggtccaaatgacagatcgggatcctctgtcctcactccccgcagactcgcccaagccctaggctgaattcgtgacgcgcgcgcccagcacccgggcgagttgcaagccccggcgcaccgcaggggccaaaaccccgccggaacctcctaggaccccttcacgctgcctcctgcaccccctcccccgccatccccgagatagcagcagcacatacacaaaaagaggctgacacctgccgtaggttcagaggaagaaggcagagaaaaagaaacccgcagtccggaaaaaaaaaaagccttctggggaaggggaggggtatgatgcggaggacgtcctccggctgcccctcgctctccatgcagaacatccgttcccagggtggcccgggccaggcctcgggggtgcaagggttggcctgacccccctgctcccgcccccgccgctccgggaagaaagggcgctgtgtctggcggcgagcaggcgccggaatcgtgcgctcgggcccagggttgcacggagcactgggcccggataccgggggcgcaaagcttcgggtgcggcccaggagaaccccgccgagggaccccagcctaccggttctcggaggggcgaaagagccaggtcaggttgagggacaggaggaggaaggggtgtccaggagactgactgaaggatgagagtgtcctccggggtagcgaccggcctcttggaaaaccagaggcggagggagcagccgcggagtggagggcgcaggccgggacctgggcctctcctcccacagcaagccccccacccacgcatcatctgcagccgagcggcacctacctccctctccctacctcatccccgctcgcgcttccgcaggtcaggccacgcgggtgccagcgcgggctgtgggcgccccagccgcggccttggggaggggtcaggactgaagttcactctctctctgcgtggtctcgaagcccctcgcccaccccgcactgtctcctccgccgccggctgcgcgcttggcggatcttctccatcagttctgcccactggagtgggaaggggctgagccgagccgcgcgggaattgggaggcggggaagcggggaggcgggggaagagacgagatgaaatcggcccgggacagcagagaggcttgggatgggatggaagggaagagggggtggcggttgcgttttccagggctgtagaggtggtgcgcctattggaaccgactcctcagcctcctcccccgtccccacctcggggactggcggaccgtgcgccccgcaggcttaacactccccccgacaccctcgctccgagaaggggtgttctcagtgggcaccgactagggctccagatcccccgagacccagaccagggctccggtagtctgtcctcgcagcttccaacttttccgctccttcggaaaagcgggcagttcagagatggttcccagggcggcagctgcaagcccccccgcgcccccctcaaaggttcagactacactcaaaggctccgaaagaagcaaaaccaccagctctaccctccttctgcggcttgcctcacccttcccacccgcctcgaaacccacacacacgggaaaggggtgcatggagcccgctccccggtttacagaagcagcccggagctaccgtcatttcatcttcacgcggggtctccagcgcgcctggatcgttccctagccaagccaagccaggtctaatcaatcacgtgcgttatttcgtgcatcacccaagccgtcatcttatccgaggcccggagatgaaggagggaaaaaaaatcgcttaaatgcgaccccaaccaagccggttttccctttttctttctggttaacagcacccccccaacccctcaaaaaagcaccccaggcggtggtagctgacagttttcttaaagaataaggggggggggtggggggggagagaaaaagaaaagaaaagcctcccatgcctcacagtttgcagaagtcttcctgccttcaccatctccagccctggccgcttctctccttcttctccctgtactgcagatacatatatatttttttcctcctctccccgccacagtcttctgtttatttgtgtggaaggcagcgctactttgtaaacacatcacacacggccccagagccgttcaaatagctgattgcagcaaaacgcttccaaacaacggtggtctggatttttctctttaagtgaaaataaaaccaaatatttctgtggagaggttgcatgtaaaaaccgtatgaaggtctacactcccacccacacctaagaaatgcagcgagacagatgggagaaagtcctgtccaaattttccaaaaataatattaataatcataaaaggaaaaaataaagatcagatgaagtgaagctcaagtatctgcagtgaggctttccatcctttgctgcaagtcaaaatgtttaaacggctttttaaaatgagaataatgtcccagagacaggtcttaaaactgcacctaccttagctttggaagagctgcatcggccgttaagagttctttttacacgtccagatttttctagggaacccgaaacgaggtatgattcaggaggatgtattgaaagcccaggagccttccccttctggaaccccccaactagatttcctcatccagaggaatgcaagagccaccaacaccgcctagtttggaggaaattcgttgtttctgccgccaatagtctgtggacgggcagaacaagcattacaattgaagcaggaagggccaagctagtggctgaataagagctctgtgctaagagacagagaagggagagagacggttctgcaagaaaaagagagattgaggagagaggtcctgctgtctccggggctctccctctgccattggaccaaactgaatgaaatttacaaagccagcagccaatagatctccggagtcggccccatcactacagaaaccacatccacagctacaacctcatgcaaagagctgctaatcccaatgcaaaccagctgtaacggagagatcccgggtactcgggagatagagcaggtgggcatggcaaacggtgccaccgcaccagacgcgtacagcaaaccttcttcctctttgcttttttaggactctctagataccctccacaccaaacatgctgcagtatatgcaaacatctttaactgtttaaggtcacgatctccagcagtctctatgtctgcgttattgtaattcatttgggaagcaatgatataaaaaaaatttttaagagcagcaaaatttggaatacagttctgtaaagtacaggacctgttttatgctcagggtatggttgagaggggatcgatgaaagctttttgtttacttctattcttatactttcatgattttgataaaatgttggaattgtgcccaggatgaggcatttgtttttaaatacgcctcttcatttccagggtccaggaggttatctttcccagggagtttcaagttgcggggggcgaggacgggggtatgacccctgtacttaaagttgagttggagaaagttggatttaaattggcaatgcaaagatcagagggcataatagagtgttgtgacaatgaacacggattttaaaatgagattgcttgggttcaagatgcatgtgaccttaggtgtgtattttaatcgtttgcctccatttctgtatctgtaaaatggaacagataatcaccgtgtaatactgtaatgattagctgagttaatgtgtggggccaggtagtcttcacaacaatattacatggtgattacttttattcttctgcttggc

SEQ ID NO: 1563921 - DNA, 4001 bp, Homo sapiens
tcttcccctggccccggagaggcccaggatggaatgcactagtgaagactatcataataaagcacctataacagtgcccaccaagtagcaagtaccttgagaagtatttcttcctatcacctacttctgatgaccaccaatataatttggaaatatgtgcagaaccctcttcagagtaataaattcactgtcgcctaaatactgggcctctgaaaagagaacacagcacgaagatcagcagcaaagattactgtctacttgtgtccctgagactaataatcctgatgaagaattttgagagaaaacacgtattgctggttgagaaagactctaaccactgggcatgctacagttaaacaaatgtttaggtagaggaccaaacactacatcacacatatctgaaatctaaatctggtataaatttacaagactgagatggctgcctggatggccagcctgaaagctgtaaaatgaactaaggtccttctctaagagtttcttaggacttttcatttaataacaaggaaggtggacaaggacacagtataaatataaccagggcccccccactagagttgccagatttagcaaataaaatacacaacccacaattaaatttgaaatttaattgaaaactatgcaacatatacttaaaaataattggttgtgtaggtgaaattctaattcaactgggtgcccggtgttttgtctggcaaccctatcccttccttacacctacctcaacttcgattgcagacagcaaagtgcctcccagttccctctaacctcgacttctctgttaaaaacacaaagaaacgtgtcaggttatggtaagagtttctcaaactggaaaataaaatactcgatgcgaaatccataaatttaagtttcattttaaaaagtgatgctatataaatgcgtcaaggagctaggcggttaggactttagaaaaagggcatacagaaatctgactacgaaagcggcgggctctggatatgcagaggaactttccagctaagagttttgacaaagaaatatcgcttgaggggccccacttgcccattctgaattaatggcctcgcggggccgagaggaggagcgcccgacaaagcgcctcctcctctaaccaaccacgacttcagcgatctctcataatagaccccacaccgtcgggcccagggcggctcagaggccggcaacttactgacacgggtaagattcggagatgagttgcacaaagaaacagggcaggaacgaaaatggggaaagcccgaagcgaagcgagttgagaaaggtggccccccgcgggtgggctgagaaggcagtgtggcggcagagacaaggcctcaaggggcctcggaagcgccatccaccctccaaacctagcttcgccctagcctcttccttcgctgattgttccaagaaatcccactaccctcccaaacaagaaccaagacgtcccaaaactcaccctctaccgactggtatctcctcggagtaacggcgacgctacacggcctctcccgtcccgagaaaagagcgcgcgaccgccggaaacgagacgacggagctcggtgcctgccaaggggtacaaaatggcgttctcgattggttagctaaactgccaatcaaggtttagctcccgaggcggaatcatttttccgccatttcttagattctattggctgccgaatgccaaaggcttgagttcgtgtgaacgacagatggggacaaagagcgaggctttgtacctaatgcgcatgtgcaagcggcctggcgcgtgagacgggaaaggaaagggggagggggaaaaggaaagggagaggagctgggggtgggggtcggaaggagagacctaaacgaactgactgaaagactgaaagaccaagtggtgggagggggaaaggagaggagaaaaagggagaggaaagtggaaagagggagaggaaggggagaaaatgcgcgcgtaggcgtgctcggagcagtcctgcactgcgcctgtgcaagaagcaagagtaacaatgtcattgtattcaatggaatagatttggccttttcctactgaaaaaaatgccccgccatgtttcttttttcacacttccttgttagggcttgcatcctgacaccccatacttaatcatatttctagatgcttctcctgttgctggggctactcgggaaacgcaactgaaatagtcaactctttggtcatggttacagacggggtgggggaggagggggtgcatcataccttaggctctgcgtgattacacagaattgtaaccagcaccctcatttccatggtaaccagaaaacctagcagtccaaacatcactattgttcctatgatttactgagagattcaacaggtgtcatcattgccatggatatattgtaggcctctagatcagactgtatattccataggaggcctatcagtaactaaccttcattgtttcagtaatgcctaactcgccccgcccccgtggttaaccaaggactacaaggatcaattgataagtatgtgttgttaattcccattaattaattcacactcagggttgcagggtatcccaatgggcaccaccttatgtggggacacaatgatctagacttgggctgttcaatagaactgtgtgcaatgatggaaaggtcctatgtctgctgtgttcaatatggcagctactaactataagtggccattgaaatatgactaatgcaactgagaacctgaatttttaattccggctaggtgcagtgctcatgcctataatcccagtactttgagaggccgagacgggaggatcgcttaagcctaggagttcgagaccagcctgggtaacatggcgaaactccatctccgaaaaaaagcaaaaattagcctgtcgtggtggagtgtccctgtagtcccacctactcaggaggttaaggttaaggtgggaggatagcttgagctcgggaagcagaggctgcaatgagtggagatcgcgccactgcactccagcctgcgtgacagagtgagaccccgtctcaattaaaaagaagaagaagaaaactaatacttactcatagaaaaaaaaagaaaaatcaaacaatacccaacagtataaagagaaaagtcttggccgggtgtggtggctcacgcctgtaatcctagcactttgggaggccgaggcgggaggatcacgaggttaggagatcgagaccatcctagctaacatggtgaaaccccgtctctactaaaaatacaaaaaaaaaattagccggcgtggtggcgggtgcctgtagtcccagctactcgggaggctgaggcaggagaacggtgtgaacccaggaggcggagctagcagtgagccaagattgcgccactgcactccagcctgggcaatgagtgagactccgtctcaaaaaaaaagtctcccccccattcattctctagagatagcaattatgaccactttcttgcgtttctattttctatgtatgtactgtttatatttatttacttagagacagtcttgctctgtcacccaggctggagtgcagtggcacaaacacagctcactgcaacctctgcctttcaggttctagcgattctcccacctcagcttcctcagtagctgggactacaggagtgcacaactacgcccacggtgggtttgtatgttttgtagagacagggtttcaccatattgcccaaactggtcttaaactcctgggtgtaaggaatcccgcctccacttggcaaagtgctgggattacaggcatgagccagggcacccagtggaggaccactttttttttggcggcgggacggagtctcgctctgtcgcccagactggagtgcagtggtgtgatctcggctcgctgcagcctctgcctcccaggttcaagcgattctcctgcctcagttcccgagtagctgggattacaggtgcctgccaccgtgcctatgcccagccaattttttttttttgagacagagtcttgctctgtcgccc

SEQ ID NO: 1563922 - DNA, 4001 bp, Homo sapiens
attgtaggcaaggcaaatgatgaaatacagtgatatctaggagtaaggcattccattccccatcttagctgtcatttcctccactatgaacgtcaaagaaggtaaactacaagacctgggaggaaggaggaataaaactatttttaagtaatttattttttatttaaaaatcagtgcataggagtatatgtcagagataatgagaagtctaagcttgccagctggtttggtgggggatgaaaattcaaagctagagagttaaatgtgagtcaccatcatagctggtaaactctcccagcaaaaaataagagagggggaaaaaatgcaggtaaatgtggattttagagctagaaacacccttatatttgtatctaatctagtcactttattaatcccctgctcccctcccctgcccaattccccccacctacacacccacaggacctgaagtctagagaggataaataatttgatcgagatcacccagttagtagcagaattcaaagtacttgccaggttccctttctcctaaactagtgttctttccattatagtgcaaaaggaactcaatataaggcattgagcatttaaaatatgtcatgggataacctgacaaaataagcacttttgttaaatgtaaaacaaacaaccctccagggaaactccacatatttttccctggagcacctggtcggggggcgggggggtagacaggaataaaaagaagcatcacaccttctctcttctgttttgcctgtgggacccaaaagcaaaacaggagaaaagagaaagagtaatgaatgaagatctaggaaagtgagaaaggacacagggagccccaggctcaactgtggctcagaaatggaagaatgagagtggagagaggtgttagagtgttaggagaaagggattgtgcatacaaagggtgataaaggggttctggcctgaacgtcattggggagctgggttcgagtgatgccaattcagtcaattcattgtgtgacatctaggtcttattttcctttgtacaatcaataagttggtttacatctgcactatgcaatgccacagccactacccacatggggctgctgagcacttgaaatgtggctagtcctcactgagatgtgctgtgggtatatatacacatcagatttgaaagactcagtaaaaataaaaatatgtaaattagcttcttaatattttcaatattgaatacatactgaaaggatttgttgatatgttgggttaaatgaattatattgttaaatattaacttcacctgtttatttttaccttttcggtgtaggtattagaaaatttaggaattacattatgtggtttgctatatttctagtggtcagtactgggccagatgatctctaagatcactttcatctcaaacattcagtgactttttgaaatcttgatgggaccagtataggaaagatagagagaaatcagcactcatggtagtagttagaagtgagatggaagagaaagggagatgacagaaaatgaaaacagattgaaattccaaatacttgtgatttgacaacatgaacaattgcatgttatttgcctctgtcctctcatctgacccacagttgtattttttaactaactggtcttgatgagcccaataatcggcatggaatcatctttctctttcaaattgctttacaaatattaaaaaacatgatttctccttaatccttcctaattaataggaagtcaaacatcacttaccagaaacaaaactgaaaaccagtggttaaccacccagtttcccattgtcaagaggtggtttggagcccttctaggcaacagggaagattcagcaatccggattctggagaggtccttcaggaatggaacatttgtccagcgcagggtctgtgagcctttaagatgtgaaaaacacacacctaccccaagagttcctgggaatgaataagtttattctgccttccttctctggacagaactgtgctatcagcttagatagaccagccctatctatgagaaccacaagggttttacctgtggggattttactgcttcaggaaatagcaacattcttggatgaaaatattctctctcatcatcttatcaacatgacctaatgtgaagcattgccttcctagataaaagatttgctaaagtttctcataaaaaagattattagtctgggtctgtaaacagattacttcaggagaagtagggagggaagcgtgtgtggtaaggaagctgtttcaaagtgcacttttcaaactgttgccacatctgccggctgccatttggatttcagcctggctagctcagaaactttagcataccagttcccctggaggatgatctgtggttgacatatatgatgatggctttggggagaacttgactggctggaaggacaagtgaaaagaagggccaaatagagcaagagaaaatttaacaagtataaaagtgcactttggttcaaaataaacagaggcagagcactcaaaagaatggagatgattgtcttctagtatgatagatttactagagttgtgtgttcagctctgggcactgattttttttcccttttctaaaatggtgaaatatacacagaagagtatataaaacatacatatgtaacttaaagaataattttaaggaataagtatctatgtgttcactactcagattaaagaaaatagactatttttctccagtatcttaaagctctttgtatttccctccctgatcacatctatcttcttcccctcctctaccccaccggatgtaatcactatcctgaaatttggggtaatcattctgttatttttctttatatttttactaactataattgcatccctaagcaatatattgtttagtttttcctgtttttgaactttttgtaaatgaaacctggcagtgtgtatgtatgcttctgtggtttgcttctttcaacattgggtttttgagattcatacatgtacatgtaattgcggttcacttacactgctatctaatatgccattgcatgaatgaatatacattaatgtattcattcatcctactactgatggatatgatgatggaacaatgttgatcaaatgtcacacatatgctacagtttctctaaggtatatacccaggagtaaaattccagggtcctgagatttgcacatattctactttgctgtgtaattccaaacccgttccgaagtgaccacctaaatgtatactacagagagttatgaatgagagttctacttcctctacatgcttaccaacccttggtattttccagacttttttgtttttataattcaagtaagtgtggaaaactatcgtattatgattttaatttgcatttccctgattactaatgagtttgagcatcttttaattcaactgctggccatttgagttttctctttttaaaagagcctattctgagcctattctactttttggtctatctttctattggtttttcttttgcttttagattcttagggttctgtttataatcttatactaatcttttattgcttatgtttatggcttgtcttttcagtctcttaatagtgttttctgataaatggaagttcttaattttaatgcactctgattaccagtcatttcttttatgatttatgcattttatgtcttgttttagaaatccatcactacccagatatcaagatactcttttatattttcttctagaaattttatatttttgcattttacatttatgttttgaatccacctggagctgattttcatgtatggtatccaatttactacttttaaatatggaaaacgaattgccccagcatcatttttgaaaagtactttttatttttatttttatttttttgagacagggtctcactctgtcacccaggttggagtacagtggtgtgatctcccttcactgcaaccttcacctcctgggttcaagtgattctcatgccttagccacccgagtagctgggattaca

SEQ ID NO: 1563923 - DNA, 4001 bp, Homo sapiens
agacaggaccctcaggtgccacaacacaccaaccatttacttgggaccttgggacacatctacctactcagtaaaatggggtggggggaggctacagagcaaagggggttgattagcaggtctctaaagtctctttgaattctaaaatacagtgctcctgctctcagtccctaatgtgtcttttttccctatccctttgccaacctgatattattcacagagatttggaggaagggatagtccagatgcttaggaccatacaaataaccattcagaggcaggcccatgaaacactacatctagtgtcttgtgtgtccctagggaatagtctctctatgggaccctttaacaaatgtttccttttttgctagccttaatagatttcctccccccaaaaaaggttctagtaaatttcagaatggggtttcagaaatcgatgttgcagaatcttcagtgagcaaaaactttttttagaaaaagatatgctctggacttaaaagaaagctaaagaagaaagaataaccatttcccatgaaggcacaaacttttctatggtaagaaatgtgtagagagccaagtacaaacctaaacaaacaactcccctcctcttggctgagtttctgatagcagcccacccagcagaagtggttcctggagctccccaccccaactctgctgagttagtcacgatttcttcacctttgccccgacactctcctgatcactgaaaactcgttactgcccgcgcccctagataggcactgcccgatgcttttgtgagctgggaaaagccggcgcctaaggccagtacccttacccgggttaaagagcacggtccccttgaggtaggcgtactccttggtactgatgttcagactccagcatttggaaagaaagcacttgatggcttggacctgggaggcggagggcaccttcctggcctccgccggcggtgccaaatggtgctgcagcgtgggcacgggcagtggctcgttgcccccggtctcccgccgcctggtggtgaggatcttctgcagcatgctgggctccgagacttccacagtctcgaactgcaagcggtcctgggccagctcaagcatgagcagggacgcccagcagttgcgcaccagcaccagctgctggtccaggggcagcacctggaagcagggcaagtacttgacgaagcgcagcgtcttcaacaggcccgctgaggctgcctcgcagaccacctgtggactcttgagcgccaccggccgcagcgcaccagaggaggtgtcccaccagggggccctcggccgctcctccggagccgcctgcgcttgatttgtgctcgtgggcacgcagtagagggtgctgccctgctgcgggtggtcttcaccgcaaaagcagcagcggtacagaagcgccgtggcccgcccgcctggtagcgcctctttaccccctggcctctgcgcgaagtaggagcggtcccaccacgcgccccctggccgtgcctcgggcgctgccggagccacgtgcgtttgctttgagctagtgagcaagctgtagaggatgctgccctgccgcgggtggtcttcaccacaaaagcagcagcggtacaggagtgccacgggccgcccacccggaagccccgctctgcccaccccgggatcagagccgcacgaacagccccagcacggacccagcgtcgcctcgggcgccttcggtgccgcgtacgtttgctttgcgctcgtcagcatgctgtagaggatgctgccctgccgtgggtggtctttaccgcaaaagcagcagcggtacaggagcgccacgttccgcccgcccagcagcccctctctgcccaccccgggctcatcgccgcacgaacagccccagcactgatccaccagccgcgtctctggagcctcaggagccgcgcgcgtttgcttcgcgctcataagcatgttgtagaggatgctgccctgccactggtggttctcgcccgccatggcccgcggcgcccgtagcccagttctgcccagtggctgcctcctgggacctatttatacctagcgcgcacgcaggcgcgtcggccgcctcggtctgggcaagggcgcggaggcgggcggtgtgtgcgggggggcgcggtgctgcgctccggtgtgttcgcccatgacctcggtggttcgaaggggcgggtgctctttaaaagctggaaatggaagaacagcagcgtgggagctcctggacactttcctccttcctctcattacccctttccctgtctcaggaagaccggaggagagcgagcgcctggatgctgttgcaactctttccattgaaccctcgcatctaatttgttccctttattgggagggcaggggaaaagaggaaacatctacttctatgctctttgtaaactttcattaaattatcacagtttgtgtgacttatatttgtatatggatagggaggtctcattttctgagaccttgaaaaatacagaacatagacaagcatcatatgggaactcggtggaaatgcccaatctcaggctccaaccagactttctaactctgaatctgcattttaacggtgtccccagggattcacatgcacctagacgtttgaaaagcactgctctaaatatgctatcataagcgctcagtttaatgccatcagtatttataagcgcccactatgtcctggatgctgtgttaagagagctgggggcagcgagcaggatgtaaaagtgcctaaaacttaggaatataataattacgaggggataatattgttacagtgagaattgttttcattttagtatatatttttttttcttttaacttttaggttcaggagtacatgtgcgggtttgttatataagtgaattgcttgtcgtgggggtttggtgtacagattatttcatcacccaggtaatagtatccaataggtattttttctcattctctccctcttcccaccctccaccttcaagtaggttccagtgtctgttgttcccctcctagtgtccaggtgatctctttatttagctcccacttgcaagtgagaacatgtgatatttggttttctgttcctgcattactttgctaagcatgatggccgccagctctcattctttttcatggccgcagtgagaaattttgatccttgtaaaagtattccattggtaagtgtgtaattagtatttcttttcccacccttcctaagtgaataatgataaatagaagcatcaggaagcctggatccattagtcttcacttgccacacagctgtgaagacatggggcagggaagggtgttggtatataccagctgatacagaatcatttttactttttccctccctcccatcctccctctttctttttttgctgtttcttttccttccttccttccttccttccttccttccttccttccttcctttccttccttccttccttccttccttcctttccttccttccttccttccttccttcctccctccctccctccctccctccctctctcactccttctctctctctctttctttctctttttcttcttctccaggacctggaattctcagcataagaggaaaacctaggagacccccattttgcttgcagcgttaaatttcattctgcctgtgagaggccctaaatagcacagtggttaaatccctggaactagcactagattgcctcagttttaatcctggccctgccactttgtagcatcataaccttgggcaatgtgttagtttctttgtcgctgctttacttaccacaaatgtagtggcttaagtcaacacaaacaacacgaattttttatgttataattctggaagccagaagtctgaaatcagtttcactgagctaaagtcaaggtgacatttcttctggaagttctaggacagaatctatttccttgcttattctagcttcttgaagctgcctaagctccttaatatctgatcacataactctggcctctgcttccatctccttctctgatt

SEQ ID NO: 1563924 - DNA, 4001 bp, Homo sapiens
accactcacccatttagtcatatttagaagggagtttatttcagtttgcccacctgcccgcaacagtttcacatatctgccctagtttgctttttttctcttttcccaatcataggcagagaatgttggaggaagggtaacattttattccttggttttatacttttacttgggtgcaaatctagtctgaatatgaaagttctgcttagaaaggaaaccaccaattgaggcctccattttccggaaatctcatgtatgcacactgaaaggaagaaattctgggtgcatgcagaatgagaaaagatttaattttaaaaagttctgtgacatattttatgaagctgcataaataattgcaacactaatatctgtaattcaagtttgcactgattttttttaaatggcagagaacaatttggtaaaatgttacccatgtgtaccaccttacctctccacatatagcatctaatgtaaaattatatagggaaggctttgggaatgccctatttttgagggaggcaggcttctgtcataatcaaaaacacattctttaaatgccaaatatgtgtaaaattaagtcaatcgactttgaatagtcctataaccttaaggttaatatttagcttttttcaaagcaagcaggccactgccctgaactacagttgcctggtgatcattccagcgcggtgcctgcttattccctttcggagaatccaggggccttttgcattcaagacagggtgcgagtgaaatgccaatctaaaaagggaacttgaaacacggatttgggtgggatccaatattagccagaaaccagatgccaatgaaataaactgcgctgccaaaataataagtctactaattacgacggcgataatagcttaccaatcaattacaactctagagggaagctgggcattcgggaaaagatgagcccacaaatgaaaaccacaagaaaaagctaaatctggttgggtaaggaacacaatattaaaaaaaaaaaaaatcgagtgtgcagaattcactccttccccaaaaggcgtcgagttctttcactctcacaacactaaatcaggaacattgccctggcaagaataaggttttagaaagtgtattagaaaataagaaaagtgggactcaaacgccttaattttctagtcgctgtcacctaaagtaaaggtcaccccgcaagtaagcatctcccatggcaaaagaagcagcaaacgatggggcggcgggataacaggaaggaggagtactctcaggaagccacccgacgttgcactttttgacctctgttggaacgagcgggctaggacaggtactggagctccgctagacaaggcgggtcacatatttaaaatgccccgctgtttagggtccgcagcaccccactgccatctctttctctgtctctccttcccaccgccccgtgcctttgcctttcgttggagtttggtgcggtcccggtgcccagggggcgccttttccgcatgccggctcccaggatccccttccgcgcccgggggacccgtcgaagtcctggtctagcccgttttgagggcgtccgctccctccctctggtacgcagaacccgccaaaagagagcatttcggggggcgacgggcgtcctctactcaccggcaggtggcccagatccgtgacctccctgtccctccagcccccaggtcccgccatggcttcgaggagccgaacgggagcgggcgactgaattgggtgcgcgcagagtctgaggtggaagcggatgaagagttgaagggaggagagaggaaggaggagggcgggagagaggagtctggggatcggggttcgtggcgtgggagatagaggaggggaaacgtgtagtgaaaagagttgggagtggagggaaaccggagtttgcgaggcgggaaagcaagttgggctaaggcgagagaggagcctgagcgtcagtcctggagacgaagaagctagaagggtgctccgtgtcgagagcgctgtgtctgccccgtcagggtgcgcctctttcagggtggggaggggggcggtgcaaggagaggggacccgggagcagctcgaaagggattggtgcagcgtcacgtcgccaggtgggcagccgcccggcggggaggcaggctaggagggccaccggccgagggaggtgctgaaggactataacggtttgcgagcaggcccttcgcggcctcccccggccctcctgccccctcccacgtccactgctgcgccagccgcccctgcccccgcccccgctggcgagtgttccacaggaaactttttccaggcagctgccagccccggaaaaccggtctcgctccgcgccgctcccagtctgggccccacagccctgccacagtccaaacaacccgcgccctagacttcccaagaaacacttctgacttttctagttggctgttttctctttctgtccctctgattttatcgctccatttcttgcaaagacctaccgagttacagaaggaaatgacttgccatgggttgggaatcagtcctaggcgagcacctatttgaacagaggaaggcaccgagtacgccccggggctgtcacagcttggccttcaaagccattagccgagggcaagagcagaatggacagagccgctgggaactcttctcccggcaggccttatctcctctggccccaggctagttcgtgccaggtcccagtcgttcactcagaacagcacctgttctcaggtgcgcagggttgagtaagactgactcgtctccaaagcccggcctgccctgggtcctaagttttgcatatgccgtattcgcagcgcgcggagaaaattcctgcatcccttccagcctccagcgttccggccgggtttcattcattcgctcattcattgcaaaacttttccaagtgcccaagttgtttgcttccgttttcctttaaagcgctgggggactgacatatggcttaaaagaatctcacaaacgtgattcagctttgagaaagagccccttgaaacattcctgggaaggggagtcggtgcataaactaaccgcattctaaactcatgctctgcagagagcactttagtaaatgtcccgacactgcttactttctctggagctcccagacggcattctgcgcaccctaactccggggtcggaaagcgatgtggggggacttgtttcctgtttctttctttattttttgattaataattacctacctcttctaagaagatttatacgaataattcttcccactgacctagagctctccatttctgactcattcttctaatttctgtaatatctttacatattggtagattttgtttatttcctgtctgtttcaatgccagagtttgacctctttacattccttaactttcaagtctcagtgagctgtgtaatggccacagcctgtgtgaggaaccgggtctcgctaaataaagaaaattctctgttaacggttgcagagaaaaccaaccactaccttcccccaaaaacaaacccgggtgtgctggatcgaattttctcgataattcaaatatgatacatatttgaaattacactttcagctattacactttccaataattcaaatcttgacaattttaccacacaaaataaaccgttttaaaacacactttaagaattcctggatgatcagtaaaactctactgaatcttcctaaatgtgagtctgaaattaacatttcttaactagagaagggcaggtgaactagttaacagaaaattacacttttacatacacatttagtttttagaaataagacacggagtcaaaaaatacaacatttaaaggaactctgaagagaatctttgctaaagggaagagctgttcataagtcaaaactttttttttttttttaacaatacgatttgctgaacgtggggtgtgggggaaaatgccccgtggcccctaatggcaaagaccgttttagcctgtctaaagggcaagtccaggccaggaaaacaatc

SEQ ID NO: 1563925 - DNA, 4001 bp, Homo sapiens
ctcagcggtgggagagatgagaaaaaaatctgcctgtaaatggactcacaaggttcaaacccatgttgttcaggggtcaactgtaatactgcctgaagacctgctcaacatcaggccactttacatataagtagttcatcccattgagatgcaaaagtatcccatcaggtagacagtactggtctcactcaacaaatgagaaacaggctcagagaggttaagcgacttgcccaaggtcacacagcctgcacacagcctgcgcagaacttgtgtttttcccttgtactctgtcaggcttccgatctgcaggttgacggactgggaagcaaggtatggagggacattaagctagaagggttaccaggggcaaaactgggcagagggatcacaggccaggctaaggagccctttacggttcaggctctgaaggtttaagagcagggagatgccctgaccagggccgttcactacgaagattaacctggtagagcagggaggactagctaggtgagagctgggaaacaggggagctactcatcagttgtctaatatgtgcccctctctgttctaggtcctggagtaccagtagtgaatacaacaaagatgcctgccctcagacagcctgccttctagtggagggacaacaaagagcaaaacaaacaagcaaaatatacagtaggtcagaaggggataagaactgttggaaaaaaaagtagagcaaggtgagtggcttgtttgtactgggggctgcaatacttaaatagggtgcctaagaggaggcaggcggagaggacaactgagacaaagatgagaggcaggagtgtggctggcacatgaggttcaaccacaaagccagtgttctggggctggagtgagccagacgagagaagagttgtggagcgatggaaggggacacgtcgtgccaagctttggagatcacagtgagaactctggctcgtactacttggggggatgatgatgacccaaaagtcaggaatctgttcactgctgaagagagaagagggcaaagggcagcagctccatttaaaaggttctaataagcctcgggcctttctctgtctgagaaacttactctctgccctctgtctccctagattactgcccctatgcctggaggaaaaacaggtgaaggctaaaagccacggggatagctaaagagggcaaactggacctccagctccacttctgcaggtctatgtcagtccacagcccttgcacacgctcccttttaattctccaagcatacctctcacttccaaaactcctgtgactctgctgatgagggcgtctcggcctggaatgctcctccttatctgcattgtgtgggtgtcaaaaagagtatattttgatgacctctccccgcccctcatgctcgctcacatccccctcactcctttcaaagtccgttcccaaaggccccagttcaccgtcctgggctgcttttagccaggtaagatctaaagtgatcctctcttggaacctggtctggggcctatacatctgggtcagtctaggggtgctctcgaagggccaccctcaaagagcgagcctcggctggattcagttcctaggtcccagccgtccgacctctgcgacaacactcagcacaccccttcccctctccgggtctcagttgccccgtgagtacagtccctgctccaacacgcaaggtaatcgtttctggctgctctgatgcactcggtccctaaactcagccttaggtcaacccagaaagcacccgacccgggcgaccccgtagctccccaccctcccgcactgcccagtcgctgacacagggtgacctccaatggcaaggccacgactcttacccgtccgtaggcgcccccctgtctggcctcagctcgcaagcaggctgcacccactgaactccaggcccggaccgccaccctttactcccctcccgcgtgagccgagaatcagccgagcttcctccaccaagaggattggcccagctcggcgacgactcagccaattggcgctcacggcgtgatcttgcccaataaagacggggctctgtcgccagcgtgcccctccccgcgctgggccggggctttgccaggttagtcccaccctcttcggccctgcaccaatagggagaggcggcgacgagcggacggccaatggggagcggggctgcgcgcgcggggcggtgggaacggcgccgagtcagtgtacacgtcggttgcctaacaaccggcagcggactcctttggctatggtgagtgctgccgctctgtcgcgccccacgcccagcggctgagcccttcccaggccccagctcggccacgccgcctctcctgcgcctttctcggctttagcgcaccagtctttcctttgagctctttcccgggagagtagggtacagacgctaaccaacctactgggcctgcgcttcgctgctgcctcctcttcacccacaacaggcccacacccgcccctcgggctccccttgcattccctgatcccctcggtgaacctccctgggcaaaaaagactcgaatccctcacaggcccctgactctctcagaccttggccccctggcctcctcattctgccaaaatttccacacacagctgggaaaaggtgtatcgtgttctgttacaatgttttttacaatttaaatacaggggcattcaggggatgctttagcttcttggagaaggcacgaaggtgccagatggattgagttttattactcggtactgacacaatatacatcttaacaacttactaatatttggccaaatctagaagtaattgggaagtcggagtacttactgggaaggggagtactgggagtgggcatcgtaagactgttttcagaaccaggatccccacgttcgggaagagctgattatctctagttattcacagtcatcttcttgactggctctcttttgggatgattttcagtaagaggtgtccttactgaacaagtgatctccctgcttctagaaacaacagtaaagaaaagggaggggtagaagttcatggaaagattcattgttcttgccagtaaaccctgttatctttctttttaagcaaagctttggaattggttatataaatgactttaaaaatacatatgggtgtctgtaactatgttatgtaaatatggactgtatgatatattattgtgcttgtgtattgcataacatataaaggcctccaactttaagaaggcaaacatggcatcaagttctcagcgaaaaagaatgagccctaagcctgagcttactgaagagcaaaagcaggagatccgggaagcttttgatcttttcgatgcggatggaactggcaccatagatgttaaagaactgaaggcaagctctgtgcattcctgccgtactgcccttcctttcctctgcctcttccttgtcatctccctatcacctctctaccccttttgccctcttctccctgcagtaagtaacaggggaggttgtactgtgctgttttcctgtctttacttactttgagtattattcaataaaattgattgcaaatatcaattagatcaatgtcatagtgttccccaatcatattaacatgaccacatcagatgctggcttaatgctctcaacactgttatttttgctcctgctactttagatgtgcttattgagacgatcctgttttctttataggtggcaatgagggccctgggctttgaacccaagaaagaagaaattaagaaaatgataagtgaaattgataaggaagggacaggaaaaatgaactttggtgactttttaactgtgatgacccagaaaatggtaagtagctaagacaattatcatggtatggagccccagtcatctgcagaggtccatggcgtcttcctgttaaaacagtcatgtgaccacagagcagtccaggtagcaactgcatcaggaggcctgccctcccatcatgttactttgggctcccaaaacaagcccttgtgcttctttctcaa

SEQ ID NO: 1563926 - DNA, 4001 bp, Homo sapiens
tgggaaatagcgatttaaagtcagcagtgaaaaattacttgtgaaaattttttgaaaaccaaatgacctacatagaaatagaaaaagaaatttctgaaaggggcaaatgagataccacttcagaggctagagcgactgtcgagtgcagaaagagcacaagatgtaggatttcctaatgtttttacgaattcaaaactgattttttaaaccaactcccaccacagaaggcctccctgacaacaagggcgaacgctgtgaaggagaaaacaactcaagggaaaaaaatactaaaagatgccacacaaccaagctggtcagactttaaaggcctccactaccaaacaaaccacaaggctggtatcaaaaatgtgcacgcacccacgaatatgtgtgaaatataaaagaaccaaaaacatcacagggcgcacaggcagacacacacactccccgcccacccctcgccccccaccccccccccccccgcccaaaagcagggtgaacagttacagcacctaaaaccccaagcggcataggcttctccgaaacattttacagggtaaccaagaagcgattttgaaagcaactgaaaaacgtgccaactgaaaacagggcctggcaacagtttgcaagcgtgattcagagggtctgccaaggaaacaaaagcctccctcctgcccatgagaccgcacatggtacgagaggtgctccaggcgggatgcattttaagcaaggcagacaaacagaagtctgtgcgggcgcaagcggtacatactagggatcgctatctggcgaggatggggccatggagtttccattggttggggaaccgcccagctttagtttctccagatattcggcgtgcacgggcttgtggcactggagaaccttgatggcatcttcgactttgaaccactctcgcttcctcccaatgctaaccgaatcttcccaatcctccagcagctccgtgacagtcagtacatacacgtacgttctgtgcttggggtcctggttctgttcgaagacgcccaggagccggcctaacttccccttgactcccgcctcttcgtacacctctcggaccgccgcaccgcccggctcctcctcgggctccatgcccccgcccggcacgatccagcggtccgggtaccggctgctactcactaacaggacctcgtcctcgcgctcgctccggaagcacaggcacgccgcccgcttcttgaacccctcggggtcgtaggtccgtgtctggttgggtttgcacttcatcctcgaggcagcctcctctcgcctctcgctgctgtgtgggccgccgacgcagctgctgccgctgccgggcagcagccgaggtgctgggaagagaaagggccgaggagaggggcggggagagagaggcgcctccgtctgccgtctgcccccgagcccggggagcggagggagagatgaagctgggcggggcacgggcggaggcgggggcaagcgaggcgtgtcagtcagccagtccgccagtccgatgggcggccggccgaacccgggcccgccggagtggaggaggcgctgctgcccgcgagcccgcgactctccacagagcccacccgcttctgcgaggtgaagcgcattctcgggcgcgtccgcgctcccgttcacgtgcgcgttcgcaggggagggcgtgggctgaggggcgaggaaccggggcgaggggccaggggcgggggtctcctggctcccgcagcgcgcaacgcctggggcccactgcgcaggcgcttcgcactcctggggccaggaacctccttggcgcacagcgaaattcaccgcattgtgactttggccaagactgcctccatgtgtgcctttgacccaaactcactgtggcacggcaggacgtttctcctctcactccccactgcgctgcaggaaacccacaggcagttgtttcacacaagacaggggcaaaggcagcgtcgtcatcatcctcccccactatcaaccattctggcttactcatgggacctgggccctagtgttgtctgcacaacccacgggattcttggcacagtagccgggcatctttgctgagtcacatgatgcagttttatttcttcaacaggttcccaccttgcagagcatcttggcgcagccagtaatttaacgcttttcttaaacccctgttcacaacctgcctgacctccctgcacctcagtttcctcatgggtacactcctcgcctccgtgttgcagccatttgcacttcgatgcagtacaccttaaagaccagagcaccacccatctagtagtcctgcgttaaagcccagagacgttctcctattctccacacactccacccttctctatctttctctttgataagcaccacttggtgtttgggaaaccatgcacatggagatcccgtcctatttcacaattttattttattttattttttgagatggagtctcactctgtcgctctgtcgcccaggctggagtgccgtggcacgatcttagctcactgcaaccttcgcctcctgggttcaagcgatcctcctgcctcagcctcctgagtagctgggattacaggcgggtgccatcacgcctggctaatttttgtagctttagaagagacgggtttcaccatgttggtcaggctgctcttgaactcctaacctcgcgatccgcccacctcggcctcccaaagtgtactattaaccaccacaaaacaaataaaatactaaggggtcctaaaaatgtggttaggacttagtagtacaaaatggttgaacttctactcagagctttgaaacatgatttgaatgaatcacgagacactctagcaaaactagcagactagtggggtgtctgggttcgagaggggccaatccaggctccggccacagggcagggctgcttcacaattgccaggtactgtctcctttgtctcacaagaaagaggtgccattttctagtctattccatcagtatcagttctacatcacaccgtgcctctgcaataggtcccttccgggggcatacttgtggcagggaagaggaataggacattataacatggaaagaggcacagactgaaaccctactggaaaagtctggatatggagacccacaacttaaaacaggcttaatacaatagcaagggaattttttaattaccttttccccaaactttcacagctgacatagtttggatacttgtccttgcccaaatctcatgttaaattgtaatccccaatggtggaagtggggcctggtgggagatgtttggatcatgagggcggatccctcatggcttggtgctgtctgtgtgatagtgagtgctcacaagatctggtgacttaaaagcaagtggcaccttcccctgtcttgctcatgctttcgctatgtgatgcatctactccccctctgccttctgccaccattgtaagcttcctgaggcgaccccagaagctgagcaactgttggcaccatgcttcctgtaaaacctgcagaaccatgagccaattaaacctcttttctttgtaaattacccagtctcaggtatttctttatagcaatgtgagaatggcctaataactttattattcatctataatatagtaacaaggcaagaaaagctaagacttttgtaacgatagtaaaaatcctttttaagagaacagcattcctctgtctggttttgcatatttaagtatttctccaatgatgagcagtgtaattcaggaatcactgtagtagtagattgttacagtgaaactgcaatttgttcgtggaagcctgtatctccttccacactgtcattgtttctggtcttggccatgtaatttgttgtgtccagtgggacaataacaaatgtgaacagaagtcagcagagaactgaaaggtgcttgcacactggggtatcctctctcttttcgctcttgaaacattgtgacagcaatgtgaggaaggctggccaggctagctggatgatgagatacctgtggcagattcttcc

SEQ ID NO: 1563927 - DNA, 4001 bp, Homo sapiens
caagggggcagcaaaaaaaaaaaacagcagagacggtttcaaaaggaacttttctatggtattaaaagacaggagagcaaaataatgagtaggaggtttttggattacaggcaacgttaagttcttgatgtagatgctggtcacctgcacctagaatagggtgtcctgtgagacaaaacaattattctctatcgttaagagagattgttcaggaatcctaatagtttgacaattctgtaccagctgaacatcactagagctaactcagttgggatgtaatcaccataaaagattccattcctgtggttactgggagtcagggaggtttaagcggaatgtcactacattcaaatatgggagggagaccactttcaaaaacgaacttaaatccagagaaccatggttcttctatggtatccagtaaggggcaatgggagttggaagttgagtatgggaaatcaaattctgtgaatacggtttttctgataagatgtgtttggctagcagatcctccgcagcatctattcaataaggttaatctacatgggaaatagccatttgaagtcagcagtgaaaaattaccacttgtgaaaattttttgaaaaccaaatgatctacatatagaaacagaaaaagaaatttctgaaaggggcaaatgagatcccatttcagaagctaaagtgactgtagagtgcagaaagagcacaacatgtaggatttcccaatttttaaaaaaattcaaaactgatcttttaaaccaactcccaccacagaaggcctccctgacaacaagggcgaacgctgtgaaggagaaaactaaaggggaaaaagaatactaaaagatgccacacaaccaagctggtcagactttaaaggcctccactaccaaacaaaccacaaggctggtatcaaaaatgcgcacgcacgctcacccacgaatatgtgtgaaatataaaagaaccaaaaacatcacagggcgcacaggcagacacacactccacacacaatccccacccacccctcgccccccacacacacctcccaaaagcagggtgaacagttaaggcacctaaaaccccaagccgcataggcttccccgaaacattttacagtgtaaccaagaagcgattttgaaagcatctgaaaaacgtgcaaactgtcttgaaaacagggcctggcaactgagacagtttgcaagcgtgattcagagggtctgccaaggaaacaaaagaagcctccctcctccccgtgagaccgcacatggcacgagaggtgctccaggcgggacgcattttaagcgaggcagacaaatagaagtctgcgcgagcgcaagcggtacatactagggatcgctatctggcgaggatggggccatggagtttccattggttggggaaccgcccagctttagtttctccagatattcggcgtgcacgggcttgtggcactggagaaccttgatggcatcttcgactttgaaccactctcgcttcctcccaatgctaaccgaatcttcccaatcctccagcagctccgtgacagtcagtacatacacgtacgttctgtgcttgcgatcctggttctgttcgaagacgcccaggagccggcctaacttccccttgactcccgcttcttcgtacacctctcggaccgccgcaccgcccggctcctcctcgggctccatgcccccgcccggcacgatccagcggtccgggtaccggctgctactcactaacaggacctcgtcctcgcgttcgctccggaagcacaggcacgccgcccgcttcttgaacccctcggggtcgtaggtccgcgtctggttgggtttgcacttcatcctcgaggcagcctcctcgaggcagcctcctctcgcctctcgctgctgtgtgggccgccgctgccgctgccgccgccggggaacagccgaggtgctgggaagagaaagggccgaggcgaggggcggggaaagagaggcgcctccgtctgcccgcgagcccggggagcggagggagagatgaagctgggcggggcgcaggcggaggcgggggcagcgaggcgcgtcagccagtcggccagtccgatgggcggccggccgaacccgggcccgccggagtggaggaggtgccgccgcccgcgagcccgcgactgtccacagaccccactcgcttgtcgggggcgcgtctccctccctccgccgccgggtagggtttgagcgaggtgaggcgcattaacggacgcgtccgcgctcccgttcacgtgcgcgttcgcggcggagggcgaggggcgggggcgggggtctcctggctcccgcagcgcgcgacgcctcgggcccactgcgcaggcgccccgcacccctgggggccgagaacgtcgttcgcgcactgtgaaatacaccgcattgtgactttggccgactgcctccacgtgtgcctttgacccaaacgcgactgtagcgcggcaggacgtttctcctctccctccccaccgcgctgcacgaaacccacacgcagccgttttacacacgacagaggcaagggcatcgtcgtcatcatcctcccccacgatgaaccattctggcttactcatgggacctgggccccggtgttgtcaaaacgacccacgggattcttggcagaatagccgcgcatccttgctgagtcacatgatgcagttttatttcttcaacaggttcccaccttgccgagcatcctggcgcagctagtaatttaacgcttttcttaaacccctgttcacaacctgcctgacccctttgtgtctcagtttcctcatgggtacacttctcgcctccttgttgcagccatttgcacttcgatgcagtacaccttaaagaccagagcaccacccatctagtattcctgcgttaaagcccaagacattctctcattctccacacactccacccttgtctttctctttgataagcaccacttgggggttgggaaaccattcacgtggagatcccctcctattccacactttgatttttatttatttttatttattttattttttatttttttatggcaagaaacatttattattattattatactttaagttttagggtacatgtgcacaatgtgcaggttagttacatatgtatacatgtgccatgctggtgcgctgcacccactaactcgtcatctagcattaggtatatctcccaatgctatccctcattaaagactcaaacgttagacctaaaaccataaaaaccctagaagaaaacctaggcattaccattcaggacataggcatgggcaaggacttcatgtctaaaacaccaaaagcaatggcaacaaaagccaaaattgacaaatggaatctaattcaactaaagagcttctgcacagcaaaagaaactaccatcagagtgaacaggcaacctacaaaatgggagaaaatttttgcaacctactcatctgacaaagggctaatatccagaatctacaatgaactcaaacaaacttacaagaaaaaaacaaacaaccccatcaaaaagtgggcgaaggacatgaacagacacttctcaaaagaagacatttatgcagccaaaaaacacatgaaaacgtgctcaccatcactggccatcagagaaatgcaaatcaaaaccacaatgaggtaccatctcacaccagttagaatggcaatcattaaaaagtcaggaaacaacaggtgctggagaggatgtggagaaataggaacacttttacactgttggtgggactggaaactagttcaaccattgtggaagtcagtgtggcgattcctcagggatctagaactagaaataccatttgacccagccatcccattactgggtatatacccaaagggctataaatcatgctgctataaagacacatgcacacgtatgtttattgcggcactattcacaatagcaaagacttggaaccaacccaaatgtccaacaatgatagactggattaagaaaatgtggcccatatacaccatggaat

SEQ ID NO: 1563928 - DNA, 4001 bp, Homo sapiens
ctggggaaaacagttcttagtattggacgccaccttgccagggacagatgaaaccttgaagagttgattatatccctaaagataaataacatttgttccccaagaagaaaactaatattcactgaacacctgtgcacttgacactgtaccaagtatttcatatatgctatattgtatatcttcctgggtcccactagaccacagaaccaatttctggagggagccagggcaatctgcattttaaataaattatttatttaaataaattttaaataaattatttatttaaataaattttaaataaattatttaaataaattttaaataaattatttaaataaattttaaataaattatttaaataaattttaaataaattatttaaataaattttaaataaattatttatttaaataaattttaaataaattatttaaataaattttaaataaattatttaaataaattttaaataaattatttatttaaataaattttaaataaattatttatttaaataaattttaaataaagtgcacacacaagtttgaaaactaaaggtctagggacaaatcattagggtgttgtggtgtacattttttaaaatgtaatggaaattatcagagtatattgcaagtagtaagtgttaagtgttgtttctgtaaaaacagttgtcggttatatattgtctacatgtgtactaggtcacaatataaaatttatttcttactgtcggtcacagtcaaaaggtctgaaaaacaccggctgagcattacagacttagaataatgcacagtgaggcagaataaaaacaaaaaagcaagaagaaggagatggcataatatctataatttaagctccacaagtatctagtgaattagcaaaatgcaagacagctaaactctgatcattcacagtaataagcggaattaaggtattggtaatttggccaaaaggccaataacgttactttagccaataaccttattctacccccattttttgtttactgtagataagaacaagtagaagggacaaattaatcaaacttcactatctcttatgccagatgggatggtcgttaagaaatgcatggtatatagaaagaagggaagcagtttagttcattcataatcaaattccaatacctgaataaccaaaagtaaccattcattaaaaccttctgtggggtcctactattgatcatggctaatcagtcctgaatactccaaatatttattacgccatccccccgccgcccctttgtttaaaaccaagccacggaatttatgggaaactagggtaacaactctatctctaagtgaacttaagacaaccagattccctagcagtggcaagcgagcggcgcgcctgcttttctccactccgaggcgggaaaagcagagctcccggagtcgcgatgttccttagagtgggaacgacacgtagctcaagccagtgccccacaggaaccgggtggcagttgaccaggtgctcccccggggacttggggcccggaagccttgcctacagaggagaataaaaagcgcgatcccacctgcacacatacaaacacactatcgcccgcgacaagccaagacagaagcacaacacgtgtttctgtcgcgtgggggagacgtgaaaggctgggggcgtggaggactgtagcaaaaccttctctacccccggcccactgaccctacccttctgcccccgtctctccagatcggctggagttcgagtcctcagatcgggaattcacgcgcgggaaaagcgcaaaagagagcgaagcctgctgacgaacgggacaaacgaaaaccccacaaacttaccttactggcaagtcgccgccgctcgctgtccggccctgaactatacgggcaggcctccgagactgctagacgccagaggggcgggtccggacctgctcgagccggaaagaatcggcctccttagtgggcaggttcccgctgaagtgaagctaaccgagactgaggcttaaaaggggtcgacctggttaactagaaagggcgaccagtgaccctgacctggacgcgctcggattggtcgattccagtgcagtctcagatgagactcttctatgattggccagaaaagtcaagcgggaacccggaggttggcaggtggggggcgggaacaaaacaaagttgttaccctagcaacggagagacgccacgctctgcacagtctattttcggagcctagccagagacgggaaaactgaccaaggtgaggaaactcgaacctcaagacggggaaagacagggtcctcagatgctgtggctatcagaaaaactagggagaactctagatatttataactctgcgagataccccaaaaagccacaagttgggcaaggtggagaagacccgttccctaaatcccgctatcctagactcttcactaaatcccgctatcctagactctagaaacaggacgctgctttaacaaaactcggttttacaggatgtgagtgaaagatggatgctgatcgactgtcagaaggcaaaagtaaacatctgaaagtttcccaactggtcttctctcaactctcacatgcacttattggttctcccttcccattaataatgactaatttgggaatgtaaaccatattttcttataggaggacctgggtgctccaaactggagcagccactgtacccttctgttttatatgtgcaggcacgatttatcctggcctagcatgccttggttaggaaatgttttgggggatatcacacttcagactgaaaaaaaaatggccccagtacttactacgtgaataatgtcctttgtgcgacaacttgaacgctgtggtctgagggttccagtgttgcttggttagataagctgaggagtgagaagtaatcagaccttcacttggtgggcccgagtgtactgtgcagagactacttgtacctacaagacctgctactcgccaagggctgattgggagagtaagtattacatgtcgtttgactgtaactatcaaaaggtggggaagtgtgaccaaaaaaattaaatctgagtgaagggagagaacctagtttgaccaaagagggaggagtcattactccttaagagcttcttgtgataaggattcagaacagagaccatatttcctgaagaaaggaaaaaaataggactagggagaaaatttaaagcacagcaagaaaatttgccaggccgagcgcggtggctcccgcctgtaatcccagcactttgggaggccgaggcgggcagatcacttgaggtcaggagttcgagaccagcctgggcaatatggcgaaacctggtctccactaaaaatacaaaaattagccgggtgtgttggcgcctgcctgtctggatgctgaggtgggagaatcacctgagccctggagatcgaggctgcagcgagccgtgatggcgccactgcactctagcctgggcgacagagtgagatgtggtctcaaaaacaaaagagttctcatactccacctgtatctaaaaagagtccctccaacttctttttagatagaggtggagtatgagacttgagatagataaacgaagagaaaaaaatattaagtgtattgtttgtctgaaatgtactatagagcattcgataattcaggatgggttctacagataccaaggatttgcctctccatattaaaactaatttttctgtcaactcagcactttgagagtcctaagcgagggatcacttgagctcaggagttcgagacccatctgggctacacggtgaagccccgtctctacaagtaataacaaaaattagccggcgaaaccccgtctctacaaataacacaaaaattagccaggtgcagtggcacagcctgtagtcccagctacttgggaggctgaggtgggaagattacttgagccagggaggtcgaggctgcagtgagccgagatcgcgccactgcactccagcctgggctacagcaagaccctgtctcaaaaacaaaaa

SEQ ID NO: 1563929 - DNA, 4001 bp, Homo sapiens
agaacaggaggaccctgaatggcctcaccacaagttatcttccctattgggttcccagggagaaaggccccctggccaaagtaccctccttattatcatgttgaacagacacagtgcctgcttatctctgggtagcatgtttcaggtccccaccagcctgcagaattattcaaacaagccaatcgtcctaccctgaaccaacggtcacttcatcctctggttactacaaagacttccccctgaaagcccctgcttgttcactctcttccagagtgtgacactgtgtggctctacctggcgtgaggtgccctcctctctccagttgtgagtaaatgttactgataaattgctgtggattccgtctgtccagtatagggtaccatgtgttcagccgcccccataacactagggtgggaatccctccctcgccactgggaaagggaggagaataaaacaggtgtgcttgctacaaatgcacaacttcaatctaatcataagaaaacatgagacaaacacaaattgagagacattccacaaaatacctgactggtatctccaaaagtgtcagggctgtggaagaccaataaagattgaggaaatgtcagcctggaggagactaaggagaaatgaagaccaaatgcaatgaagcgtcctggataagatcctagaatagaaaaaggacatcagtgagatatctggtgaaattcacataaaatctgtagattagttaatagtactacatcaatgctaactgttggtaattaacatcgatgtagtaatgtcaattagtgcatcaatgtaatgtagtagttagttttggtaatttttctatggttatataagatgttaacattaaggaaatccaggcgagggctctctgtataatcatttttgtaacttttctgtaagtctaaaattatttcagagtaaagaattttaaaagacaaaatcagtggctaaagggctggcaacctataaaccacactgcttaacaataaccaattgaaacatagttagaaggatgcatacaaagagggatacatgctcataccacatgattcattaaaaagattataagagatgaaagcccagtcatcttcaacacacaggtgaatatgtatttactcttcagatgaggaaagcatttttaagcataaaaggaatgaaatacaatagaaagaaaaatatctatacaatccaatatttacaatttaaagcccgccatatcaaaattaaccataaacaaaactaagatgcaaaagagaaatataactttctgaagaagaagagaaaacctgcctgagaaattgcaaagagagaacatgaagtgattagccatacaattgaacctaatcacacgtgaagataagggatacatagagagtggactggagagtggaccactgagcaatccagccggatttgcctttcctatgaatccctaaaccttgaccctaggtaatgtaggccaaaaaaggcctagtttatataaaatttatagaagggccgggcacggacgctcacgcctgtaatcccagcactttggaaggccgaggcggtggatcccctgaggtcgggagttggagaccagcctaaccaatatggagaaaccccctctctactaaaaatacaaaaattagcctggcatgatggcgcatgcctgtaatcccaggtacttgggagtgaggcaggagaatcgcttgaacccgggaggtgggggttgtggtgagccgagatcgcgacattacgccccagcctgggcaacaagagccaaactccgtctcaaaaaaaaaaaaaaaaaaaaaaaaaaggcaaaaaagaaaagaaaggaaatttatggaaaagatattgttgtaatttacctaattggaagaagacttggaaccaacctgggagctacacttcccctcagaatcttgccacaaacaagacgcaatcttgtgggtggggcccagcgtcttaacggttccttctcaaagcagtggggagaggacttcaattggctcagcttggtcaggtgacctcctttgaccaatcatctccatactgggaggcggagccagattcctgcccctccccctcctggggctcgggggacggggggcagggaaggagaaggggtttcgagaaaccaagggtgggagagcgggaggggcaggaaggattgtgggacaggcgggtgggagtgtgtgaggtggaaagggaggggtgttctgattataagcctgccccacccgctgatttcgtcttaggtgaaaagtgaggcacaatgccattgtgtatggcctgggcactggccagccagggtttctttgctttctttctttctttttttttcttttcttttcttttcttttttttttttttttttttttttttttgagacggcgtctcgctctgttgcccaggctggagtgcactggcgggatcccatctcatgcaacctctgcctcccgggttcaagcaattctcctacctcagcctcccgagtagctggcattacaggcacctgccaccacgcccggctggtttttctattttcagtggagacggggttttaccatgttagccaggatggtgtccctctcttgacctcgtaatccgcccgactcggcctcacaaagtgctgggattacaggcgtgagccaccgcgcctggccccagcgagggtttctaccaggccacgtctcaacacagacagttaaaagctcaaatttagtggacgtgtagcaggggatgcttacttaaaaaacgcatggccacttgatggcaaaaggctgtcagatattagtgtctctggttctctgatatattaaagaaggaactgagtcctgaccaaagataggaaaaatgtgttgtcctctgcagtgaagccaacagagcatttacactgatgcctggcaaaggcggcacaaaggagaagacttccacccatctaataatactatcaattgcaaagcagccaatatttgtttgaatgtccaaccctcagcccacactcctgattccacttcttccctatttgatttttcccccccgcagtcatcttctggaatgcaatatattttaatcatatgctgtttttgttttttattgtctgtctcccatggtggaaaaataaaaattccagaagggcaaatatctttgtctattgctcattaatgtaccctaagtgcctataacaatgcctgcttcagtggatactttgaatgaataaatggatttttctccagccacactagcctcctttttgttgctctaacactagctcagcaagcatactcccataccgttgagtgtttttctgtaacagcctggctttagatatccctatagctaccttccttacttagtgtacatctctgatcaccttatcagacatgtggtacttttcttcatgacagttagcatgtcactgtgttgtttttgttttcttttgttgttttcttttactctaattacaggtaaagaagcagatcagctatgtctgttttaatttttgcagtacagtgtcatctttcagtagatggggtaatgggcatcaggtatcttaggattgaatccgtggcattaccactttgtagctaaataaccttggccaggtaaactcttccaagcttttattatccatctttaaactgggaatagtaaaaaatttaacctcataaggctgtgatgacatttcattaagatagtccatattcagtcatgcaccacataatgactttttgttcaatgatagaccacatatatgatggtggtcccatcatatcataaggtgataagtgcagattcctgttctgataccatcctagcaaactagattgctggttcaccttgcctcttcacagatggctgggggtgggagctgaacttctaccctagcccccctgagaacatttccaataaaaaagggggcaccaattcaccacactttgttacctcagaggtggggtcggggagtataggcacagttctttgctaggctttagggaaagggg

SEQ ID NO: 1563930 - DNA, 4001 bp, Homo sapiens
tagaacaggaggaccctgaatggcctcaccacaagttatcttccctattgggttcccagggagaaaggccccctggccaaagtaccctccttattatcatgttgaacagacacagtgcctgcttatctctgggtagcatgtttcaggtccccaccagcctgcagaattattcaaacaagccaatcgtcctaccctgaaccaacggtcacttcatcctctggttactacaaagacttccccctgaaagcccctgcttgttcactctcttccagagtgtgacactgtgtggctctacctggcgtgaggtgccctcctctctccagttgtgagtaaatgttactgataaattgctgtggattccgtctgtccagtatagggtaccatgtgttcagccgcccccataacactagggtgggaatccctccctcgccactgggaaagggaggagaataaaacaggtgtgcttgctacaaatgcacaacttcaatctaatcataagaaaacatgagacaaacacaaattgagagacattccacaaaattacctgactggtatctccaaaagtgtcagggctgtggaagaccaataaagattgaggaaatgtcagcctggaggagactaaggagaaatgaagaccaaatgcaatgaagcgtcctggataagatcctagaatagaaaaaggacatcagtgagatatctggtgaaattcacataaaatctgtagattagttaatagtactacatcaatgctaactgttggtaattaacatcgatgtagtaatgtcaattagtgcatcaatgtaatgtagtagttagttttggtaatttttctatggttatataagatgttaacattaaggaaatccaggcgagggctctctgtataatcatttttgtaacttttctgtaagtctaaaattatttcagagtaaagaattttaaaagacaaaatcagtggctaaagggctggcaacctataaaccacactgcttaacaataaccaattgaaacatagttagaaggatgcatacaaagagggatacatgctcataccacatgattcattaaaaagattataagagatgaaagcccagtcatcttcaacacacaggtgaatatgtatttactcttcagatgaggaaagcatttttaagcataaaaggaatgaaatacaatagaaagaaaaatatctatacaatccaatatttacaatttaaagcccgccatatcaaaattaaccataaacaaaactaagatgcaaaagagaaatataactttctgaagaagaagagaaaacctgcctgagaaattgcaaagagagaacatgaagtgattagccatacaattgaacctaatcacacgtgaagataagggatacatagagagtggactggagagtggaccactgagcaatccagccggatttgcctttcctatgaatccctaaaccttgaccctaggtaatgtaggccaaaaaaggcctagtttatataaaatttatagaagggccgggcacggacgctcacgcctgtaatcccagcactttggaaggccgaggcggtggatcccctgaggtcgggagttggagaccagcctaaccaatatggagaaaccccctctctactaaaaatacaaaaattagcctggcatgatggcgcatgcctgtaatcccaggtacttgggagtgaggcaggagaatcgcttgaacccgggaggtgggggttgtggtgagccgagatcgcgacattacgccccagcctgggcaacaagagccaaactccgtctcaaaaaaaaaaaaaaaaaaaaaaaggcaaaaaagaaaagaaaggaaatttatggaaaagatattgttgtaatttacctaattggaagaagacttggaaccaacctgggagctacacttcccctcagaatcttgccacaaacaagacgcaatcttgtgggtggggcccagcgtcttaacggttccttctcaaagcagtggggagaggacttcaattggctcagcttggtcaggtgacctcctttgaccaatcatctccatactgggaggcggagccagattcctgcccctccccctcctggggctcgggggacggggggcagggaaggagaaggggtttcgagaaaccaagggtgggagagcgggaggggcaggaaggattgtgggacaggcgggtgggagtgtgtgaggtggaaagggaggggtgttctgattataagcctgccccacccgctgatttcgtcttaggtgaaaagtgaggcacaatgccattgtgtatggcctgggcactggccagccagggtttctttgctttctttctttctttttttttcttttcttttcttttctttttttttttttttttttttttttttttgagacggcgtctcgctctgttgcccaggctggagtgcactggcgggatcccatctcatgcaacctctgcctcccgggttcaagcaattctcctacctcagcctcccgagtagctggcattacaggcacctgccaccacgcccggctggtttttctattttcagtggagacggggttttaccatgttagccaggatggtctccctctcttgacctcgtaatccgcccgactcggcctcacaaagtgctgggattacaggcgtgagccaccgcgcctggccccagcgagggtttctaccaggccacgtctcaacacagacagttaaaagctcaaatttagtggacgtgtagcaggggatgcttacttaaaaaacgcatggccacttgatggcaaaaggctgtcagatattagtgtctctggttctctgatatattaaagaaggaactgagtcctgaccaaagataggaaaaatgtgttgtcctctgcagtgaagccaacagagcatttacactgatgcctggcaaaggcggcacaaaggagaagacttccacccatctaataatactatcaattgcaaagcagccaatatttgtttgaatgtccaaccctcagcccacactcctgattccacttcttccctatttgatttttcccccccgcagtcatcttctggaatgcaatatattttaatcatatgctgtttttgttttttattgtctgtctcccatggtggaaaaataaaaattccagaagggcaaatatctttgtctattgctcattaatgtaccctaagtgcctataacaatgcctgcttcagtggatactttgaatgaataaatggatttttctccagccacactagcctcctttttgttgctctaacactagctcagcaagcatactcccataccgttgagtgtttttctgtaacagcctggctttagatatccctatagctaccttccttacttagtgtacatctctgatcaccttatcagacatgtggtacttttcttcatgacagttagcatgtcactgtgttgtttttgttttcttttgttgttttcttttactctaattacaggtaaagaagcagatcagctatgtctgttttaatttttgcagtacagtgtcatctttcagtagatggggtaatgggcatcaggtatcttaggattgaatccgtggcattaccactttgtagctaaataaccttggccaggtaaactcttccaagcttttattatccatctttaaactgggaatagtaaaaaatttaacctcataaggctgtgatgacatttcattaagatagtccatattcagtcatgcaccacataatgactttttgttcaatgatagaccacatatatgatggtggtcccatcatatcataaggtgataagtgcagattcctgttctgataccatcctagcaaactagattgctggttcaccttgcctcttcacagatggctgggggtgggagctgaacttctaccctagcccccctgagaacatttccaataaaaaagggggcaccaattcaccacactttgttacctcagaggtggggtcggggagtataggcacagttctttgctaggctttagggaaagggg

SEQ ID NO: 1563931 - DNA, 4001 bp, Homo sapiens; identical to SEQ ID NO: 1563929

SEQ ID NO: 1563932 - DNA, 4001 bp, Homo sapiens; identical to SEQ ID NO: 1563930

SEQ ID NO: 1563933 - DNA, 4001 bp, Homo sapiens
ttgaaggaaatgttttatatactctttttcccgacctaaacagggagagtcctaacagtgttgtgtttgtatgattatgaggctttatttgcctaagtgatgctactatactttttttttgacccatgcctttttaagctgtttcatattgaaagttggaatattgtaaaaattttgtcaaagatgtactgaagtgctatttgaagtacctataacaaaacacagttggtcctccgtatccacggactctgcctctgtgaattaaaccaattgcagatcaaaaataataggagagaaaaatataaaaataatacaaataaaaaatacaatataactgttatttaaatagcatttacattccattaggtattagtctagagataaagtatgcaggaggatgtgcgctggttatatgcaagtatgccactttatgtaagggacttgagtatacttggatttttggtatctgtgggtgggcagggtagggggggtcctggaaccaataccccatggataccaagggacaactgtacttatttacctttattattattgcaagcttcttaaggaaactttataggaatgaaaatacacatgttaagaagattaggccaggcgcggtggctcatgcctgtaatcccagcactttgggaggccgagacaggtggatcacgaggtcaggagatcgagaccatcctggctaacaccgtgaaaccccgtctctactaaaaatacaaaaaattagccaggcatggtggcggatgcctgtagtcccagctactcgggaggctgaggcagaagaatggcgtgaacccgggaggcagagctcgcagtgagccgagattgtgccactgcactccagcctgggcgacacagcaagactccatcacaaaaaaaaaaaaaaaaaaaaagaagaagattaaacattagatattagatggtctgttgcatgctagaactgttagtattgttggatcaattactttggttttatgaaaaaattaatgataaatatctttaaagagaactagaagaattttttgtttgattctaggctgtaacatgattatttacggacatagtttgattggctggctaacttagtagaattaattggctggctaacttagtagaattattgtttttttttgtactgcaatagggcttataattgtaagataaaaatgtgtgtgtgcttaagggaagtaagtgctggttaaaattattgaaaaaatttcagaatactttaaaaataaagtttcaagttatacaaaaaaaaagaaattctaaatttgtatgcatgtcttaacatggaccaatctatgtttagatacaaagcaaaaactgatctaagtaaatagagaaatagttaaaaccactgtgatgtgggaatttaacacacctctctgagtaacagataaaactagcagacaaaaattcagctacatatagaagatttaaatggcatgagtaataagtttgcttaaatgacatagaacactgcacagaaaaccttcacatggaacattccagaataagtcatatgctgggccataaggctagccttgataaatttctggggctggggtgggaggtaatacaatctaccttgaatggttagtgtgaagattaaagatgtattccctgccccactaccacctctagtgtacatccaaggaatgttaatttttaccaacccctgcctcaggtgaccctcctcatacctcaaaccctggccctgagaaggccacaagactcaggcctgggcccttgccactgcccacccccatctaaagggagattggctgggtgttatgtgggttagggtaaggtggggaagggggctcagtcccttttgccctgtgagacctgagactccagcctcatgctggccaactcacccgtagtgtgtcctgaaggcagtgacattttaccaatgtccttatagggctctcttgaggagaatctgtgtggcctggggacgggagtttggagaagattgaggagggctgctgacgaaggcgagagcaagcctcaagccttgcttacaggaagttccttccccaagcatagagaggagtgtcctaggagtcacagaattaacttcctgttcttaccactccccaaagtttgctgccagcctaacacccagggagatgtttctaatgtagccactcctgcaaaggtggttagcaacaatcacaatcatgaggcctaggacccagatacttattgaaacaaacacggaaaactcagcttgctggtcatctccagtgcattacattgtattcatttactctgcagactcagagactcagagactcagagtgcctatggtagctcaagctctgtacttgctacattacttttttctccatgtattcctcacaaggggactctcaactcagaatcaccagcttcctgaaggtgctgaggcttaatgaggtataggaccttgtctggaatgattcagatgtgacctggagaaacaaagtggaaatgagaaccatggaatagtgggtgacccctctatgcacagcttttctaaactcttataatatttggggtttacttaagttagggcaaagtaagacaatgttctgcaaatactcgtgtgactggaattaactacagcccatcctagagagagaatacaaaaaacagaccaggaaaatataaagtaaaagtttagtgtgtcactgtaatgaaagtagaaaagaatcaagtattgtcttaaagacaaaataaagtatagtcaatgtagatggatactcctaatgattagagccagaaatgtagctcttaaagtctcaggccagagagagggaataaactagtgagaggtgacagcttgctggcagctctcacagccctcgctcgctctcggcacctcctctgcctgggctcccactttggcggcacttgaggagcccttcagcccgccactgcactgtgggagccccttcctgggctggccgaggccagagctggctccctcagcttgcggggaggtgtagagggagaagcgctagcggtaaccggggctgcgcgtggcgcttgcgggccagctggagttctgggtgggcgtgggctcggtgggccccacactcgtagcagccggccagcgctgctgccctgggcaatgaggggcttagcacctgggccagcagctgctatgctcaatttctctccaggccttagctgccttcccgcggggcagggctcgggacctgcagcccgccatgcctgagcctcacccccacccccgcctccgtgggctcctgtgccgcccaagcctccccaacgagcgccgccccctgctgcacggcgcccatctatgaaggtggagctctcgtggcctaattacttccctaaagccctacctcttaatactgttgcactggagattaagtttcaatgtgaattttggaggaacacaaacactcaaaccatatcatttaccgttttataaaaatgttcacataatattgttttataaaaaaaataaagatttaggctgggcatggtggctcacgcctgcaatcccagcactttgggaggctgaggcgggtggatcacttgaggtcagcagtttgagaccagcctggccaacatggtgaaaccccctctttactaaaaaatactattaactgtggacatcaagtctgaaaatagccattattaaaaacctgatgaaagtctattataatagtgatgcaattgacaaaaaaatttggttatttctgaaccaacattgtgactgatagtatttataccaagacatatcagagttctaggaatgttatacaatttcggaacacacattaataatatatccatgtaaatataactcagagaagattaaccatcattccttatttagacagtgcttctcatataaatgaacatatcagataagctgatggtgtaatatctcttttacaactactttcagaagttctagggcttgtcataatatcccaaagttacttcaaggtcaa

SEQ ID NO: 1563934 - DNA, 4001 bp, Homo sapiens
tctatatcccttttttggtaccagtaccatgctgttttggttactgtagccttgtagtatagcttgaagtcaggtagtgtgatgcctccagctttgttcttttggcttaggattgtcttggcaatgagggctcttttttggttccatatgaactttaaagtagttttttccaattctgtgaagaaagtcattggtagcttgatggggatggcattgaatctataaattaccttgggcagtatggccattttcatgatattgattcttcctacccatgaacatggaatgttcttccatttgtttgtatcctcttttatttcattgagcagtggtttgtagttctccttgaagaggtccttcacgtcccttgtaagttggattcctaggtattttattctctttgaagcaattgtgaatgggagttcactcatgatttggctctctgtttgtctgttattggtgcataagaatgcttgtgatttttgcacattgattttgtatcctgagactttgctgaagttgcttatcagcttaaggagattttgggctgagatgatggggttttctagatatacaatcatgtcatctgcaaacagggacaatttgaccttctcttttcctaattgaataccctttatttccttctcctgcctgattgccctggccagaacttccaacactatgttgaattaactctctgctgtagctgcaagtgtgacagcttttcattccaaaagtggtttatttgtgccatagctctaattttcttgattcatattgccagaagattttttattaccttatcttttgaaagcattgacatctaccatttttatttaactctttcatatatcttattattttcattaaatttgttgttatttacattatttgttccttgacaataatggaaagatgagatagttttattagacatatcataaatgaacagtcttttcatctaccattaggttttaccttataatgattatctgtgaatagacataccaatattcaatacatttatttacttggaaaagacttgtggcttaccaatccttgagatttttaaccaattccatcatgtctatttaattccattactggaatatcagccactgaggtttaggggttgctgataagcacagcattacctagcctctcctgacttatatatctcatctgtaaatttaaatgacaccctctttggatttttctgtgagttaaatgcaataactttcatgatgaggttatcatagtgcttgacacacaacagggactcaaaaatggcagctatgattattaaataataacattatttttagaaaatgtagaaaatttgtataaaatgaacaaatttgcatctgttcatcctgacaggtaagttgtaacctgctttcaagggtgaggtactttatttattggtatagacaacacttcctaatgaaatgttaggctcttatttcttgaagtacttatgcacttatttcttgccatcatgatattagaaatatgcttataagttaggggtacttataaagaatgaaaattggaaagagtcaagcaagagagagattggctaatgaaataaaatgagctaaagagcaataagtaactccttactgagaagaatagattataattattatttttataatataattactagtaaacatacattccattgttctttgtaaacaaaggtataagatattaatgtggcagaagatacttagtttgaacaggatttcccacagtgttttgtgactaacactagtacctcaactactcattggaaaaatactcaatttccatataagttggggaaactacccctccttttgaaattcatgtttcatatcagcatattatctaaaaaattgctattatatggaaatccttttaccctcagttttgtgtgtcttacatttctttaatggtagagtatacttttgttgttgctgtctctcagacctagtgttttccagaacaaacctggaaatgctgaaatgagagaaaaataaaatggattatttaagctacatgtaatataaaatatctcaagtttaaccttatttcaaacaacagttaaatctaccataaatgtaaacgcaatcctttatttgaagaactttattcatttagtaccatcttcatgaatttttaaaaatgagaatatcgcctataattttgcttaaatctttttttaaaatgattcactatttttttccacatggaggaaaagtgagagttttcaagaaggagtctaaaaagcaattgttagaaaaattggagcgaggggttgtggtgcagaagaaaatagtgtctggctggactagtttaagctatttagagatcccaagcacaacaagattatggcatcctattccatatgtactttgaaaacaaacggacttccaagtaaacataagaacaaatttcgagtcttcacctgatggctactttcacatttttatcaatatatcaaattcttttttaaaagtctttctccctccctctttacaaaatcaaataagacatagaaattaatattgtattgggaatcatctatacaaactggcgtctagggagtctcaagtgtccttaataacagcatggtcagaggaagagcaaaggacatcatgctgattcatccagcattgaatcaggaaggcctttagtgtgtgttgcgggagggggtttcccacctaggctctacagccctgtggctgagatgacttagaagtccatgaatccacaatggttgaactagtttacagtcccaccaacagtgtaaaagtgttcctatttctccacatcctctcagtaaactatcgcaagaacaaaaaaccaaacaccgcatattctcactcataggtgggaattgaacaatgagatcacatggacacaggaaggggaatatcacactctggggactgtggtggggtcgggggaggggggagggatagcattgggagatatacctaatgctagatgacacgttagtgggtgcagcgcaccagcatggcacatgtatacatatgtaactaacctgcacaatgtgcacatgtaccctaaaacttagagtataataaaaaaaaaaaaaaaaaaaaagaagtccatgaatccatgctgtcttccctaacccacctcaccgccaactcccttagccgcaccttctgccccagtgctttctactcctccacttcactttctaccaacaatagctcctatgagttcaggatcaagacagatacacacacacacacacacacacacactgccaggcatacaaaagtttggccagattcagaaagccctctgtctccacttaaccccctctcaggctctctgctatttggaggccacttggccaccccttaaagttcaattctatgagtaatcatctagtactagccagaataccaaaataccacctagtgtggcagaatataggagttggtggaaaagttgggattgcagccagagtctgatcaactatcagccttagcgagagctctgatcataattctaaagatcttctgcacctgtagctcagactcttcagaaggccaaacatggctacaatacttaatcggcagggtctggtgcatgaccacagggaaggtcacatgactccaggatccgtgtaacgcgtaagtgtggggccctacctggctgctaggtgcttgcctggcaggagctacatgattgtaagaatcaagtgacctcagggttcaggagtcttcaatttttatgtgactaaaagggttgagccacatggtgatagtgtggcacgtgaccataggattcacatgtacaatagccatagtatagctctggtgctcacatgactgcaagggctttgcctgctgcgtgatggtaggagccatatggctgccgacacatggatctgcagagttcagctgctcacaatcttcacgtgagagagctgagcctgacactgtgtttgttatggggagggatgtacttgaccatag

SEQ ID NO: 1563935 - DNA, 4001 bp, Homo sapiens
gagatagggtattaacttttgcagctgcaggacagaagtagttctccaaagcacagttctatgctggtaagagacctaggcaagactcacttgaccacatactgacataattacgtaaaagatatggtgcagggataagttgcaatgaaaaagctgatgaaatctcggtctgttgaggacttaatattatccatgctacatgcatactttttgtgggtgtaagctatacttttgagccatgatcagaaattatctataaatatatgaaataaaaggggcgaatcaggaaatattccccgtaatgacccaccccttcattagcactaataataccttaaccatattggttaattgatggaactaagaaaaggaaacatatttaagaaaatatgctgggcctaatgttaagtgcggtattttaattaattcatacttaccaacctgaaaataaaatgaggttaagggaaaatggcaacttgctccaggtcaaagaactaggtaaaagtaaacctgggatatgattccagagcccatgttcccactaatgccataccaatccttccctgagcaatttgcttttaaagagtaaatccacagttaccacttatgcaagtcagatgaaacgctggctccagacacaacctggtatttaataaagagtagtagtctataaagagtagtagagtctataacactcacccgtcttcttttatccattgtctcatagtaaatattgacaaactcctcagcagctctacatgcctgatctacataagttttaaaatcctacaagaaaaattccagaagtatagattaccaaccttttcaacccctcacaaacacaaaaccactgacagaagctgatgatttatttcaaccactatgtagctctatatacagtccacattctttcatataaattcagacattttaaaggccggactctgaagtttgcaattttaaaatttttcactaattttaagtgcatgtctttaggacataatcttctcaatgaatctgagtctttttcagtctccacatataaatttataatcttttcttggcaactaagcactttagactttcaatattttacaaacattcacggcaatgaaaatgacaccacctgaaccttagaaaaggagagagagcggcaaaaactgccactgaataagctaggaaattgttttctgttttcaagtgaggtgttagagccaaactccaaagttgatgaatgggaaacacacacacacacacacacacacacacacgaaagtagttcaactacttgaaaaaccggcagctccacttaggaaactttcccacattgcgtaaatattcactgctgtttgcctaagaactgtgacaccgaagaaagcaacgctgttggcgttcgtgccggagaattaaggaataccttccttctcattcatgtacggggcccagtctattactaaattaagaacaatgaatcgccagtttctttgtcaggtgactgaaagtgatttttagagaggaagataatcgagagaaagaaactgcaagccataaacaacaaaccccaacatccccgcctctcgctatttcccagctcagggtcctttccgggatcagaaagcgactgctaaccaggctgggggtggggccggcagggcgggcagcaaagcgtgggccccgccccgcagtgcagagagccgggacgtgattcgtcacctatccacgtgagcagcagccagaccgccccggaatccctcctctcagccactggagtccggcgcccagccgtcctgccacggcccaggcactcaccagagacgtggccatctgggaccttgtagcagtgtgttctggcagtgtcggcgtcactacctcctcacgtgtccggtccgcagggctgcggaatgatcaatacttatgaagagagcgaaacccgccaaacgcacaaaattttccaccctcccattctctcccggaagtagctcggtccgtcgttaaaagcacaccgatgttccaaccttaagttccacttcccttcagttcctgaagatccctcccatccaccttatctacttgtttgatacttagtttaaaatttaaaagccactttgcttttgtaaacatgatactcaacaggaaagtcccctacttttctaacgacaagcctggggacaagcaaaaatgaaagtgttcaattacagggacttttttgccccaggaggcggagccaaagccctctgaagaccaattagaaatgcgaggagacctactattccgtagcctataggataagtgggcagagcttggggaaaggcgtgcgtgactagtgaacaatttagcattctggaacgttctggaaggatcatcctcactgaattactacgttttggcagtatgcctaaaattactatttcattttaacccagccacattgaacaggaaaagttcatctggtttctccattctggcattttaaaatgtctcacggacaccaacaaaaattaagtttacagtgctattcaccatcttttaagggctatttattctgcaaggtattctaacaataactaaaatgtcgagtgctgactatatgtaaggtgcttttctaatcagttttacatatattcacttattataacaatgctgaggtaattgctattattttatcatcttcattttacagctaagactgtaaaatctgcctacggtcacaaactagttgagattcaaactcaagcaatataactgtcatggcaatgtggctttgctccccaacaccccttaaaaacctctcatcccaaagccgccaatgacttctgatttaaatggcaaattaattagatgtcgtagttttaccttgagtggctggtgtgtggcccctcataatagttacttcttctttggtatccttctctgtctccctgagaccagtggcttctgtattttctcatacttttaatctttctctttatctggctcttttctcttcaaggtaggactaacggaagcttcttctcagccagccagcttccgttttccgttaacctctgactggcgtcacttccggtgcatccccccttttaaagcctcccttcttcagggtgatctaaattgctactcgtatgctaatgaatctcaacaacctatcccaagcccccaccccttatctgagctccaattacacataataattttgctaaacatgaacgtgactgcactataggcttctcaaacttgtacgtccaaaatttaaactcattatttcctccgcacttccaaacttttatattctcccagtcacctatcttgaattctcggaatctttatttttttggttccgctctcctcctcatcataattcattcaataaatatttatcaagtattcactatgtgccaaagattgtgcaaggctctgtatatagagtggtgaataaaataggcatgtttcgaatccttgtgaggctcaaagtgtaatgagagtgctagacaataaacataacattgagttacaaagaaatactaagtaacttgcttagttctgaccattccctatagcaacccttctccctcttcccctcccctcccctcctcctcctcctcctcctcttcttcttttttttagagacagagtctcactctgtggcccaggctggagtgcagtggcatgatgttggctcgctgccaacctccgccgcccgggttcaagtaattcccttgcctcagcctcccgaggagagtagctgggactgcaggcgccagccaccacgtccggctaaccctcttcgtttttctccctcgctcttcttggctctctccctccctttctcccccacacttctctcactttccccatctcattctctcctccctctctcacccccacttctctctctttccccctctcattccccctctcattctctcctcccacacaaactttgataactctattgtctattttcttccaaattctcataatctttaaatacctaccttggtctg

SEQ ID NO: 1563936 - DNA, 4001 bp, Homo sapiens
ttatgttttcactcataagtaggagttgaataatgagaacacatggacacagggaagggaacatcacacacctgggcctgtcagggggtggggggctagaggagggatagcattaggagaaatacctaatgtagatgacgggttgatgggtgcagcaaaccaccttggcacgtgtatacctatgtaacaaacctgcacattctgcacatgtatcccagaacttaaagtatatatatatataaaatcctatgcttaataaatgggttttatataaaaaataggtttttagagatagggtattaacttttgcagctgcaggacagaagtagttctccaaagcacagttctatgctggtaagagacctaggcaagactcacttgaccacatactgacataattacgtaaaagatatggtgcagggataagttgcaatgaaaaagctgatgaaatctcggtctgttgaggacttaatattatccatgctacatgcatactttttgtgggtgtaagctatacttttgagccatgatcagaaattatctataaatatatgaaataaaaggggcgaatcaggaaatattccccgtaatgacccaccccttcattagcactaataataccttaaccatattggttaattgatggaactaagaaaaggaaacatatttaagaaaatatgctgggcctaatgttaagtgcggtattttaattaattcatacttaccaacctgaaaataaaatgaggttaagggaaaatggcaacttgctccaggtcaaagaactaggtaaaagtaaacctgggatatgattccagagcccatgttcccactaatgccataccaatccttccctgagcaatttgcttttaaagagtaaatccacagttaccacttatgcaagtcagatgaaacgctggctccagacacaacctggtatttaataaagagtagtagtctataaagagtagtagagtctataacactcacccgtcttcttttatccattgtctcatagtaaatattgacaaactcctcagcagctctacatgcctgatctacataagttttaaaatcctacaagaaaaattccagaagtatagattaccaaccttttcaacccctcacaaacacaaaaccactgacagaagctgatgatttatttcaaccactatgtagctctatatacagtccacattctttcatataaattcagacattttaaaggccggactctgaagtttgcaattttaaaatttttcactaattttaagtgcatgtctttaggacataatcttctcaatgaatctgagtctttttcagtctccacatataaatttataatcttttcttggcaactaagcactttagactttcaatattttacaaacattcacggcaatgaaaatgacaccacctgaaccttagaaaaggagagagagcggcaaaaactgccactgaataagctaggaaattgttttctgttttcaagtgaggtgttagagccaaactccaaagttgatgaatgggaaacacacacacacacacacacacacacacacgaaagtagttcaactacttgaaaaaccggcagctccacttaggaaactttcccacattgcgtaaatattcactgctgtttgcctaagaactgtgacaccgaagaaagcaacgctgttggcgttcgtgccggagaattaaggaataccttccttctcattcatgtacggggcccagtctattactaaattaagaacaatgaatcgccagtttctttgtcaggtgactgaaagtgatttttagagaggaagataatcgagagaaagaaactgcaagccataaacaacaaaccccaacatccccgcctctcgctatttcccagctcagggtcctttccgggatcagaaagcgactgctaaccaggctgggggtggggccggcagggcgggcagcaaagcgtgggccccgccccgcagtgcagagagccgggacgtgattcgtcacctatccacgtgagcagcagccagaccgccccggaatccctcctctcagccactggagtccggcgcccagccgtcctgccacggcccaggcactcaccagagacgtggccatctgggaccttgtagcagtgtgttctggcagtgtcggcgtcactacctcctcacgtgtccggtccgcagggctgcggaatgatcaatacttatgaagagagcgaaacccgccaaacgcacaaaattttccaccctcccattctctcccggaagtagctcggtccgtcgttaaaagcacaccgatgttccaaccttaagttccacttcccttcagttcctgaagatccctcccatccaccttatctacttgtttgatacttagtttaaaatttaaaagccactttgcttttgtaaacatgatactcaacaggaaagtcccctacttttctaacgacaagcctggggacaagcaaaaatgaaagtgttcaattacagggacttttttgccccaggaggcggagccaaagccctctgaagaccaattagaaatgcgaggagacctactattccgtagcctataggataagtgggcagagcttggggaaaggcgtgcgtgactagtgaacaatttagcattctggaacgttctggaaggatcatcctcactgaattactacgttttggcagtatgcctaaaattactatttcattttaacccagccacattgaacaggaaaagttcatctggtttctccattctggcattttaaaatgtctcacggacaccaacaaaaattaagtttacagtgctattcaccatcttttaagggctatttattctgcaaggtattctaacaataactaaaatgtcgagtgctgactatatgtaaggtgcttttctaatcagttttacatatattcacttattataacaatgctgaggtaattgctattattttatcatcttcattttacagctaagactgtaaaatctgcctacggtcacaaactagttgagattcaaactcaagcaatataactgtcatggcaatgtggctttgctccccaacaccccttaaaaacctctcatcccaaagccgccaatgacttctgatttaaatggcaaattaattagatgtcgtagttttaccttgagtggctggtgtgtggcccctcataatagttacttcttctttggtatccttctctgtctccctgagaccagtggcttctgtattttctcatacttttaatctttctctttatctggctcttttctcttcaaggtaggactaacggaagcttcttctcagccagccagcttccgttttccgttaacctctgactggcgtcacttccggtgcatccccccttttaaagcctcccttcttcagggtgatctaaattgctactcgtatgctaatgaatctcaacaacctatcccaagcccccaccccttatctgagctccaattacacataataattttgctaaacatgaacgtgactgcactataggcttctcaaacttgtacgtccaaaatttaaactcattatttcctccgcacttccaaacttttatattctcccagtcacctatcttgaattctcggaatctttatttttttggttccgctctcctcctcatcataattcattcaataaatatttatcaagtattcactatgtgccaaagattgtgcaaggctctgtatatagagtggtgaataaaataggcatgtttcgaatccttgtgaggctcaaagtgtaatgagagtgctagacaataaacataacattgagttacaaagaaatactaagtaacttgcttagttctgaccattccctatagcaacccttctccctcttcccctcccctcccctcctcctcctcctcctcctcttcttcttttttttagagacagagtctcactctgtggcccaggctggagtgcagtggcatgatgttggctcgctgccaacctccgccgcccgggttcaagtaattccc

SEQ ID NO: 1563937 - DNA, 4001 bp, Homo sapiens
ataatcttttcttggcaactaagcactttagactttcaatattttacaaacattcacggcaatgaaaatgacaccacctgaaccttagaaaaggagagagagcggcaaaaactgccactgaataagctaggaaattgttttctgttttcaagtgaggtgttagagccaaactccaaagttgatgaatgggaaacacacacacacacacacacacacacacacgaaagtagttcaactacttgaaaaaccggcagctccacttaggaaactttcccacattgcgtaaatattcactgctgtttgcctaagaactgtgacaccgaagaaagcaacgctgttggcgttcgtgccggagaattaaggaataccttccttctcattcatgtacggggcccagtctattactaaattaagaacaatgaatcgccagtttctttgtcaggtgactgaaagtgatttttagagaggaagataatcgagagaaagaaactgcaagccataaacaacaaaccccaacatccccgcctctcgctatttcccagctcagggtcctttccgggatcagaaagcgactgctaaccaggctgggggtggggccggcagggcgggcagcaaagcgtgggccccgccccgcagtgcagagagccgggacgtgattcgtcacctatccacgtgagcagcagccagaccgccccggaatccctcctctcagccactggagtccggcgcccagccgtcctgccacggcccaggcactcaccagagacgtggccatctgggaccttgtagcagtgtgttctggcagtgtcggcgtcactacctcctcacgtgtccggtccgcagggctgcggaatgatcaatacttatgaagagagcgaaacccgccaaacgcacaaaattttccaccctcccattctctcccggaagtagctcggtccgtcgttaaaagcacaccgatgttccaaccttaagttccacttcccttcagttcctgaagatccctcccatccaccttatctacttgtttgatacttagtttaaaatttaaaagccactttgcttttgtaaacatgatactcaacaggaaagtcccctacttttctaacgacaagcctggggacaagcaaaaatgaaagtgttcaattacagggacttttttgccccaggaggcggagccaaagccctctgaagaccaattagaaatgcgaggagacctactattccgtagcctataggataagtgggcagagcttggggaaaggcgtgcgtgactagtgaacaatttagcattctggaacgttctggaaggatcatcctcactgaattactacgttttggcagtatgcctaaaattactatttcattttaacccagccacattgaacaggaaaagttcatctggtttctccattctggcattttaaaatgtctcacggacaccaacaaaaattaagtttacagtgctattcaccatcttttaagggctatttattctgcaaggtattctaacaataactaaaatgtcgagtgctgactatatgtaaggtgcttttctaatcagttttacatatattcacttattataacaatgctgaggtaattgctattattttatcatcttcattttacagctaagactgtaaaatctgcctacggtcacaaactagttgagattcaaactcaagcaatataactgtcatggcaatgtggctttgctccccaacaccccttaaaaacctctcatcccaaagccgccaatgacttctgatttaaatggcaaattaattagatgtcgtagttttaccttgagtggctggtgtgtggcccctcataatagttacttcttctttggtatccttctctgtctccctgagaccagtggcttctgtattttctcatacttttaatctttctctttatctggctcttttctcttcaaggtaggactaacggaagcttcttctcagccagccagcttccgttttccgttaacctctgactggcgtcacttccggtgcatccccccttttaaagcctcccttcttcagggtgatctaaattgctactcgtatgctaatgaatctcaacaacctatcccaagcccccaccccttatctgagctccaattacacataataattttgctaaacatgaacgtgactgcactataggcttctcaaacttgtacgtccaaaatttaaactcattatttcctccgcacttccaaacttttatattctcccagtcacctatcttgaattctcggaatctttatttttttggttccgctctcctcctcatcataattcattcaataaatatttatcaagtattcactatgtgccaaagattgtgcaaggctctgtatatagagtggtgaataaaataggcatgtttcgaatccttgtgaggctcaaagtgtaatgagagtgctagacaataaacataacattgagttacaaagaaatactaagtaacttgcttagttctgaccattccctatagcaacccttctccctcttcccctcccctcccctcctcctcctcctcctcctcttcttcttttttttagagacagagtctcactctgtggcccaggctggagtgcagtggcatgatgttggctcgctgccaacctccgccgcccgggttcaagtaattcccttgcctcagcctcccgaggagagtagctgggactgcaggcgccagccaccacgtccggctaaccctcttcgtttttctccctcgctcttcttggctctctccctccctttctcccccacacttctctcactttccccatctcattctctcctccctctctcacccccacttctctctctttccccctctcattccccctctcattctctcctcccacacaaactttgataactctattgtctattttcttccaaattctcataatctttaaatacctaccttggtctgatctgaatttattttcccaggctattctcccaaattcaccaacactggcaaagttaactactactgtttgccaagaatgactgatgtttactacttcattggtgattgtttttcttgattgagagattgtgttttatatgatttcattcaatcctcacaacccccagaaaggcagacattattatctagatttttaaaaatttaaacttaagtttaaagaagttaagtaaattggttaagatgatacagctagtggacctgggatttcagtcccaaactttcaaatcccaaagtctgcttttagacacttggctattcatgcatttacttatatattcttattttggaatgttccctccatttctacctgcccttcagggaccagaacaggtgcgatcttccctatgaagtcttccctcatttcatgtcccctgaaccccaactgttgtgagctctttaatggctatgagaatggctattggtgtgggaaatagtgttgaaaaatatgggagggttgaagtactggaaagggacagctgagttagaggtggaggggagctcagttttgcactgaatttttgcacagaattttgtgctacaaagtggaaattgctacattgtgctacaaaggtaggagactgggtaaactgataatatagaaaccaatgatgggctctggttgtcagagcagtgaatttaaagatatgaaaactatgttggatggagggggagggatgcaaatggaaacaaagtgaataagacacggagttgctcttcactagataactgcaaatgtataaaacttgggaagaatgactaggaagggtgtgaaagagcttttcttggaacacagcatagcattttgattgagcacattgttgttggcaccagtctgggctcaaatcctaatcatgctactgactagttttgtgaccttggcaaaattaccattccatgactcatactcccgatctgtaaaatggaaatgatattagtacatatttcacagcattgctttaggaattaaatgagtcagtgcctgtcatata

SEQ ID NO: 1563938 - DNA, 4001 bp, Homo sapiens
gctccaattttttttattgcttatttattgaatctcttataaaagaattttctcaaagacaaagagcatgctattatatccctcataaatatctctcgagcgttttgaaggcacacagtgtatgcctgttggttgactgaacagagcaagttccggtttttgaaaaggtggaataaagaggaagaaaactccattactcctgttttagatgatctggtaaaatgttctctatcagcatcgcatacagaggtctattacatagatcatcatatctcaaataattaaattcacttgagggtcagaaaaaaacagattctttgtgtagaatcatttactgaagaatttaaaggatttttccttgggctatctcagtcagattggaacagctagagccagggaaaatatttcataacgagtcttcttggtatattaaagtgcacataacagagcgagaaactttgaaaaataacttcaatatccataatcctataattccaaggcatttttcattttttctttttcctttaggaaggtggttttttaaagggacttttgtttttaactaaatgagcttaaaataatgtgattagaaaccactgtaggctgggcacggtggttcatgcctgcaatcccagcactttgggaggccgagacaggcagatcacctgaggtcaggagttcaagaccagcctgggcaatatggcgaaaccccgtctttactaacaatacaaaaaattagctgggcgtggtggcaggtgcctatagttccagctactcaggaggctgaggcacgagaatcacttgaacccgggaggcggaggttgcagtgagccaagatccatgccactgctccccagcttgggcgagagtgagactctgtctcaaaaaaaaaaaaaaagaaaagaaaagaaaagaaaaaaccaccgtacggtggctcacgcctgtaatcccagcactttgggaggccgaggcgggcagatcacgaggtcaggagatcgagaccatcctggctaacatggtgaaaccccgtctctactaaaaatacaaaaaattagccaggcgtggtggcgggcacctgtactcccagctactcgggaggctgaggcaggagaatggcgtgaacccgggaggcggagcttgcagtgtgccgaggtcgcaccactgtactccagcctgggtgacagagcgagactccatctccaaaaacaaaacaaaacaaaaaaacactgtagcactgtagcttttggttatcacaccaatgaattcatatctgaaattagaataagaaaatcaccaagaggactatttcatatattcggctcaggagttttgtttttaggaaacaaaaatccccaccacctgctgttttcttgctttctctatcccctcccccacgatcacagggtcagtgaaacctgatcagaagtgtccagataccgctgtcccagaagccactttaaagactctttgggcagaagctctgtggcttccacccctcttcccaacccttgcacccaccggcaggagaactcaccatgcagaagcaggaccaacatccctcggcctttcatccacccagtggcttaggaccacccagccgtgggacccctacctgaggggagaaaggacaggtcacccagtgcccaggagggccccatgagaaccctcccatgcctccacacttcttcctgaatgccctgcctttctttcttcctcacattccttccttcttaatgaccctggtgttgggctaagggaaaccagtaacaacagaaaatcagaagctccccacaaatggacagtttggatctattaggaaaccctttgtcaggctacagccctgacagcaactcagatggcatcactgacaacccagcaaggaaatggatggagaggaaacccctgcagagaagcgttagtgaatggtcctcaaatgttgcttaccgtcctgggagtctccctggtcctgctcctctgaggtccccctccactccctcagcccatccatctcccaagtcaggcagccacagatgctgaaaatggtttgagagagaagtaaaggtgggggtggggggacgggaggaaggggtgaagaggaatagttacttgtgcaggtttgagtgcttatttttctttctccagatttaatggcaggaaaatcctctgtatcacatgaggattaacagagatgaaagaatgtgtctgcctttcgaatcactaaagccagtgacagattttgctgacataccaatcggctttatccccgggccttgaccaccctggccctcctgtcctctctccatctgcctggcccctttctctccttaaaccttccccagaccctgccccgttccctgaccccagccccagccccaagcaatatgtagcctgaaattggcttcctgccacccaaacagcattatcagcattttcaacaaggacgcattatataacttggagagctggagaagggacaggacagcttaaaatgtttccccaaaatgccggctgctgatttcctttctttgaagtggttgatggtgaatgatacaaaaacggactggagagagtccttccactacaagaaggcaagaggttcccactggggttagggctggtagtggtggcctaaggcagtgggtccaggaatgggaccttcagaatctggctgaggtttctgaaacccaccaggactcagtttaggccctggctactcagtgtggccggtggaccagcagcagtacctgagagctcgttaggaaaacagaatctcagcgccttctaccccccgccccagacctgttgaatcagcatctgcttttttttttttttttttttttttgagatggagtctcactctgtcgcccaggctggagtgcagtggcacaatcttggctcactgcaacctccaccttctgggttcaagcgattcccctgcctcagcttcctgagtagctgggactacaccatgcccagctaattttttgtatttttagtagagacggggtttcaccatgttgaccaggatggtcttgatctcttgaccttgtgatccacccgcctcggcctcccagagtgctgggattacaggcgtgaaccaccgcgcccggccagcatctgcattttaactaggtcggcggagagggggattcctgtgcccggtaaagtttggaaagccctgttttaggagactggtggagggggtctgatcaaaatgagggtggcaggggggcctgtttatctagcctttctggccagcagttcaggtgcccccacattctcctggccccagcaagcctctgctgtctgctgggacagcacttccaggtatccatggcaacctgccaagttctggccacgcaggacttggtgagccagtgctgatgaaaggaagccaggagttcccttcccacagaaagggttctggatgtgaatctagacatctcaggccaccgtgccctggggaatttttgttttcttccatttgagccttgaaagccaaaatgtggctgaacttgtctaacctgctggaaagaagagaatactagggatggggtagggatgtgggtgggggaggcctctcaaatgacatctctatccccagtgttggactcgcctggcttattagatgagagcagtgggcagccctctcattgtgaccaccagtgtcggaggtgtccctgtagccatcaccccaagccttagcccaacgaagcccccactcccccagcagcagtccagaggctgaatctcgactgtaagagccaacctgtctgcacccacaacctttgttcgcagcttattggtccaaccttcccttcaatcttctccaggccagtgggcctggtgctctggcactgggatcccactaaggaagaccttcttctccacctgtgaactgaaacatttctcccaagtggaaaataaggaggcatcagagactcttggcataaaaaggaaggagcccatccaccaggtgagctggtaccaccgacttggga

SEQ ID NO: 1563939 - DNA, 4001 bp, Homo sapiens
tatacccccataacttacacagaattggaacacacgacttccttattagctcaacagagttccaaatctactaatccgagggactagattctgggctgtggtcatctcaacaatgtagctactctattcaatcttcatgattttgtttttacattagaggaaaccaaggcacacaagttttactggtttgcccaagggtcacctctctgtaacccactctagcctttggaaatgttagtggtgttccacttttctgctgaattttgttttattaaattctgaatttagtttagtttcattaaactagtcttccagggtttgatgaaatccgggtttgatgaacttcccagtagagctgactaagcaggacctatgaaagagctacttcacagaattagctgacatccagttagagtggcaccaatagtctcagagaagagcaggttgggccagtgggaatttcttccgtgtaaatctgacagcatagatacagaggatctaaaagtggggactgagaaaattggttttaggcagaagccaatgttgggagatggcaagatttaagtgaacaatttttaaactgggaaggaatatgatgtcaagaagccaatgaatatccaagtgaggtgtcttgggcacacagggataggggcctatgatacgtaatggtcaccatggatatttttgagataagatattagtgacaatagagtgaggttagcagctatggtgatagcttatcaaaataatcttttgatcaatcagtcaacagtatttacggagctcctatggcagagaggaaggtgacacactgataaaatactgtcatttctatctctacacatttcattaccttttctttctaacagtaaagtcagtaagtgaggcagtttctggcctacactaaaccattactgaattaatgaatatgccttcaacccagtgggataaggggacggggagactggagaaaccagctgaatagggttaagacaagtctgtaacgttaacaatgaagcatttccatagcacttttactttttggaagccactctcgcatttatttttcccccagttataattccaaaggctgtaaggtaaggcagttaatggttttattaaactgaagagttaactttggcccagaaagctttattgacttgcccaacgttacacaacacatgtcagttgcaggggcaggaactaagaacccaggcttcctgcttccccgcccattcagtccttccactgagccacactgccaagcacaatccagaggcttggaagttggggacaaagccccgaggttagagagcactggcacttcacacctggacctgaacctgttgcccgcgtggcttcagtaggaggacagtgggtgacccgtcgcggtttggggttgggaggtaatggcaggctcccctcctctgtgggaatcaggtggttacttactcatattgcccgttcctctgggctagggtcagggcgcagggctcccggagaggacccttcatctccataccctcgacagtatgcgggcgctagtcaagggtctccttcggaagcgcggtggggaggagtggtgcactgcggggcgaagggggtcttccaccccccccccaccgccgccctcccccgccccgccccgccctgcttcgtctcccgcgccggccccctccccctctctgctcggcctctgggccacccggttgccccgccccaccgtgttccgcagggcccccgacccccacccccggccctgcgcggcctcccctctcccttctctccggcggatacggcaagcggctgggctccgaccgggagcggcggctccatccaggcggcctccgggctcagcaggacagcggactgcgggccgatccgacgacactggctcccgcgtccccacacccacccacctcggctgcgtgtcgtttgaggaacagctccgcgccgggcgccgggcgccgggagccgggagcggggagctgggagctgagaatctgacccaagagagagcggcgcctcgcgcccccgccagttttccaggccgccgcagattccgtcccctgcggtcaaactgcggaactgcagcgagagacctgacggactgggggcgtctctaccaggtccagcaaggaatgggttttaaatgccacctgtgacatcaaaattgttctgaggactttgaaggccacagaaacaaaacacagtcatacctatgggagatctcaaacctgttgtgtcaatacgacccacatcattcagtaaaaaaatacatatatatatatatatatatttcttaaggttataatgtcccgtgttggttatcctaccatttcctttcctcttctttcttccacgccctaaatcggagaattccccaaagcccagacctttgctcctcctctgcgtcccctccagttcacctctaactagacaatgtccaaatatatatccctggcccagacctcttacctaatagagtccattgttaacacatcactgcgtcacaaaactaactcattatcatttcactggaaagccatatatcgtcttccccctcctcatctctatatccaatcagtcaacacaccctgttaatattttacgtggaattacttttagattccttattttctctccattcacactgccataactttattgtaagcccttgtgatagcctatctgggttattgcacttttctttaaataaatcctgttgggtttactctttcctttgacatgtttactctgttgacagccataaaaatatttttcccaaagtaatttttcgatcgtgttattcatttgctccagaatctataatacactagatatcaagagtgactgtaaatctgtagtaattaaaagtatgctgtggagatagacaatcaatgaaacacaatataaacccctcaaacagaccacacatatacggaaggttgatatgcagcgtgtgggacatttcaaatcagtggggaaagaatggattatccactaagtggtactaggactactgcttatccatatggaaaattataaaaattagacccctacctcaaaccatggaagaaaaatcagttccaggtggattaaagatctaaatgtgaaaagcaaaactttataactttcagaaaaaaaaattgagtatgagcttggaatatggaatgagaataagacatttagctacatgaaatttcaaaatgtatgtactttaagacaatataaacaagttaaaagacaaactggcctgcacagtggctcatgcctgtaatcccagcactttgggaggccgaggtggtaggatcacttgagcccaggagttcaagaccagcctgggaaacgtggcaaaaccctgtctctacaaaaactataaaaattagctggatgtggtggcaagtgcttgcagtcccagctactcaggaggctgaggtgggagcatccccttgagccagcgaggtcacatctacagtgagctgtgatggcgccactgcactccagcctgggtgacagagcaagaccttgtctcaaaaaaaaaaaaaaaaaaaaaagacaagctgtcatcacctttcggacatctcccaccatttcccaccactctccctaactagctttgcttagtcacactgactccttgttgttgctaggacttgccaggcacactcttacctcagggcctttacacttgctgttcactctgcatgcactctcacctccttcaggtctttgctcaaatgtcactttctcactgaagccttcctagaccactttattgaaaattgtaattcaacaatccccttctccatcaccacacatacatgttccctatccctcttccctgcttatgtatcactatctaccacttctgttttatttatcaatattattggtcatttaccttcacccgctagaatgttgagttccatgagtgcaaggattttgtctgttttgatcatagctgcattctcagtgcctagaaccattcttggagccaa

SEQ ID NO: 1563940 - DNA, 4001 bp, Homo sapiens
taaaaacttcagaaacagaaaaggaaagactttaccttttcttttgccaaaccactttctggaaagaaaacagaaagtgaatattcatagccacatctttgtaagtgatctgccactaaagagttagaggcgcctattaagagggagctcccttctactgaaatggaccgaggctgcagttctccactcaatacagggtgcatcaactcatgaattagctggtttcgaagttgtgtctagcataaaataaaaacaaaaataaaaaagaaacacaagggaaagaaatttcagcaggactgtttcattagagatatacacagatgagctacattcattggaaaccttccttctatttccataatggttctagatccatggccagaagttagaaaccttcccctgcacactttgtcttaccccgtgagacaagcagtccagtgggttctagaaaaagctttctttccccagcttccaaatgaaacgggtggttagccagatccacttgcagactcataacttcacttccctagaagcccatttcagcagcttacgattgggatattaagtataggaaaaaattctgccacttcatcacacctctgtggactgttggagaatataaccaaaatattcaacaacaggggactgctatatacattacaaaaatatccaaagataagcctgttgccactgaaaatgaagatttcaaaaaacttttaaggaaacagggaaatgctcaccatataatttaaattaaaaaaggatacatacacaggatatagctacatattttaaacgtaaaatatgcttttgaaatgcatatttcaatgaaaacacgttgagctaatcctactcctggctgttaatccaaatataaagcatactaataggtattttctgcccaaactaaacattcatacatttcaatatagtttaaagataaaatttttcatttcccaaactattattaagcagtacactagtattttctatatggtgtcaatgtccttcatccaaatgtattacaaacccacttattaatttaggaacctataagccatatttataaaacaagcctaatcttactgtgttcattatacaaatatttccttctcctatcttattgtcagttcaattaattatttgaatatgctcctttaagacgactcaaactcaacattttctcaaacattttcaagagactgtaatgtttcaggatacagagttattcgggaatataaaaatgtaattcaccaatacaatctatgtatcatacgattattaaaacctaaaccttgattgaatttgaactacctgttacaggttacacttgtaaaagctgacacagatacgcctaaatccgataccttgagtgtatccagtataccccgatccttaaacgtctggtatagctttttgcgcagttcatcttgactcaacacatcagccacggtaaacatgttggactaaaagacaaaatggttataggttacctgcggggcagagggaacgtgaacgtctgaaaacagaccagtggcctccggggaagccataagaggcctagcggcgaaagtttaacgaacacaaaacaagactttatttccgcccgagaaggggcaggtgtgtctacctgcgccatcatcaggcgtcagctccctccggagcccgcctcgctcgccccgccgcggcccgagtttagtgcccagcccgggcggtggggccaagacgagggggaatccctgccctcagaaccctgcctctgtcccgagggttcgggaggaacaaaggtgctgaacgttctctgcctcgcactcccaactaggttttctagcaaacacgcgagcttcctttcttcgcggttctgaggcaagggcgaggacccaggcacgactcaaaggcggctggagggcggggacccagacactagggactgaaggcagcgaggcaggaccgcctcacagccagtccggcaacttccggaaacctgctaaatatagccttcccgagctgaagagctacggcgcatgagcttggttgcccagcaccggccggaagctccgcctacgtatcgcgagagcacatcccagggtatcgcgagaactgcttcggcgttctggctacaggttcggggcgcgggtctcttccgcggaaactgacattgcgtttccgttgtcggcctcccactgcaggtagggaatggagcaagtgcggcggggggcgggtgttttgagtccctggaggacttcgtagcccctgcgtgacgcggatgttggtcctgtacctccacccctccccggggtggccgggccggacctgccagccctccgctggctcatccgcgcagcccttccacctgcagacgtccgccctctcgggggctgtggtttcgcggttcactgggtcattcagctaacccagggtttcttaacggctgcactgttgccttttggagccggaagattctttgttttgggaggctgtcctgtgcattgtaggtttagctgtatccttgctctctattttgtcagtatcaccttctcccccaagtgtgacaaccaaagatgtctccagatattgccagatgtcctcttggaagcaagatcgctccgggttgagatccacagagctaaacgttttagagtaccaaccattgtgtgctgtgaggtaaaggtgagccagtcctcatgatgcttaaatgtaattagaaaggaaaggaaccaaacctctcagaagcgataatgaaaatgttacagccagagaattgaacaagaactaagatacattgtagactggataaagagtttaaaggggaggtggttgaagatggaagtgatccagatcatctctgtggaaaaagtgtgtctttatcggggccttgatgggtaggattcgggtggtgagcaaaaaggagaacatcacaggaaggggaaaaatgagcaaaggaatcattaaaagaaaaaaaaaagccacgaccttcttgggagcagtgaggaatctagcctgactccagagttgtgtgctgggaatataagccttatatggtatctaagtcctgtgaggacagaattggatgtcagctttgtgtacagcattgaagatgagtacgatgagttttgatctctggctgtgaaaaacttaaagtatttaagaggcagtaagagtgacaggacttcataggaggtggagaacctgtaagtttttgttggaaacaatggaaaaggaggagaggcttagttggattttaaaggatgggtagtggttgcagacagaataaaggagaacattccaggcatgaagagagaaatgatagtagctctgaactcgatatagtcaaagtgaatttgggagaaaaaataagtaaacgagtcaacgctagcagaggtggaacaatagggctgagaaaagacacgtggagcaatgtgggaatcttgaatactagtacatgatcctgtagctgagatgcatcaaaggcttttgagtggaatgatgaaaacagtgttctaaaaagatgttgatatgttgtaaatgttgttaagtagaatcacttgtccactgtttaaaaaaaaaaaatgttcctgaagacccccttactcccacctccacctttggtcccacagttgaatacatgaatataattagataaaatgttctccaaaaactagcataacttctaggggagggagaattgcttataatattaatagaaaaatgtcacattaaagacctatcagtagtattcctactgcccctcctcattgtaatagacatgtcccatgccataccagtttagtctcatgaccccaggtttatggaacaactgaaatcactgctctcgcgagcacagggcagtttttctagaagctcttctatagaggttgtaaagaggcatgctacaaaaatggatgtctttggaactggagtccatgagttttatcttgcatttgtctacaacttaagagacttccaagttcactgagcatcctcccactctggcactgttg

SEQ ID NO: 1563941 - DNA, 4001 bp, Homo sapiens
gaaatgggaaaccatggacaaattatttaattctaccaaggttaaggtgactagttcaaatttgagcccagctccccaatcatcagagctgatgagcgttccggatactgaggaaagcaaagtaaatttcctgacagaatgcacagctgaccaccaacacaaagagcattgagacttgcatccacatctgggagaggttatatctttaatagaaactaaaattacattttagctaagtctctagaacttcctagctccttgttttcacacattactttgtcacttttcaatgccgcttatctgctattttaacacttgaaacgacagctttctcaaataaataacacattaaaaagggcaagctagtacagaatccagtacagaatcttaaacctttgaaaatcacggtggagacgtggggagaggagcacggactaattattaatcccactccctacaattacggataagacactattgacgattcacctactacttacagcacaacttccaggaacagtagctaaaaccctccacacatctcaactgagaaacaaccaaaaaataacctcgcgggaaacctcagaagcgcagcccaattccccacccccttccgcccaaatcgcctcaatatggaaaggcagctgaaggacactcctacaatttggttgttttcgtattttcagtaccaaatgctcgcgactgaagtgtctaaaagggcaaccgccttgtacttgtgcagctacactccagttgctttacaaactcttcaagcagggatggaaacttaaaagaatattacaccctgtgaataaagagatactgggctgaagaatggggatggcagacccagaggcggcggcggaggaatacatcgagaaagtaacacaaagcgagaattgggcgggcagggtggtcaacgccaaagcagcagcatcggggtggtttctcccccaaggataggaagtgaacagggctggcaacctcgcgaagggaagggtgtggttccccgcggacagggtgggaaatccaggctgagggcagcggtggaattgggcgatggcaaaggaaacccctggaaatttccaatctaaaccgggaccgctcaaccgaaagaacaccagaaaggcactgcctagcagggtgctgctcaatgtcccctcttctcgaggtgacttgtggcaccatcgacgagcttttgatcgtcctcgggtgatgcaaagtgaggatatgattacatcggaacggcacccccgccctagattggcagagaaggaccaaatctggctaaggggaaaagactggggggggagatgaaggaggagatggaggggaaaaaggagaggcgatgagctggaattaggggagaaaaccgctgcaaaggagtgaaagggcagggattccaatgcagtccattccacgacattctaagcgcgcacgtgtgataaaagcgcctggagagagtggaatgctagaacatttacgaaataaaaacaaagcaagaaaggcagcaaaaagcaagcaagggaggaggaggaaatgttcgggaagcggacaacagcggaaaacccgatgtgatcagatgccagtagaccacgaaaagcttagcaatgtcactgatgtaatggggatggttcgagggaagggagggaaggagtgatacaaggtagaggacggcgcgagaccccaagggggcatctgccaaggtagaacgggacaccggtacctgtgctgtcggccacgttgcccacggaagacgccatctggagcttctcgagggagagcaaaaaagaggtaattggtcctgctgccgccactaccagcaagaacgtatttggaggtagtagtacaagggcagcagccgtagcaatgctctggagggcttgagcggcggcagcagttacaggcttcaaaccctgggaactctaattgaccatctacctagtacggtcttgaaatggcggcgacggctcctcggccgaaacaacatgggccggaactactttctgttacaatcaagtgcccgcgcggaggtagccggtaaccagcgccgccaacaaaatgacttcaagctgcaaagtcgagattccatgtagtcctccgcgcagcgcccattgcgacaaacaccacggtggagaccgcgcatgcgagcagccctgtcaacccgactcgtggttagggcactctctggggcggaagcggccaagtttcttaagagtgtagcggaagggtaaaaacaaacacacacgggacggatacgtttttgccaccgcgattaagaagagtgtttgttacttagcaggtggtgtcgttttaaacataaatgccaaaggcgtctaaaaaagtttatcaactgtattcgtacaaaaacggatggttacgactctcacggatcaattctgagccagtcaattcagaagattgcctctcaaagacagctgctcaaaacgaggagcgagagggttccgatttgagcccgtcttcattgtgactcggccatcgatttcagcacttcgatgaaaaagactgaagctttcacagggccagttgaatgcagacaccttcaatgttggccgtatagcctgaaatttcaaaatcgttttggtattcagaatactcctgcccacggtgatagggcaaatgtttaataactcagggacatgctgggcgtttgcactccgaaggcagccataaaaatgttaaaggtgattcacgttcgtcaaaatccatgactctcctcgagttgtgacttcatttccaccagctagctctgcacattgtcacagtcggcgattccactgagctcaaagcagatcaacaatgataaatgaattcacttgccatctgcctaaaccacacgtctagattgagtcatgaattgcctctacttccttgaacaaatcggttcttacgatcttcctgcagtttcaagtctactgttcagacattttgtcacattggtatttatacttcacctcttgttctagaaacgacttaaggtagcttgccacatcagcaagaaagtattacaagccactggaggctacaagttggatctctgagagcctttttatttcaaaaagtccttgatctaagaaagcaggtcaatgaatttcttcaaaaagtttttgctacctagccccttcactacattttttaaaactaagtcctcaaattctgcttaaatttcttcaaaacagtcaacaaacaattaattatggaaatggcacagagaaaattcataatgctaatttcttccatcccataatcaagagtcacatcatgcagtgaaaaagacaaaaatcactacacaaactctcctgaaaattgagcaccaacctcttgtaatttgatttaactggtaaaacctcccccccgcacacacacacctactacaagttccctatctgtaatgagtaaactcagcttttcaacttttagaagagacttctcagattccactggcagatgtttaggccttgctgatgagcgggtgctagctaattaacaaaaactctttttgttgttaaatgcaggtcatgttcctaattcttcagccaataagtaacatttactagagtctctatgtgcaaggcactgtggggggcacaaaaatgaacagaaatcctcgccctcaaggaatctgaagcctagttaggtagacacaaaaagctactagagagcaatacagaagactatttagatgataaaatatattactctctatgaatatctagggaggaaacaggtaaggttggagggggtgagaaagaagccttgatctagacattgaaggaagtgcttttgtatgttttttattgttgttcacattgatttctgggttttttttatgtgcaattttaaatttagaaccaattataattaaatcagctgggtcttcaaccccaatcccaaactttgtcacccagtaacaccactgatgttgcattactttttttgctgctgtgtaacaaagtatcacaaatacagctgctcagaac

SEQ ID NO: 1563942 - DNA, 4001 bp, Homo sapiens
ccaggctgtagtgcaatggcacggtctcggctcactgcaaccaacatctcctgggttcaagtgattctcctgcctcagcctcctgagtagctggaattacaggtgcctgccaccatgcccagctaattttttttttttttttgtatttttagtagagacagggtttcaccatgttagccaggctggtctcgaactcctgatctcaggtgattcacccgccttggcctcccaaagtgctgggattacaggcgtgagccacctcgcccagcctcgcactaccactttcaaatctttctttctccctgctcttggttgactgcatccgcctaagaaggttgccacactggtcctagaccctgtatttggtgataaattcactcaaaacaaagttataaccatataggacatacttgccaatgactctgagtttatttttcacaatcatctttcagccaagagaaaaaattaattatcactccacccaatcattaccctccattcttctgtgtatatgctttggcataaagggttggcttgcctgcactctcgttggggatgtttattattctttcttttactccaagcctcctaccaacaagcagaaaaaaaacctccacacacaatgggggaaggagagagcttcccacagctgagtcagctgtgagcactggaaaagcgaagctaggtgaagttccttcagcccagcagcccccaaccctatccctattttactccctgggggctgggccccttgtggcagggactaagtagtcagctctttgttccacactcaagcagaattcagtggcaggtgaagccatccaataatcctgaacttagactgaccttgacctaaaccatagctcagtgtgataaagaaaataattcactggggcaaaggtgctttccttaaaaaataacttgccatggcgaattttttactgccccccacacttatctgtagcaaccagagaccaggacaaaattattattcaagctgctgaccttaatccccaattgtttaggaggtgctggggcagttccttggtcagcttggatgtcactttgccccagacaggggtgctgaatatgtctaacagtacagcagattgtcccttaagaacaatcatctgccaagtaagggtaattgctgagcaagagggtccctggcacagctacggatcacgtcttataaggtcaaaaccactaaaggaaaaggcccaaagttctggttgtatccaccactttccacttctactatctccactccccaagtgtgggaaacccatttgcctcagagatctgggctgggagtcaccctgcaatctcccttcccctggtggtgtggaaaggcttaaaggccagacacaccagctcagagaaacagctcatcgaagccttgcacttacttctcatagcgctgataagcgcgttgccgtctttgattacgtctttgatgaatttgttggtcctctccagttcctgctcataacacttgagcctctcgcggaaatcggggctgtccaggtagcagtcgctgaactccagcgggggatgacccatggttctgatggccgggagtagggggaaaggggaaagacacaaagaccgagagcatcaatggcacagtagaggaagtagaggggacggactgagcgcgcgacccgcttaaggaagctcatagcctccgtccctttggaggacaggtacctgtttcagtgagactcctgaggagcgctggctggtccggacagagaacaggcgccccggcgatggcttcagggccagggagagctaactatcgcagtcggatcccggcagggtgctgcctagcaagcagcatgtcccttaggcatcgccttcccagataagcagcaaaaaccgcagcccgacttgcctccggagacgggccggatccttcctgagcaattgcaaacgtgacacttgggcccgcccaaggtgtaggcgaggttagagctggagctgggaacagcctctctacaggctcctcgctccggagcgagcggaagacttccttggccgaactccgcgggcaacccggattgcactgtcccctcccctttcttaaagccaacgcctgcgccccgccccagcgaagcccgaggaccaaaccggagcgctctggctccttcctcaactgttttccttgtaccttagagtttcctgaccagggcccgctggctgctaagacttcttcctggtgcaagggagccggccggccggccgtccttttaggcgccggaagggttaagccagggcggcaatgaaacgtagcctcgctccatagacactgcagcgggaagaggagggcgagagcgcgacgcacaatagccgcggtagcccagcgcttccctacggaaactggggagcagtcagcgccctaggactccagctggaaagcgtggcggcctgggagatgtagtctttccgtttgcactccccaagactcctccctgcagtctccccaccaccccgcctgggaggctgctctcccagaacggcattcccagcctgccgcaggctcctgcgcagggaccggccccaaggggcaggtgcgcggcgctggactctgcgggggaagtttccgaaactagagcaagaacccgcaagactagattgcaggaagccatctctcaattcccatgattcggctgggttgtgtattcttttgccttcccctctttccagcctccttcggacctaccaacttcttttcctctttcttttcccatgtctcctgctctaagtgctctaattcccttgggccttcgacctgaagggttgattcctactctagggtctccgtgaagctcagtgccccctgccaaagaaagggaggccataattcagagttaatattttcctgaataggacctcagagcatggcttttgtggcagacgccgataatgcatatgattttccatgtgtaagtggaaagtctaagaataggatgttataaattgtcttgcagcttaccttaaaggcagctgtcttgagactaagggtaggtagaggctcgaaaaactaaaaaatagtttgtgcgtgggcaaagagatccctttaattctgcagaagtgtttacattagattgccctgtgaagaaagccagaacggaagggggttgtaaatagaataatagtggctgacccacctgaattagggtcctgttgctgctgtgacaaattaccacaaacttgatgtcctaaatcagcataaagttataatctacagttccagaaggcagaaatcagaaatgggcctcactgggatcaaatcaagatgttagaagggttgtgttcattttcagatagtctaggggtagaatctggttccttaccttttccggctcaagctgctcacatcctttggctcatagctcccttcctccgtctttaaagctagcactggccagtcaagtctttctcatgctacatcactgtgattctcatgcctccccttaaggacccttatgattacactgggtccacaggataatctcccccatcacatcatccttaatcacatctgcaaatttcattttgccacataagataacgtagccacaggtttcaggacatggacatctgtgaaggaggaaacattattctacccaccacacaacctatcgcccatctcactaatcttcaaaacaaccctatgaggatggttttattattatacccatttaaagatggagaagctgggtcaaagagagtttaagtgacttgccgaaggacaaacagctagttaaatggcagcacttgaacttgagcccagcctggctggctctagaggtagtgctcttgaccactacactatatagcagaatggcaatgagaaaacgccctctgaaaataaataagtagccacatctcaggggaaagttttgtttcttactctttttatctttaaggttaatttatgggaaaatgtccaaaatgagctttaaatgcaccatgggttgaaaaatgcaggtact

SEQ ID NO: 1563943 - DNA, 4001 bp, Homo sapiens
gaggggcctgttaggctacgtcatgaacgacttgcttgcttccacaaataaattgcagggagatagaaagggaacctctagattcaaaggtagtcaaaaggcatatcagtcaatctgaatgtgtggaccttatttgagccctgattcaagcagactgaaaatacgtatgacattttttgaacactactaggatatttgaagctattcaggaaatactgttacacttgtcggtgtgatgatgacttgtggttatgtattgagaagagcccttttctcctagaggaacatagtaaagatttacagagggaagggtgtgatgtcttggatttgcttccaagaatcaggaagaaagggtagtggaggggtcacagatgaaatgagatgaaaccgtggaagctgagtgatgggtaccggagttcattacactcctccctctactttagtagatgcttgaagttttgtggaaaaaaaaaaaacccaccccgacatttgaaaagagtgcactgaagcatcatgcattgatgaagtctgggggcatctaggaagagactgttgacattgccaccaaggaaattctgggcacagtcatgttgaggtcaactgcaagatcctcatccggtttggtctgggcactctgtcactaattggcactcggtcctggccaccccacagcgggatgtttattggcaatcaaggagctggcgtggcttctggaaaccacagcctgcacgatgttgttgttttttgttttgttttgttttgagacaagagtctcactctgtggccaggctggagcatagtggcgtgatctcggctcactgcaacctccacctcccgggttcaagcgattctcctgcctcagcctcctgagtagctgggactacaggcatgcgccaccaagcccagctaatttttgcatttttagtagacatgaggtttcagtatgttggccaggatgatctctatctgttgacctcgtcatctgcccgcctctgcctcccaaagtgctgggattacaggcgtgagccactgtgcccggcctgcacgatgttcttgaaggcaccaaaggaatttggtttggaggagggacctggggagagggccaggagtggggcggtcactggtgtcctcagcttctttgagggcctgcgtgcaaaactttcggattgggcaactcccaatggcaggactcgggctgccctgatgagagctttcagctttctgttgggcctgagccctctctcccaggacggctccgaatggaaagatggccctgggcgccaatgcagcctcttcccccagaggtgtgcagccaaaagccaagtggccccatcatggagtttgacaaaatgactgctacaggctttgccgaccctgaagttctagaagtttcttgccctctgctgctgtcttccccaccctcccgcctcccttgggtgtgtcagtatgttgcctcctttcggcttcaaatgtaaagacagacccagctcttccccaggaagctgagggactccgtggaatgagaggtcattcgctagcagtgaacacactcatctacgggccacaaagaaagagcacataaactcttccccggcctcggattctcaaaggggctgggaagcctgtgtggcttgagaatgcatattcgatattatggtgtccttctagatttggagaggaccccccaattcatgtcatcagaaaagctatgggagaaagccttctctgctggtggggacgtgcagaagagagattcccttgggcggggcaggtgggtggccggtggcccccagtgcagccacccagcctccacgggcctgctggctcacctctggtggagttgctgttggtgtaggtgaagatgctggactgggtgctgtcctcatagctgtcctgcggatggcggcctgcgagcctttggaggctccactgctgggccatggctatggaaagccctgtccccgacggcagccggccctggcgcatcacctgagggtcacggcgctttatactggcctgtgggatcagcccgggcctcttcaccttaaaagctcccaaaccctacactacctgatctcttaattgggcctgggacttagacctcctcctcccacctcttgctcccctgctcctgaggcgagcccgcaagggcggctcagagggatttgctgggaaccaaactcagacgccccacccatccccgccaggaaggtggcggtgactgtgggagccgctgtggccctctctgtgtttatgtgttctctgttcccttctactgtcctgcgtccgcctttggggcaggtggacccacgggtcaggatttgcagactggggggtgggtggtgaaactgctcagagcccgaatcctcctttctcatgtggttctcttgaaagcccagggagactatttagggccgaggcctggaaccggatcctccttgcgaggccagccatgtccgtgggcccaaacgggcgagatttgtgccggggggctcctcctccagtgtagggggggcagactgactgcgcacatcctgctgttggcttccctcctcccccttgccccccatgagctgtaggtcctttggccgccagggtgcacatgcagtgcccacatcagcccacggcagcgcctgctcacgtctcccttgccctgagttcacagccttgccttgggcttcaccaaccacaggccccccgtcgacagagtgtccagacaggccatctctgctgtccctgtgtccccacgcttcgcaggggcacggatgacctgttagtgcccaactccgtagcctcgcctcagtttccaaccaacgggccctgtcccctccacggcccacccgccccagcgcctccccaggagcacatcccctttcacggcttccatcagctcccagctcctcagtccccaaatccagctccttccaggtacctccttttgggtttattccttaagcttaggaaagccaaggcgtgagcttgtggcctcttgtccctgttctcagagccacgattctccagcattcctggctcacacttacactcctggcagcatggcttctgctgcaggcacaagggggccctggctgccaagctgaaggccagggctgcatggagccccagcctggctacccatagcaagaatggcttttaacatctgtcgctgcctgccacgtgctaggtgccaagctaggggccccatgtggaagagaagacgagtcctggccacagacttgccagggcccattcacagcctagaaaggtgagctttttccccaactctggcacttctacacctgtgtacccaagagacttgaaaatgtgtgtccacacaaaaacccgtacatgaatacaaacagagcactgttcccaacaggccacatggtagaagcaacccaaaagtccagaagcagatgagtgggtaaaaagtggcctgtctgtacaatggagtatcatttggccataacagggaatgaagggctgacctacgctacaacgtggatggacctggagaacagcatgctcagtgagcgaagccagacacaaaagaccacggagcgcatggctccatctctgtgaaatgcttagatagggcaatccagagacacacaaagcagaggaatgggtgccaggacaggggagggagggaaatggaggatgacttcttaatgggtacagggagtgctttatgggtgataaaaatgtcctaaaattggattgtgatggcgcagccactgtggaaaacagtttggcagctcctccaaaagttaaacgtagaattcccataggacccagcaaccgcactgctgggtataggcccagaggaatggaaggcagggtctggaagggctgtttgcacacgcatgttcacagcagcgtgattcacaacagctgaaacatggaagcaacccgtgcccatcaatgggcaattgggctggacatggtagctcatgcctgtaatcccagttctttgggaggccgaggtgagaggatcacttgag

SEQ ID NO: 1563944 - DNA, 4001 bp, Homo sapiens
tgaacgacttgcttgcttccacaaataaattgcagggagatagaaagggaacctctagattcaaaggtagtcaaaaggcatatcagtcaatctgaatgtgtggaccttatttgagccctgattcaagcagactgaaaatacgtatgacattttttgaacactactaggatatttgaagctattcaggaaatactgttacacttgtcggtgtgatgatgacttgtggttatgtattgagaagagcccttttctcctagaggaacatagtaaagatttacagagggaagggtgtgatgtcttggatttgcttccaagaatcaggaagaaagggtagtggaggggtcacagatgaaatgagatgaaaccgtggaagctgagtgatgggtaccggagttcattacactcctccctctactttagtagatgcttgaagttttgtggaaaaaaaaaaaaacccaccccgacatttgaaaagagtgcactgaagcatcatgcattgatgaagtctgggggcatctaggaagagactgttgacattgccaccaaggaaattctgggcacagtcatgttgaggtcaactgcaagatcctcatccggtttggtctgggcactctgtcactaattggcactcggtcctggccaccccacagcgggatgtttattggcaatcaaggagctggcgtggcttctggaaaccacagcctgcacgatgttgttgttttttgttttgttttgttttgagacaagagtctcactctgtggccaggctggagcatagtggcgtgatctcggctcactgcaacctccacctcccgggttcaagcgattctcctgcctcagcctcctgagtagctgggactacaggcatgcgccaccaagcccagctaatttttgcatttttagtagacatgaggtttcagtatgttggccaggatgatctctatctgttgacctcgtcatctgcccgcctctgcctcccaaagtgctgggattacaggcgtgagccactgtgcccggcctgcacgatgttcttgaaggcaccaaaggaatttggtttggaggagggacctggggagagggccaggagtggggcggtcactggtgtcctcagcttctttgagggcctgcgtgcaaaactttcggattgggcaactcccaatggcaggactcgggctgccctgatgagagctttcagctttctgttgggcctgagccctctctcccaggacggctccgaatggaaagatggccctgggcgccaatgcagcctcttcccccagaggtgtgcagccaaaagccaagtggccccatcatggagtttgacaaaatgactgctacaggctttgccgaccctgaagttctagaagtttcttgccctctgctgctgtcttccccaccctcccgcctcccttgggtgtgtcagtatgttgcctcctttcggcttcaaatgtaaagacagacccagctcttccccaggaagctgagggactccgtggaatgagaggtcattcgctagcagtgaacacactcatctacgggccacaaagaaagagcacataaactcttccccggcctcggattctcaaaggggctgggaagcctgtgtggcttgagaatgcatattcgatattatggtgtccttctagatttggagaggaccccccaattcatgtcatcagaaaagctatgggagaaagccttctctgctggtggggacgtgcagaagagagattcccttgggcggggcaggtgggtggccggtggcccccagtgcagccacccagcctccacgggcctgctggctcacctctggtggagttgctgttggtgtaggtgaagatgctggactgggtgctgtcctcatagctgtcctgcggatggcggcctgcgagcctttggaggctccactgctgggccatggctatggaaagccctgtccccgacggcagccggccctggtgcgtcacctgagggtcacggtgctttataccggccagtgggatcagcccgggcctcttcaccttaaaagctcccaaatcctacaccatctgatctcttaattgggcctgggacttagacctcctcctcccaccccttgcttccttgctcctgaggcgagcccccgggggcggctcagagggatttgctggaaacctgtaatcccagctactgggaggtcgaggcaggagaatcgcttgaatctgggaggcggaggttgcagtgagctgagatggcgccactgaactctagcctgggcaacagaccaagactctgtctaaaaaaaagtggctgggcacagtggcacacgcctgtaatcccagcactttgggaggccaaggcgggtagatctcctgaggtcaggagttcccgaccagcctgactaacatggtgaaaccccgtttctactaaataaaaaacaattagctgggcttagtggcaaatacctgtactcccagctacttgggaggctgagacaggagaatcgcttgtacctgggaggtcgaggttgcggtgagccaagatcgagccattgcactccagcctgggcaacaagagcaaaactctgtctcaagaaaaaaaatttaacaggccacctaattgcgattaaaaaaaaaccaaaaccctgaatctgtttagattcccacttgcagggtatgtgacatcaccttctgccacattctcgccagccctggacattgttaggctttttaatttttggcgttctggtggatgagaaaatagtatttaattgttgcttttcgcttactattcccggatcaccttgcaattacatgttttattatacgtttactgtcttttgtttttcgtcgtctgagatgtccgtggctaccctttaatgtctttatattgggttatttgctcttagtttactgatttgcagttctttatatattgtgttgattagccctttatctatcagatatgtttcaagcctttttttttcttgtttgcttttatttatttattttttgagatggggtctcagtctgccaccctggctggagggcagtggtgcgatcacggcagcctcgacatccccgggatcaagcgatcctcccgtctcagcgtcctgggtagctgggactacaggtgtgcaccaccactccaggataattgttgtattaattttttttttaatagagacggggtttcgccatgttgcccaggctggtcttgacctcctgagctcaagagatccacccaccttggcttccaaagtgctgggattacaggcatgagccagcacacccagcccttgttttattttctccccctttctttctttcttttttgtttttgttttgattaatcaagtcccatttttttctcctcttggttatttggatgttatgtacatatgtagcttcttttctagtgattactttttttttttttttgagacaatctcactcttgtcagtcaggctggagtgcagtggcgcagtctcggctcactgcaacctccgtctccccggctcaagcaattctcctgcctcagcctccccagtagctgggattacaggtgtgtgccaccatgcccggctaatttttgtatttttagtagggacagtgtttcgcagtgttgaccatgatggtctcaaactcctgacctcaagtgatccacccgccttggcttcccaaagtgctgggattacagctgtgagccaccacgcccggcccggccccccccccccgctcttttttttttgagacaaggtctcactctgtcacccaggttggagggcagtagcacagtcacaggtcactgcagcctctacttgctgggcacaagtaatcctcctgcctcagcatcctgagtagctgggaccacaggtgcacaccactgccctggcaagacttgctttttaaacagttgttgaattcttacatttgtcagtggtgtactgaactccttcatgtctaaaaatgtctttagtctaaccccacagttgacagttggggtgtagaattttaggctgg

SEQ ID NO: 1563945 - DNA, 4001 bp, Homo sapiens
tgaacgacttgcttgcttccacaaataaattgcagggagatagaaagggaacctctagattcaaaggtagtcaaaaggcatatcagtcaatctgaatgtgtggaccttatttgagccctgattcaagcagactgaaaatacgtatgacattttttgaacactactaggatatttgaagctattcaggaaatattgttacacttgtcggtgtgatgatgacttgtggttatgtattgagaagagcccttttctcctagaggaacatagtaaagatttacagagggaagggtgtgatgtcttggatttgcttccaagaatcaggaagaaagggtagtggaggggtcacagatgaaatgagatgaaaccgtggaagctgagtgatgggtaccggagttcattacactcctccctctactttagtagatgcttgaagttttgtggaaaaaaaaaaaaacccaccccgacatttgaaaagagtgcactgaagcatcatgcattgatgaagtctgggggcatctaggaagagactgttgacattgccaccaaggaaattctgggcacagtcatgttgaggtcaactgcaagatcctcatccggtttggtctgggcactctgtcactaattggcactcggtcctggccaccccacagcgggatgtttattggcaatcaaggagctggcgtggcttctggaaaccacagcctgcacgatgttgttgttttttgttttgttttgttttgagacaagagtctcactctgtggccaggctggagcatagtggcgtgatctcggctcactgcaacctccacctcccgggttcaagcgattctcctgcctcagcctcctgagtagctgggactacaggcatgcgccaccaagcccagctaatttttgcatttttagtagacatgaggtttcagtatgttggccaggatgatctctatctgttgacctcgtcatctgcccgcctctgcctcccaaagtgctgggattacaggcgtgagccactgtgcccggcctgcacgatgttcttgaaggcaccaaaggaatttggtttggaggagggacctggggagagggccaggagtggggcggtcactggtgtcctcagcttctttgagggcctgcgtgcaaaactttcggattgggcaactcccaatggcaggactcgggctgccctgatgagagctttcagctttctgttgggcctgagccctctctcccaggacggctccgaatggaaagatggccctgggcgccaatgcagcctcttcccccagaggtgtgcagccaaaagccaagtggccccatcatggagtttgacaaaatgactgctacaggctttgccgaccctgaagttctagaagtttcttgccctctgctgctgtcttccccaccctcccgcctcccttgggtgtgtcagtatgttgcctcctttcggcttcaaatgtaaagacagacccagctcttccccaggaagctgagggactccgtggaatgagaggtcattcgctagcagtgaacacactcatctacgggccacaaagaaagagcacataaactcttccccggcctcggattctcaaaggggctgggaagcctgtgtggcttgagaatgcatattcgatattatggtgtccttctagatttggagaggaccccccaattcatgtcatcagaaaagctatgggagaaagccttctctgctggtggggacgtgcagaagagagattcccttgggcggggcaggtgggtggccggtggcccccagtgcagccacccagcctccacgggcctgctggctcacctctggtggagttgctgttggtgtaggtgaagatgctggactgggtgctgtcctcatagctgtcctgcggatggcggcctgcgagcctttggaggctccactgctgggccatggctatggaaagccctgtccccgacggcagccggccctggtgcgtcacctgagggtcacggtgctttataccggccagtgggatcagcccgggcctcttcaccttaaaagctcccaaatcctacaccatctgatctcttaattgggcctgggacttagacctcctcctcccaccccttgcttccttgctcctgaggcgagcccccgggggcggctcagagggatttgctggaaacctgtaatcccagctactgggaggtcgaggcaggagaatcgcttgaatctgggaggcggaggttgcagtgagctgagatggcgccactgaactctagcctgggcaacagaccaagactctgtctaaaaaaaagtggctgggcacagtggcacacgcctgtaatcccagcactttgggaggccaaggcgggtagatctcctgaggtcaggagttcccgaccagcctgactaacatggtgaaaccccgtttctactaaataaaaaacaattagctgggcttagtggcaaatacctgtactcccagctacttgggaggctgagacaggagaatcgcttgtacctgggaggtcgaggttgcggtgagccaagatcgagccattgcactccagcctgggcaacaagagcaaaactctgtctcaagaaaaaaaatttaacaggccacctaattgcgattaaaaaaaaacaaaaccctgaatctgtttagattcccacttgcagggtatgtgacatcaccttctgccacattctcgccagccctggacattgttaggctttttaatttttggcgttctggtggatgagaaaatagtatttaattgttgcttttcgcttactattcccggatcaccttgcaattacatgttttattatacgttactgtcttttgtttttagtcgtctgagatgtccgtggctaccctttaatgtctttatattgggttatttgctcttagtttactgatttgcagttctttatatattgtgttgattagccctttatctatcagatatgtttcaagcctttttttttcttgtttgcttttatttatttattttttgagatggggtctcagtctgccaccctggctggagggcagtggtgcgatcacggcagcctcgacatccccgggatcaagcgatcctcccgtctcagcgtcctgggtagctgggactacaggtgtgcaccaccactccaggataattgttgtattaatttttttttaatagagacggggtttcgccatgttgcccaggctggtcttgacctcctgggctcaagagatccacccaccttggcttccaaagtgctgggattacaggcatgagccagcacacccagcccttgtttttttttttttctccccctttctttctttcttttttgtttttgttttgattaatcaagtcccatttttttctcctcttggttatttggatgttatgtacatatgtagcttcttttctagtgattacttttttttttttttttgagacaatctcactcttgtcagtcaggctggagtgcagtggcgcagtctcggctcactgcaacctccgtctccccggctcaagcaattctcctgcctcagcctccccagtagctgggattacaggtgtgtgccaccatgcccggctaatttttgtatttttagtagggacagtgtttcgcagtgttgaccatgatggtctcaaactcctgacctcaagtgatccacccgccttggcttcccaaagtgctgggattacagctgtgagccaccacgcccggcccccccaccccccgctcttttttttttgagacaaggtctcactctgtcacccaggttggagggcagtagcacagtcacaggtcactgcagcctctacttgctgggcacaagtaatcctcctgcctcagcatcctgagtagctgggaccacaggtgcacaccactgccctggcaagacttgctttttaaacagttgttgaattcttacatttgtcagtggtgtactgaactccttcatgtctaaaaatgtctttagtctaaccccacagttgacagttggggtgtagaattttaggctggg

SEQ ID NO: 1563946 - DNA, 4001 bp, Homo sapiens; identical to SEQ ID NO: 1563945

SEQ ID NO: 1563947 - DNA, 4001 bp, Homo sapiens; identical to SEQ ID NO: 1563944

SEQ ID NO: 1563948 - DNA, 4001 bp, Homo sapiens; identical to SEQ ID NO: 1563945

SEQ ID NO: 1563949 - DNA, 4001 bp, Homo sapiens; identical to SEQ ID NO: 1563945

SEQ ID NO: 1563950 - DNA, 4001 bp, Homo sapiens
gtaattggacaaagtttattgtatacaaattatgtcatgataaagtggattaaaatatcactacattagtcatctctagggtttcttatgcctttagatatagtaagtgggatctggaatcaaccagacctagatttaagtactggctctgtggccatgggcaaatcactcagtttccacacttctaaatatggatggaaaatagtgccatggcattgaaccactgtgtgaattctatgtgataatagatatagagagctttgctcaacccctagcgtatcataagttctcaataaatggtagctgtatttataattctatgattctaaataattttacagacttacttttacaaattcggaggtggcatatatatgatctaaattctaattttgactccattatcaattatgtatgactttagatgagtctcaatgtctactctgtttcctcattgttaatacagagggaaattgtggtggtgtttttaccaattccataggaaaattagggatataaaatagactaatagattagaaagatgttttgaaaaacaaaaagcaaaaataaaacactctacacaaatgtaggaaatagctatgataatttttctcatgattccaagattaagtgaaacaaggagattgtgcttacgtaacagggcttaccctcagtaaagttgtaaagtttctgacatttgtcttctggccttttattataccattctttgtcttagtttccaatttcagttatgcctcacctgctgtcaacagttacagaagattctcttgctgtataggtctcttctgtcagtgagaaaattactctgataagttcatttacctgaaggtgagtaacctaatgggtagccactaacaatattctatgtaaagaaagagcaaaaataatacctctaatggcaattcaagtctcagtaggaataatatttggggtgggagcacttcctgaagcttctcatatgtcaatcacttccaaagataaagtcagatcctttaaaccattttctccatcagggacgttgtgttattttagacgtttagaagcaaagaaggctcatgtccttttcaacataactttccttattgcccgtttaacatctttttttctcaggctatatatcagggggttcaacatgggtgtcaaagctccataaaacactgagataaacttgtcctggtcagggtaggacttggactgagttttcatatacatggagatggctgacccatagaagattgtcaccacggtcaggtgagagccacatgtggtaaaggccttgagcctgccctggagtgagcgaatccttatgatagccatagcaattcgtatgtaggagaggagaacaaacccaaatggtagcagcagggtgaagatactggtgatgaggatcataaattcattgaggctggtatcagaacaggtcagcttaatgagggagagaatctcacaggcaaaatggttgatgacattagccccacagaagtgaagcctcagggataggatgagcatggcagtgagcacaagtgatgtcccccatgaggtagcaaccaagcagacacatactgggccattcataaccactgaataacgcaggggattgctgatagcaaccacacggtcataggccatggcagccagtaggaggcactctgctgtggccaaagccaaggagacactcgtttgagccaaacatcggggataagagaggtagggatgggtagagaaacaatgcaccaaagcctggggcatggaagctgttccataacaaaggtctaagaaagacaggttactaaggaagaagtagattggagtgtggaggttggggtcaaagtgaataagaaagatcataaatccattccccaacaatgtgctgaggtaaattatcagcactaatgtgaaaaacgtgtctctccattgaggatagttagaaatgccaataaggagaaactgaaacactgctgtgacattgtccatggccatctttccctcttgccactattcattaaatggatgccaattggctacttagtgttacctgaaagaatgggaataaagatggagggtgtgagaaaggtggaaagaattagggtgtgcaggatcattatctttgtccttttcagaagaatgggacacaaatggaatagatatctataatgggaacagaggcaaagctagatatcctccctcaatcctaagaaaatggaaagttccttatctttttgaaaatagttatatgaaaatttctccagccctcctccactagaggtcttcttgaataatttttcctaactaagaagacaggaaaggtaggccatcttcctgactttctcacgtcattttccaagataaatctgatatgtagacatggttgaatctcagttagcttgagttattaatctcaaccaacagggtaccttctgacacatgtcttagctaaaatattgtctatgtttgggatgtctctcactcctagattgtgcatgccttcatttttccatagttccagaatttaccacggtgcctgacatagagtgggtgcaaggtagctctttgacctgagctgatattatgtagatgtagtagtgaggtctgggaggaccctcttctaatatcccctgctgaagttacatttctagcttctcctacattttctattctgttgtcgttgagccccagttaggagtatgaaaactgaacatgaagtttctaaaagtgtgggtggtaaggagagggtctgagtacgtagcctcactgaaaaggctctcttatcccatcctcacccatctctttcccctagccctgcttcattttttataacacattctaatacctgaagttatattaataatttgattacttgcttattatttgtctttcactcaaatgtgaatttaataacagggcccttgtctgctgtttactggtgtattcctagaacatagaacagtacctgggggatcacaagaacccaataggtagtaaatgaatatataaagtcctaagcattcagagctgttattcagaatctacctactcctcttgccacctgcactgccattctttattccaaggcatcatcatcattcacctggatttttccagtaacttcgtcattggttttcctgtttctagtcttcttcccatccagttcagatgattcagttgaactgtaagtgaaatcaggtcactcttccattaaaaaatttattctatttttattgaggtatgactgatatacaaaaaggtacacatattttatgtatacatcttgagtttgaagataagtatatactcatgaaacggccaccataaataatgccgtaaatataacaaacatccctaaaagtttcctccttctctcttttatctttgtaataagaacacttaacataagacctactctcttaataaaattttaagtatacagtatcatattgttaactatagattctcatttcagcctctctaaacaccaatctccttactatgacctacgaggccctatatggtttgcctcccaatcacctcctctctgaacgcatctcctaccaccctttcccttgctcactttgctccagtcacactagcctcctcaccattcctcaaatactcaaagcccatccctttcacagagcctttgatcctgctgttctatatttgtaaaaactttctgctccatatttatgaaacccagatccttgcacagctcaccttctcaattccctcaggtttttacttacaaggcatcttttcagtgtatccttcctgggtcacgtcatctaggaattcatctccagcccctgaaattgcattacatcctttctgggtcacctcgtctgggagttcatttctagccattgaaattttatatccccctttcctgcattattttctccttagaactacatctagcatactgtatagcttatctattaattatgtttattgcttgtctctatcaactagaatgtatgctcagt

SEQ ID NO: 1563951 - DNA, 4001 bp, Homo sapiens
ttaaaaatcaattatcattgtagttttcaaagaacagtataagtttaagttccaggctttgattattcattcagttgggtgttttcaactcagtgatgattccttgttaaaagctatagaataaaatttcatcacatttttatctgatgtaactcagtgtaatggaatactaaaataaataatgaacattggtctgtcactttttaggtttcatatacattatctcactgattatcactagactatgaattcatgtagctggagtgaagtatatttttacgttatttaccaccgtatctccaactccttgatagggcatggcacaaagtagatgttcaattaatatttgttgaaggaatgattgaaccaccctgtaatgtaggcagaacaggtattatccttttttccattttataggtgaaacaacattgcagaaaagtttagtgacttgttcaaggtcatatagccagcaagggtggtgctaggccttgaacctagttctttaaacttttctccaggttgttatctgatctaactctggcactaattggtaaaccccacagtcattctgggctttttttaccttatacttgaaataagagaagtgaaacaatttcaattgaatatttgagctgtttaagaaataaaaatcacatttcctcccaaaataaaataagagaaggcattatttcatggctctgaggtctcaactaggtctaatattatgggcttaatttacaatattatttacggtatcattctgacttctgagagccttatattcactaaagaagtagtgctaatggtggagtccagagaacctagaactgtcagctgctccagagaagggatgcccagggccactatcacaggtccacttactaataataaaagaaaacttcagaccaaaagcttcttccttaaggaagtcgggaaggttgctttaggttataaagaggctctgaagaaattctgtctcattattaacatgaaactgttctagaagctttctggtagtgatgtctccacctgatggccttgtttacccagctaactcatctcccctgttcccttccccttcccctttcccttccccacagacacactccatgccatcttcaaccacatgcacaatggttgtaagcaggatgtaaacttttataatgaattcattggagacagcctgctttgcacatgccagcaagaatttcagggatggttttcaaacttgtattttatttaaaaatgtcgttatccccatcacatataaggcgtctttgcagcagctttgtcagtatttattagttgctacttggagtctgttttttcaaaagaactgattagtctcaacatcttagagtgatatattgttttatagcaagcccaaatataagctgaaggccctgtgtaaattacttcccctaatttccttcagccacttgctcgtttagaatgtacacaaacgaaagatgtcaagaacgtttagtctgttatacctgccatgggtggcttcccctacagcacacggtgaaatctgattacagaaggactgagaaatgaaagctttgctggaattagaggcagctgtctcaaataagagtaaagcagagcgtggcactacattctgcagaaagaggccttactgcagaatatagttttatgcatcaccatgattcctaaatcaaacccaagtctctgaccatcacttaccgaaaatttcgaaccatgaagttgtgaccatttctaaaagctgcattgtttaacaggatcctcagattaaacagcatcttcttttaattgtgtaaaggacgattctatgcccttgaaaactccacagcaagttagccagcgggggccacctaaaaactaagaaatgtgttcagttgcagtgagggagcaaaggtaatatcacccttcagcttccttatcaaagtcccctggttagagatactgcagggcagggtgtaggagcatttgaactttatgccaagctccaccgctgtgtattttttttggaagaaatcctgactcttttattgcctggcctcctcatttttcataatatatttatactgtcacacgcatgtacaaaatcaattgacaagtactcattgaggatataatatatgcaaggcactgcggtaccggctgctgtgaaggtgagtagaagtaactcactcagaaaatgcaaattggcactgcaaaaacacagatgtagatgtgacagtcctgagtagtactatttccatttatttcacttttctacctctaattgccagtctttccacaaaaacaaatagaaagaagtgccctggaagctattttgggggtgcaagatgatagagaaggtatagtaaaaatatctcagtcctggagctccctttgtgccttgcacataagtcttcaataaagaaataattgctggccgggcacggtggctcacgcctgtaatcccagcactttgggaggctgaggcgggcggatcacttgagcccaggagttcgagaccagcctggccaacatggtgaatccccgtctccactaaaaatacaaaaattagctagacgtggtggtgcacacctgtaatcccagctatttgggaggctgaggcatgagagtcgcttgaacccgggagacagaggttgcagtgagcccagattgcaccactgtactccagcctgggtgacagagagagacactgtctcaaaaaaaagaaagaaagaaagaaaaagaaaagaaatagttgcctattgattctaacagcacctgacagtcagtacaagtgggaagtggggataccatatgctcttcccctagcagcctattcagatcactaaggggccatctgcaacttcacatttattcatttatcctcagttagaaatcaggtgattcaaagtcaattctgtatcagataccgagctgcactgaagtttcagagagggaagatgacatcatctttgcagagttcacagttcagtaaaggtggtatgatttataaacaaatatccataatacaagcccataggagaggtccagacaaagttgtctggcttcgaagaagcgggagccctctaaggtaggaagggtaggaggaaggagaggaggggcaggggtagggctgcctcttctggtcaatttatatgactttagcaaacccaagtaaatattttccagaagtttgtggaataccaaaaagtgttatttaaagaccaactatggccacctcaggagccgagatgtttgtgatgtcataattaatactagtagagaaataaatattgtcaccatttccttctacttacagagaatgatgtgagataaagtgaggggaaagactgacatttcccaacctctaccaaatcttccattctggaaaggatattccaggcagaagcaactgcttgcaaaggtacagaggtgagaagggagagagtgaatttaaaaaacataataaagcatctttgaagaggcaaacaaggccagttattgaataggtttcagagagcaaaagcgctccacataatacaggagtgaaattgaacgtttgcatggagcctgagggagatgaggccaaaccacaggctaatataaagcccatagcttgaccccatatcttcactgaactgtgctagccatacacacaactcatattggtaatgcttggggagaaatcaagaagtgtctgcagttccatgctagagagtacaggcagcatttctgagatgccaaagcaactcacaaaccctcctaatgctacagatgcaggagctcaaagccagagggaactaaaaaaaagttaagataccaataactcccagagggattggaaaaggggagctgcatcacaagtgggatgaagttaaaagcaatttcactgaatctcaaaaggcagggcatctcaatgaacttgttgaggggtagatttcaactacccagcttctgctgattatgtcacatgtggagtctgttttactttacaggctttgatgttcatcctc

SEQ ID NO: 1563952 - DNA, 4001 bp, Homo sapiens
ccatgttgcccatgtcccctgagtagtcgtctcaggctcaagttcccaaggcatgggtcgtatgtccctgacaaaaagcttaggcccaaggtgggagggcctcaaacccctgttacagaggggaaaatgggatactgtatccccaaggtatgtttcagttccttataattggggtaaaagggtcacatatgctcgtggggtggggagtctcagatccccaaaaccactcagacaccagccttgagaagaaggatctcctaaagacttcaccttgtctgagacctttgcagcaggacaccaggcccctgaagaggcctcagactcggtctctaaaaacctcagtccataagcaggtggatcttaggccctaggatccaacgctgtgagtctcattttcctgaagaaaggttcaggcccctggtgggggtgctgagggcccatctcttcttacaagaagcttaagatcctgaagcggttcaggcccttgtctcccaagaggtaggtctcaggccactgataggaaatgcagacctttgtcactcagaaaggagataagtaaagctgctggtcattgggtgttggttttggtccctgtccccaagggcaagggaatcatatctccctgtgaaaagtcttacatccctggaaaaagcttagaagatccctatccttaaagggggcgtgtgtgtgtgtgtgtgtgtcaggaccttgattctagaagcaggactctcaggcccctgaagacagacttaggacccttgaggtctcaggtctggctattcagtggtcctgtgcagtgttacccagcgaagcgggagaggattgtcctatatgcagagtgtctcagactcttgaaagggcttaggctccttggggatgttcagccccgatctccgaggtctccaccttatttgactttcctggaaggggaatctcaaacttctatcccagaggaaaagagctcttaagccactgaacacatacctaagtctcttgggagacctgagactcctactcaagaggggcgcgatcctacctgtatctcttggagaattcccacctattggccctatatgatgaggtcccagggactggaatgacgactatagaccttaaaagagacctcggatctttaagtctgacaccttaccgtaggcctctagccccaaaatcctggaggggaggaaagaaggtgtctcacatccctaccgccagagaagactgtcaggcccagtgaaaacgcctagatcccttggggcgatctcaaacagccttccttgagtcccttcacagtctgggggtcccatctgccgtggccgctcacccctcaccccacagctcttacctgctcgacagtggcagggtccatagcctcgatgcgtgctgcagccgcctcatactcgtcctcactgttgtagcctgcgccgacctcctcacgctcgggactgcccccgccaaccgcgccaaccccgggagcttgacgtcgccgcttgctgtgcccaggcccggagcagcagccgcccacgcctacggcaccacccacacccaccaccacgcccgcggcacccacacccgccgccgctgcgcccagcgcgtcgccgggaccgccgccgggaccacctgggcccccgcaaggaggtggagaagcctgttgtggccggggacccgccactgcaccaggcggcacggccagcgcccagcgatgaagagcgcccggcggtcctggtagcgggccttgaggcggtggcgaagctcgcggacgggcccccacgacgccggagtcacggtcgcgatcgccgccgcccacgcccgtgccgccgccgcccacgcccacacctccgccgcgccgcggcgccgggggcatcggcccgggcggcggcggctcgttggcggggtcggcgtcgggaggcggcggcttctttttggggagtatagtcatggctgcactgccgagtaccccccaacaaacccggcgcggggcacgccgggagagaacccggatgagggggctagtgtagtgcgcgaggcacgacgggaacggcgagacccggataaagggatcgcggcaccggttcgagaaccctcggcggcggaggaggcggcggcggcggcggcggcggtggcggcgcgcgggtcacgccgagaggagaacccggatgtaaagtccaagatgaaggcagtgcggcgagtttgtcttagccttctctccaagtccagcaagtttattgctacgcttgttccggccttctgcttcaaaggaaacagaaccaaaacaagcacctcttcgctccgccccctcgcaggttcttgcactaccgggtggggccccggggcgctgcgcacgcgcgccagggcacagccccgccccttactcggaagtacgtgggcaaaatcgccgccgccgccgccacaacaattgcaacaccaaccaattgagcagctgcgtgggacctcgacgacgcccacgggccaatcacaggcgagtgctcgccctccggtgccctccgtctcaaatttcagtcaaagtcgacaccctggttcccagcctttctccccgtcagttccgtcttgctcttcacttttctccccgaagctctgacctgcaggcgtcggtactgcggacggacagcgtggcctgtcccacgtacgacaggaaaaacacctcccctccaggattccaacttgaacgctgtcagccggaatgactggaaaacatcaacactcccgggagcatagctggcccctgtagcgtcacttccggtcccacccacctacaaatacccttccgggggaggcggacaccgcttcgccccggcaacagcctgagttctgcggtgattggttaagagacgccgtcactcgcggcataccgaccaaccttgggacagacaggcgccgtggggacagtggttgtttgggaaacagacacgccttctctggcaccacagcactctcggcctcgcgttgacctccccgcccctatggctagtgcgcaggcgcggcccagcctttttttttttttttttttttttttttcctaattgagacaggggtctcactctgtcgcccaggttggaatgcagtggcgcgatcatagctcactgcaaactccaactcccaggttcaagcgatcctcccgcctcagcctcccgaatagctgggaccacaggcgcgcaccactacgaccggctaatttttttttcacttttttgtagggacaaagtctcactatgttgcccaggctgatctccagctcccgggctcaagcgatcctcccgcctcggcttcccagagtgctgggattacaggcgttagtcaccgcgcctggccaagcccagcctttttctaaaactgagtttgcttgggtcgatcgaggtttatgaaagctctgtcaccagtcagcgtctcaaaatggggttggcagaatccctgctattgagtagctggagagctacacgctaatcctagctctgcccttcctgtctgagtgatctttgtcagtcatttaaaacccaccccgtcctcaatttttgttgttgttgtttacttttttatagaacgcttcacgtatttgcgtgtcatcctttcgcatagtgccatgctaatctctgtatcgttctaattttagtatatgtggtgcgaagtgagcacccatccttaatttctattctataaattggcaataattctaatccgaggatcagagattaatgcttgtgaagggcctggtgctgtgcccagcacataggaagtgttcaataaagtagtctgcatggtggtgcagtggaaggatcccaggctttggagccagaaagacctcagttccaggcacagatggaccattaccaactgtatgaccttgagcaagtcattgtgtcacttttgagattacccatgtgtaaaacaggaatgataatacctgcccagactacctcagggaatggttatggggttcagatgagctgatgaaccaagaaggtatttggagttcacttccagtc

SEQ ID NO: 1563953 - DNA, 4001 bp, Homo sapiens
cccttgaggtctcaggtctggctattcagtggtcctgtgcagtgttacccagcgaagcgggagaggattgtcctatatgcagagtgtctcagactcttgaaagggcttaggctccttggggatgttcagccccgatctccgaggtctccaccttatttgactttcctggaaggggaatctcaaacttctatcccagaggaaaagagctcttaagccactgaacacatacctaagtctcttgggagacctgagactcctactcaagaggggcgcgatcctacctgtatctcttggagaattcccacctattggccctatatgatgaggtcccagggactggaatgacgactatagaccttaaaagagacctcggatctttaagtctgacaccttaccgtaggcctctagccccaaaatcctggaggggaggaaagaaggtgtctcacatccctaccgccagagaagactgtcaggcccagtgaaaacgcctagatcccttggggcgatctcaaacagccttccttgagtcccttcacagtctgggggtcccatctgccgtggccgctcacccctcaccccacagctcttacctgctcgacagtggcagggtccatagcctcgatgcgtgctgcagccgcctcatactcgtcctcactgttgtagcctgcgccgacctcctcacgctcgggactgcccccgccaaccgcgccaaccccgggagcttgacgtcgccgcttgctgtgcccaggcccggagcagcagccgcccacgcctacggcaccacccacacccaccaccacgcccgcggcacccacacccgccgccgctgcgcccagcgcgtcgccgggaccgccgccgggaccacctgggcccccgcaaggaggtggagaagcctgttgtggccggggacccgccactgcaccaggcggcacggccagcgcccagcgatgaagagcgcccggcggtcctggtagcgggccttgaggcggtggcgaagctcgcggacgggcccccacgacgccggagtcacggtcgcgatcgccgccgcccacgcccgtgccgccgccgcccacgcccacacctccgccgcgccgcggcgccgggggcatcggcccgggcggcggcggctcgttggcggggtcggcgtcgggaggcggcggcttctttttggggagtatagtcatggctgcactgccgagtaccccccaacaaacccggcgcggggcacgccgggagagaacccggatgagggggctagtgtagtgcgcgaggcacgacgggaacggcgagacccggataaagggatcgcggcaccggttcgagaaccctcggcggcggaggaggcggcggcggcggcggcggcggtggcggcgcgcgggtcacgccgagaggagaacccggatgtaaagtccaagatgaaggcagtgcggcgagtttgtcttagccttctctccaagtccagcaagtttattgctacgcttgttccggccttctgcttcaaaggaaacagaaccaaaacaagcacctcttcgctccgccccctcgcaggttcttgcactaccgggtggggccccggggcgctgcgcacgcgcgccagggcacagccccgccccttactcggaagtacgtgggcaaaatcgccgccgccgccgccacaacaattgcaacaccaaccaattgagcagctgcgtgggacctcgacgacgcccacgggccaatcacaggcgagtgctcgccctccggtgccctccgtctcaaatttcagtcaaagtcgacaccctggttcccagcctttctccccgtcagttccgtcttgctcttcacttttctccccgaagctctgacctgcaggcgtcggtactgcggacggacagcgtggcctgtcccacgtacgacaggaaaaacacctcccctccaggattccaacttgaacgctgtcagccggaatgactggaaaacatcaacactcccgggagcatagctggcccctgtagcgtcacttccggtcccacccacctacaaatacccttccgggggaggcggacaccgcttcgccccggcaacagcctgagttctgcggtgattggttaagagacgccgtcactcgcggcataccgaccaaccttgggacagacaggcgccgtggggacagtggttgtttgggaaacagacacgccttctctggcaccacagcactctcggcctcgcgttgacctccccgcccctatggctagtgcgcaggcgcggcccagcctttttttttttttttttttttttttttcctaattgagacaggggtctcactctgtcgcccaggttggaatgcagtggcgcgatcatagctcactgcaaactccaactcccaggttcaagcgatcctcccgcctcagcctcccgaatagctgggaccacaggcgcgcaccactacgaccggctaatttttttttcacttttttgtagggacaaagtctcactatgttgcccaggctgatctccagctcccgggctcaagcgatcctcccgcctcggcttcccagagtgctgggattacaggcgttagtcaccgcgcctggccaagcccagcctttttctaaaactgagtttgcttgggtcgatcgaggtttatgaaagctctgtcaccagtcagcgtctcaaaatggggttggcagaatccctgctattgagtagctggagagctacacgctaatcctagctctgcccttcctgtctgagtgatctttgtcagtcatttaaaacccaccccgtcctcaatttttgttgttgttgtttacttttttatagaacgcttcacgtatttgcgtgtcatcctttcgcatagtgccatgctaatctctgtatcgttctaattttagtatatgtggtgcgaagtgagcacccatccttaatttctattctataaattggcaataattctaatccgaggatcagagattaatgcttgtgaagggcctggtgctgtgcccagcacataggaagtgttcaataaagtagtctgcatggtggtgcagtggaaggatcccaggctttggagccagaaagacctcagttccaggcacagatggaccattaccaactgtatgaccttgagcaagtcattgtgtcacttttgagattacccatgtgtaaaacaggaatgataatacctgcccagactacctcagggaatggttatggggttcagatgagctgatgaaccaagaaggtatttggagttcacttccagtcttaggagacaaaccatacaacaggttgactgaaagagaccatgggaaagctgttttgagtatagccttgcctcccttgagatactaaccctagttgaaattcttccctgaaaggtgtaagtaataaatgggctctaagtagtgttttctgctcatgagacttaataggaggggactttcacgtttaccgggcctgttgtgttcagggctctgtgccaaatgcctatgcacattatcacattgaatcttctcatgatcatctcactccagccccatatatttcactcactacacatctaaaactgaactcatgatagcaatcatggctacccttcaccaagtacttactatgtacctagcactgagtgctgacagctctgatgttccctttaccagggaatagcactcccatccagccgtcgtccaagccagaaactgggagtcaactttgactgctccctcttcctcaactcccacatgcctgtcaatcccaagtcctgccaattctgcctcccaaatctctagactctccaattctactgccactactctggtccaagccactgtcccctaccacctggactattataaaagcctccaccctacttttcttccttccaggactgtttctctatatccactctccacagccagaatgatcattctgaaacacaaacttcatcatgagttttctgtttaagtctttagaggtccccactatctttaggatgaagtttaaaattcgcgtcatagctt

SEQ ID NO: 1563954 - DNA, 4001 bp, Homo sapiens
taaaattaattaggaaccacacaagttttgatgaaaagaaaacaaaacaaagtactagcggatctcttgttcataacttgagacatctcctgagtagtctagcttaagtaaatagcaaaccatggcaatctttccccccaaaactcagcaaaaggccttcacaaggcattttgatcacataaactccaattttgtctaagtaatccaagacattcataggaaaacctgaagactccccgagctagtctactagatttatttttcccagaacacatgaaacttaacatttcctttttttctttttttttttttggagacggagtctcgctgtcttccatgctggagtgcagtagtacgatcccggcccactgcagcctccgcctcccgggttcagttgattctcctgcctcagcaccccaagtagctaggattacaggcccccgccaacctgcctggctaatttttcatttttttgagacggagtctcactgtcttccacgctggagtgcaaaggcacgatctcggctcactgcaacctccgcttcccgtcaagcgattctcctgccttagcctcccgagtatctgggactacaggtgcctgccaccacgcccggctaatttttgtattttttgtagaggtggggtttcaccatgttggccaggctggtctcgaactcctgacctcgtgatccgcccgcctcggcctcccaaagtgctgggattacaggcgtgagccaccgcgcccggccaatatttccatttttgtggtgaagttatacgcaacatgaccaaatcttagttggtgagggaggtaaaagacccttaagggcaagaagaggttagaactttcaaatttatgcccctctggtggtgcaatgcagagatttccctcatatttccggggaatttccctcgaatttcgtttcccaccctgtgaaagcagcaaggttaggaaagcgggggcggggcgggggcgggtagttttgattaaaaggaaggaaaagaaaaacagagaaaagcaaaaggggaaaataaactgagcctactgaggagatgcggcgacggcgacagtttcccggggctgctcagcgccttggggcctacaggagacgcgggagcacgcccccggcggcgccggcctcgagcggtgtcacggagttgtagtgctcgccgaggctgtaggcatagcgcaggtagaccaggatgatcggcttcttgacgtactcctccccgatgatcaaggtgggcgagtcggcctggatcacctcgatgggggtcttcaggacgtgcgacagggccctcagctccagctggcctccccatgccgtggtgcgcacgatgttgtcgcagtagatcatgaagtcgtcgtagccgaaggagtcgctggtctcggggttgctgaagaagggcaggaactcgtcgacgtgcttcttcatgtagctggcggtgcggcagcgcagcatctccacagacacgctgaacaccagctggtcttggatggcgcggtacatgcagtggccgtcggccgggatcgctttcatctccagacccctggctcccaggatggcggcgagcttctcctcctcctcgcgcttgaagccggccaggtgctccgacatctcagcctggaagatgctctcctggcgctccctctcctcggactccattctttctctctttctgtgggctttggaggagcggggaggccggttttccagattcatcttggccaggtcttcgacgacagattcaatgctactgtcgtcttggaacttctccagctcctgccggtgcttctgagccatctcggcctccatgcgggccacgtcttggagcaactgctttcttttcgtcttgtcggtcttggggaccgagttttttaagctccggatctgggcctgcagctcctgcctctcgcgttggtggcggcgcagtatgcgctgctgttcactcttcggatcatccatgatgttgaatggcaagcgggagttgaaatttgctggcagttcaagtaccgaacagaccagaagtcctcagcctgtcctaacggtcgctctctttcacctcaccggctctaaccgccgctctaggctcacctcagcctccgcttcccctcccccattcgcattcttctctgcctttggtcactgtgtctccatggccacgcccccgcaagtgctaggccacttgctgggccacccgcaaatgcccagtgctaggattggctgttgggagaccggaagtatgagcccattggaccccacagcaaaggtttttggcgggattcaaatatggccttcctgcaatgtgtgtggcagttgggcctgtagagtctttcgctgattgagagccgacttcatttccaagtctgcacacaatgcaggcagtagccatgcctgacagccacatgacagatactacaccgctgaatgtgctctaaccctggacttggcattgcccctactgttgaggaagcagtgcgtttttctccagtctttcaggtcccttcaccagggaaccattaacttgtgcatcagaacaaggacatttccttacattcctgcaaacacagtcctttcagtttactctttttttgaggggggggcgcggggaacggagtctcgctctgtcgcccaggctggagtgcaatggtgcaatctcagctcactgcaacctctgcctcccaggtccaagcgattctcctgcctcagcctcccgggtagccgggactacaggcgcctgccaccacgcccggctaatttttgtatttttagtagagacgaggtttcgccgtgttggccaggctggtcttggaactcctgacctcaggtgatttactcgcctcggcctcccaaagtgctggcatgagccactgtgcccagtcacaagtttttattttagccattttgataagtgtgaagttccctgatggctaatgatgttccttttttcatgtgctcatttgtcatctatgccatatccttttcagtaaaatgtttatgtcatttgcctattttctctctcttttttttggggggggtggagtctagctctgtcaccgagggtggaatgcagtggcgtgatcatggctcattgcagcctcaaactcctgggctcaggctcaggtgatcctcctgcctcaacatcctgagtagctgggactacaggcaccaccatacttggctaattttggggaattttttttttttttttttttttgccagatgcggtggctcacgcctgtaatcccagcactttgggaggccaaggtgggaggatgtcttgaggtcaggagttccagaccagcctgggcaacatggtgaagccctaactctactagaaatacaaaaattagccaggtgtggtggtgtgtgcctgtagtcccaactactcctgggggctgaggtgggaggatagcttgagcctgggaagcagaagttgtagtgagccaagatagcggcactgcactccagtctgggctcaagtggtcctccacctctgccttccaaagtgctgggattacagatgtgagacaccatgctcagcccttcatttgcctattttctttctctctctctcactctctttcttcctctctctctctctcttactctctttcttcttccttccttggtttccttccttcctttttttttctttttttttttgagacggagtcttgctctgtcacccaggctggagtgcagtggcatgatctcggctcactgcagcctccagcttctgggttcaagcaagtctcatgtctcagcctcctgagtagctgggactacaggcgcacaccaccacacccggatactttttgtatttttagtagagacagggtttcaccatgttggccaggctggtcttgaactcctgagttcaagcgatccccctgccttggcctctcaaagtgccgggatgactacacacaccaccatatccagctaacttttttttttttttttttttttttactttttgtagaaacggggcctcac

SEQ ID NO: 1563955 - DNA, 4001 bp, Homo sapiens
attgttagtgcttttagaaagtctcattttactataaacagctttgttctctttgcttgagccatgacagagagctatagtatagataggcagcctatcttttttttattttttttttgagccagagtcttggtctgtctcccaggctggagtgcaatggcacagtctcagctcactgcaacctccatctctcggtttcgagcgattctccagcctcagcttgcccagtagctgggattacaggcgcctgccactgcaaccagctaatttctgtattttttagtagaaacggggtttcgccatgttgaccaggctggtctcgaactcctgacctcaggtgatccacctgtctcggcctcccaaaatgctggaattacagcgtgagccaccaagcccagcaggctggcctgtcttttaaaaccccaactcacttatttcaaaccaaaacaacccataaatgtgtttattcatttgatgtcttcagatttgagtagtctgtacaacttgaactctacaactttcccagttgagccccaaaataaactgcatttggccaaagaatctgtgttcaacaggaaccattgcaaaaacaattgccccaaatgtgtgatctgattctgactgtagtttacaccattttccacctcagtatatctgcatatcacctactttcataagtggttaattttactgtgctgcaattgctaagagatagattctccaattaatatacatcataatgactccacacatccatttgaacaactgaaataaaaatattctcacttgcaggattcttggaactgagcctactcccctggaaagcacagccaaatctggtatcattctatccagccttatcctggttccaaatgatttggcacagtctcccttcagggactccttagctgaaagtctccttttgatttagtcatcttagctcagaaggagagaggtgctagtattcagagtaatagcaataataactgaaaaaatgagtgcctcactcatgggctttgctatccagtaaggctgaacttcggtcaaaattagctttcaaaggatcaaggaaccactctgaccagactctgaagtcatctgggatactttctcctttcctatcctaaaaaatggcagggtcacaaataaatttacagtattctctgggagatgcaaactgctgtaggaaaaggcaaacatgagtttaaagacacaggtcctagatccacctataccactaacaagctgagtgaacctaagtgtcttcacttcactggctctcagttttcctgactgtattgtgagggatttggatctctatgggccctttcagcccccagaatctattaccctgctttctactatttgtctcagtatctctgaaagctaaattttccaaagcaaggattttatacccaaaaatcttccttcacgatgcagctagataaattatacaccataaaaaattaaattgacttttattggccgaatatgtcaagttgtcccaatgagtctcactgaatatactcttcttaccactttgtgccatcttctctggtcccactctctaaagagccctcatcaaagagtgagctgcatcacagactccatgctcctggcataatgaagaggactgatggcattaacgttaactttggactctggtcaaactcaacagtaattatctttgctcctgttgtaagatgtctgagatgagaaaccagtgacaattttaatacagacactggccccacatccacctctgttctgatttttatgatcacaccaatcttcccacatgaaaccaccaatccccaggtgctaggcattaacttaccctggagcttagctgggataagcactcttgtttctttgcagggagtaaagggtagaaagctttactctggcggcatggatcctgctgataactgacacatttgttgttgaaagaggaagttgagtttatctggtgtctcaccacagaaaccttatttgcacaaatgaaaggtaagtcccttgagcaaatgacgttactcaaattttatttctttttatttcattggtgcagagaaattcaaatagcagggagtcagaggctatgcatactcacacaatggctatataacagccttcctcaccctatctccttccttgacaaccgacatatctagattttcactgattccagtaggttccatggtaagatgaaattttcaggaaaatctaaagagtgtttacctagtaacaagaaagctacagcttgtgcaagcctgaggggcaaaggctgaggaaacctaaaaaatacaagtcaaaattagaaacagtagaagtacctttgcttaagttgttccctccatctggagtgcccctctcccaaccccttcatcttgaggctcacaatttaacacatagtttcattatttttgtatatttattatccctttactagactgcacactgcttgagggtaaagatcatgtctgattcatatctgtattcccaatttgtccagcacaaggcattttcatgaattgttattgaatgaatacatatgggaattaataaataaacaaatgctcaaagaatgcatgaataagtaaatgaacattattgattacggggtctccctccagtgtactaaaattctggtttttatgtacagtgtatatggggccttcaaaactatgtgaatacaggaagatcatacacttgaggactacagtgtcaactaagtctgagagtagttttgagaaacgaggtttaaaatgcagcacaaacccctgttggcgtgtaagggaaagagaagctgacagtattggaaactaagagcttgggatgattgatggaaatgtcataacttgtgaagactggcatcatcctggctgatgtatgtcaaatgaaacaagtttagcctttcaatccccttcttaattttgatttcaaatgtttattcagctcctatcttttgttaatttaggtttctgaattggcatccctactgaaaagagaatacactgacagaccaacacacatctcagtccatttggcagttgtgttcctccctatggttagtgtgagccagttttcctagggtaagattcttctctgaacaaacaaaaaaattccagacctgttgagctttgaaggcaaaccctgggatccagaaatacaagaaatccttttcttacaactggctatgatcaccacatcccaactttatttcacagacaaaaccttcacattgcgagaaggaaacctaccagtttacttcatttctgtcttgcacgcaagcagcttcttctgtcactgaccctaaaaagggaagaaaaataaaaccagaagtcagtgtcccaattcaaatgaaaaattttaactcaggtaaattttgagtgttaattattgatatggtttggctctgtatcccttcccaaatctcatcttgaattgtactcccataattcccacgtgttgtgggagggacttgaaggcagttcattagaatcatgggggcagtttcctccagtttcctccatactattctcctggtagttaataagtctcatgaaatctgatggttttataaggggtttctgcttttgcatctttctcattttctcttgccactgccatgtaacaagtgcctttttcctcccaccatgattctgaggcctccccagccatatgggactgttaagtccaattaaacctctttttcttcccagtctcaggtatgtctttatcagcagcatgaaaacaaactaatacaattataatgaacaaatctgtggagaaacaaagcaagctgataacctaacagtcatctccaattaacttttaaaagaaagtctttttgttactaggtacgacttatggtttacaaatcattataaactaaaacaaagtaataagtaccctaattataagattcttaaaagtagtgcagttgtactattttaccaatagttctaaattctttccttattcttatgtatgtcatcaaa

SEQ ID NO: 1563956 - DNA, 4001 bp, Homo sapiens
tctcagcaaacatcataaagaaggtccagtcccattcctgtcccaaaggctgttatcagctaaggtccccaccctatcacaggactttaattcatgctgcacaccagttcaacagtgtcaggcccccagctacatgcggggaccctggcatgcaggctccctgggatcacaccctattccagcatcttggtaagcaagactatgctgtctttgagagagaaccaggaagtcagtgtgggtgctacatatggcacatcctcggcatctgtgatatggaagttgcctccacttcctgattctggttatcaccatcagatacgtcaggccaatcctgagatgactctgcctgatccaccccttcagctgaatgctctggtctgggtagagaaacacatgctataggaggctgtgggggaaatgggacagggaaagaggactggggaagattttcaggaagattgtaggaccaatggccccaggaaggaacagaaacaacgagaaaggagtagaagattggcattggctaaaaagagtcggcaactgaaggggttatgagagatgaggtcacccatgatatccctgcctccctgcaaccctcagggtgagggcttctctccagagcctggaaaagaggaagaagcaccttaccaggtatcactattgggttccctcacctctgccctgcactcatccccttttctctcacttcccggcttcccgtgttacaatctatctgccctaggagtagagcagctactgtcctggggggtggccgcccacctgcagctgctatcctcaggcagggacactagtgccagggaagaggcagccgtgcggggctggggcttgccaccaccacagagctgacggagctgacgtcgatatttgtccccagtgagcaagtagagcacaggatccaggcagctgttggcactggccaggggccgagtcactttatagaccacgttgacaatgttcagtactcggcagtcagcttccaacagcctggccaggtagtaaatggtgcgggtgatgtggaaaggcacgaagcagacagcaaagacagtcagcaccacagctatggtgcggagagagcggaggcgagaagacgactgtgcagagcctggcaagggctgatacaggcgacgagccatgagtccatagcaaacaagagtgaccaggcagggcacgccaaagagcagccccatgaccgccgagctgaagtgcacatagtggtcaaactcttcaggccgagtggtgtcatggcacaggacggtggtccctttgttgctggttgtgacaaagaacaggttgggcacgaggcagccggctacgaccaaccaaactgccaggcagagaaggcctgcgaggcgagggcggccccagcgtagtgcccgaagtgggtggcagatgcccaggtagcggtgcacgctgatgcaggtgaggaaaaggacactgcagtagaggttccaatagaaaagaaagcggacgaacttgcagatctcagtgccaaagggccagtggttgtgggctgcataatagtagatgagggtgggcagcgacagcacatacaaggtgtctgacaatgccaggtggaacatgtaggtggccgttgcatcccagggtcggaggcggaagatgaagagccatagggttggggcgttaaggcccaagcccagcacaaagacaactgcatagctcacaggcagcaggatgaacttgaaatcctcatcaaaccaacagtccagctccacctcactgctgccaggacctgggctgaggcctagggatctcaacagggaggactctgtactggccatggcccccctggagatgggaaggggagaagtgagggtggcaggatttccctgcccacccccatccctgagctggagcaaaaaaagtagagcagggagagcagtggttgaagcactagggagagctgacagaagcgcatctgggtgcactcaggctagcctggcccctacccaagctcccttggtccagcttgggaagtggtgggcagcaggcagtgctggggctcaggcaggcagcccgtgtatttgggttgtactcactctgcagctcactctgtccctaagagcctggctggctgaagagggtggaggcctcccagcactatccaaagtgggaagatacccagacccaaagtgtcttctgactcgtcatcacagctatatccctggaagaggagtgtctctccccacagtgccttcgcctctcctagtgccctggtcacagtgtctccagatgacatttacctatgacaccttccccactgcctgcctacagcccaggagccccattgccacccttgcccaagaacgttggcacatctcctacctggtccccttgaagctgagctcagctgactctgtcacccttccccttggcagccagagggcatatccaaggaggtggagttggaggtggggcctgtccctcctcccacctgggagattaaaagagttagaaaggccctttacgatgacctagtccaacccactcattgtacagattgggaaactggggcccagcgagattactatttaacagctttgaaatgactgcaggagggagaacacgaggaaacatccaagtttactgatgaagagccaggtccctggagatagattacagggggatcatacaagcctgtgtaagtgagcagaaacatgggaaacgaattttcacatgggcaagtgcaagacaacacattgaaagattttagaaaatctaaactactgatatttaatataaatctcatatgcatataattacaaagaatgcttatatagcacttactatgtgacaggcatttttctaagtgctttatacttattaatgaccccataggctctctatgagctagatactattattgtctctgctttgctgatgaaaaaatgaaggcacagaaagtttaggtgtcttgctagttagtggtagagtcaagatttgaaccaagacaggcctgcctttggatcaggctctagcatccataacttaattgctatgcttaagttgcctctctaagccactggctatgatccaggaaagaatcaacaaatatttatggcagacagaggcaggcagatcgctggagctcaggagttcaagacaagcctggacaacgtggcaaaaccctgtctctacaaaaaattagtcgggcgtggtggcatgcacctgatgtcccagctacatggggggctgaggcaggaggagtgcttgaacctgggatgttgaggctgcagtgagctgtgatcgcgccactgcactccaatctgggtgacaaagtgagaccctgtctcaaatataaataatttttttaaaaccacgaatatttactgagagcctacttttgcctggtccagttctagttactggtagttccttaggagtggacaaaatagataaaaactcccaccctaatggtgcttacatactactgggggataataaaattaataagtaaaatatgtagattgtgatcatcattatggagaaaaattaaagagggaaggaaaagggtaataaagagggaaggaaaagggtaatagagagggttgttgttttaaatattaggaatgaaaccaggcacagtggctcacacctgtaatcccagtgctttgggagtcggagataggaggatcacttgagcccagcagtttgaggttgcagtgaactatggtcagacctctgcactccagcctgaatgacaaagcaagaccctgtctataagtaaataaataaatattaagggtgacttttgaataaaggccaggtgttgtgagaaggggaaaagtaaaaaatgaggtcagagagtttggcagggaccagatcatgaaggtccttggaggccattgtaaaggactctttggtgaacgggaaggcacttagggtttagagaagagaggtgtcatctgacttacattttagaaggctcactggccagctctatattgagaatagactgcagg

SEQ ID NO: 1563957 - DNA, 4001 bp, Homo sapiens
cctaaatgaaagtactgcttttccaatgtgggataattcctttttttttttttttttttttgagacagagtctcactctgtcacccaggctggagtgcagtggcgcgatcttggctcaccgcaacctccgcctcctgggttcaagtgattctgctgccttagcgtgccgagtaactgggatgacaggtgcccgccgccacactcggctaattttggtatttttagtagagacggggtttcactatgttggccaggctggtctcaaacccctgacctcaagtgatccacccacctcggcctcccaaagtgctgggattacaggcgtctgtcaccgccgtaaacacaaaatatgctactatctggcgctgcttgccaaagtcaagtgggctatgcaaggaggaacggaacgggaaggagagattgaacggcgcagtcaggtgcacctgcttccccacgggcttcagctcctcagcggttttcacttagggctctcgcgcttcagacttctcatccacgttacgtaaagataacaacatgggaagaaacaaccacacacacacacacacacacagacacacacacagacacacacacacacacacacacaaacccttttctttttgggaacagagccacgtgaccatggttcccctttatagaaatgggacctaaagcgccacagcaggccttgttgtgtgtggcctgaaattcccagagcagctccctctgccttttctcagctttttaggggacagatctgacaagacccaaggaattggggtttctaagcggacctgtacaaatgaggtctgaggtggccgtgagacccgggtctggggtctccctggcaccgagggggtgacgaggggccaccgtgctcatccaggcacccatagggctttaaaacccgtttaatttatgcttactcttccattattggaacgctaagcatttgggagttatttatatcccacggctcaaggtcatcgccaaggtctcattgcaaacattgaaaaaactgcaatctcaggcgtaaatgggttacgtgcagcagccgcagctgcttaccctctctaaggttaacctcaagagaggcgcatttcatggaatgagtttttttttgtttttttttttctaaacagagtctcgctctgtcgcccaggctggagtgcagtggcgtgatctctgctcactgcaagctccacctccagggatcatgccattctcctgcctcagcctcccgagtagctgggaccgcaggcgcccaccaccaagcccagctaatttttgtatttttagtagagacggggtttcaccgtgttagccaggatggtctcgaactcctgacctcagatgatccacccacctcggtcccccaaagtgctgggattacaggcacctgccaccacgcctggctaatttttgtatttttagtagagacggggtttcaccgtgttagccaggatggtctcgaactcctgacctcgtgatccgcccacctcggcctctgaaagttcatggaatgagttattaaaggaagggtggcttgcagccctggaaaatttgagcatttctcccctaagtgacgaagcggctgtgcaaagtcttcctcccaggaaatttgcactcctggtctgctctagcgtgaggagaacacgcctcatggagtttgcaccgtcttcccccatgttctcaccgtacacggaccctcccagcgaccctgtcttctcccttgacagtgcaggacaagcataaaagtccagctcggcggctcacctgtgcagaagcagcggcagaagtagcaggtgagagctcagagggtctccaggtaacaggatgcaacgcttaagtcgacggccgtgcctcagagcccgggactcggggggccagccaccagcttgcaagccgtggtcactcaaagtgcttgagaaggtgttcgtgggcggcagacggctgcccttccagttccatctgtccagcaaccttgcaaaggcggccgcttcgctgggtggcccaccggctggcacgactgtctccgaatgcaaattctgcaaactccacctcccagcgcaccaccacggttgcgactcaggcttaggtggaaaggaagtgtgttgtgacatttcctctgtaactgtctgaacactcatgtgcagggctgagcccactggagtaacgtcgctgtgtctctgggcagcaccgttaaccgcccacctccctatcactggctcgcagggggccctactcttaagagaaccctgagagtgaggaaaagagggagaatgatttttctaaattttgtaaccagcagtgaagagccgtggcatgctccagaaccgattcctgtttcttctgaaataacaaaacaaaacaaagaaagaacagaacacgtttccttttagactctaaagctgtgctcattgcgacatctcttggtacacagccagactgtgacaagcgaacagaccttgggcactgatcattccggctctcacagttggtcacgggcgctgcaggctcatatcctcaacatcccatgggggatcggccagtttcaggaatgagaaccaggtttccgagctctggtatccttgcttgtgaggagcaacggttggttcttgtcactcgtgggaggaggttgagagggaaggatctgtcactgagaaagaatgaatgaatattgaaccactgctcagggaaaagacatggtagaatcaatccctcaagccaggctgggtgtggtggctcacgcctgtagtcccagcactttgggaggccaaggcgggtggatcacttcaggtcaggagtttgagaccagcctggccaacatggcgaaatcccgtccctactaaaaacacaaaaattagctgggtgtggtggtggacacctgtagtcccagctactggggaggctgaggcaggagaatcacttgaacctgggaggtggaggttgcagtgagccaagatcaggccattgcactccagtctgggtgacagtgagactgtcccaaaaaacaaacaaacaaacaaaaagaccaggcctgctggctcacgcctataatcccagcactttgggaggccaaggcgggtggatcacttgaggtcaggagttcgagaccagcctggccaacatagcgaaatcccgtccctactaaaaatacaaaaattagctgggcatggtggtggatgcctgtaatcctagctactggggaggctgaggcaggagaatcacttgaacccgggagctggaggttgcagtgagccaagatcaggccattgcactccagcctgggtaacagagtgagactgtctcaaaaaaaaaaaaaaagtcgaggcctggtggctcacacctgtattcccagcactttgaggtgccaaggtgggccggatcacttgaggtcaggagttcgagaccagcctggccaacatagcgaaacctgtcccttaaaaatacaaaaattagctaggcgtggtggtggacgcctgtaatcccagctactggggaggctgaggcaggagaagcatgtgaacctaggaggtggaggtggcagtgagcccagattgggccattgtaccccagcctgggtgacagagtgagactgtctcaaaaaaaaaaaaaaaaaaaggccaggcctggtggctcacgcctataatcccagcactttgggaggccaaggcgggtggatcacttgagatcagcagttcaagactagcctggccaacatggcgaaaccctgtctctactaaaaatacaaaaattagctgggtgtgatggtgggggcctgtagttccagctactggggaggctgaggcaagagaatgacttgaaccagagaggcagaggttgcagagagccgagatcatgccactgcactccagcctgggcaacagagagagaccctgtctcaaaaaaaaaaaaaaaaaaaatcaaaagaatccttcaggcccctggtcacagtgttttcttcaacagatcaataagtagctttatattatgtgtgt

SEQ ID NO: 1563958 - DNA, 4001 bp, Homo sapiens
cagaaatgattactggtgactttaattttcttctggtaacttgtctgctttgtgatttttttttcttgcaatgacgctgaattacttttctgacaacagggaaaaggacaggaagagggcacaggggaatggggtcataagcagtgtttgtttccagcaaaactaccgaggacagcgaaacaccctttgtagcccgccaagctggccaagacacacacacacacacacacacacacacacgcacgcacacacacgatcaattacagtgaccaggagactatgcaggggaaacgggcatactctttactagctgcgctggccggcacgagtgcaaatcggtacaatgcttatgaagggggccttttggcaacacacaggaaaagtctttaaaatgtctatatgtggatcttgcaagtccgcagttaaggagaccaccgggatgctagcaaagatttggcttgacaaggaaggattcactcatcaaagcacagagcacgcaatgttggtcttaaacacagggaaagaactaggcaccacctgaatgtccaacaatgcgggaatgattacagaaatgttaaggtccacggatacactggagcactctgcaggcactgaagatgacgtttcataagcctgttgataacatggaaagaagttcaatgggttgatttttgtttggttttagttgctgaaaaagcaggttaagaaacaccacatacatgaaccattctataacggtgtgttaaaagggaaggcggggtgggggtgagcaaaggagagagagggagagaagagagcctggaaaagcagcacaccaaaaaggtaaaagtggttctctctggggagtaggaccaggggagcaattactctcttgtttcttccctcatctgatatccttctcctttctgatgattctaccatgaaattgtaccacctgtgcagtaaacaaagagagaatgaaaatgctttttaaatcaaaccacagggagaagaggcagcctttaacctacaaatggcacagattagtaagattattcacaacgcccttggtgggggtgggcgggggagaggaagggaaggagaggagaggtggagggagaaaataggaagcggggagagagaaggggagagagagagagagagagacctgcactctcaatacaataaatacactgctggtgggttggcgggggagggctgggggtggggggttgtaaaccgggtgtgagccaaggtttggctctgctggctggctagctcctgggatgtcttcatcgcaaggtggcctcctcgtcggtgtcttcctcgaaatccttgacgtcagcactagtggactgcctggcccaggctcccctttcggcctctcgttctttatgcgacttgaatctcccgacgaaaattttgcggtagttcaggaacatgccattcatcacatcgatggcccgctccgcagattcctgcttttggaagtgcacgaacccgtagcccttgggccccttttcgtcacaggccactttgcaggagaggatgttgccgaacgccgagaagatgttgtacagcgccttgttgtcgatggtcttgcccaggttcttgatgaagacgttgcccaccccgctcttgcggagcgacgggtccctctgggaccacatgatgcgcactggcctgccctttatgacatcaaagttcagggtctccagggcccgcttggcgtccaccggttgctggtagttgacatacgcgtagcccaatgagcggcgggtgatcttgtccctgcagatgcggatggagaggatgggcccagctggactgaacttctcgtacagcattgcctcggtcacctcagggtgcaggtcgcccacgtacagggaggccatctgaaaatctgggttcccctcacagtcaccgagggtctcatccgcatctgcatccgcggcggccgccgcagccgccacctcggccgccacctcggccgccaccttcgcatccgcatccgcatccgcatccgcctccgcctcccccaaggggggccccgcagcctccgctgcggcggcggcttcggccgcgctgccctccgccaccgccaccaccgttgccacccgggcggcctccgcctcccccggggtggcctccgatgctgcctcctctattgaggcctcggcctccacctcagcctctacctctgcttccgcctccgccacggaggcctccgccaccgcctctgccacggtcgccgccgcagcctccgccgccgccgcagccgctgccgccaccgccgccgccactgtcgctgctgtcgccacggtcgccgctgccgccgggccgctgccgcgacctcccttcccgcgagctgggggacggagaggcgggggagggcgggagggcaggagggcgggtgggtgcgggaacacagacccgatgcgcgagcgggagctggcgcaggggatccgaactggcgagttcaagtcacctgggatggcaagtgctgccaggagcgcgccggtgcgagtcgccgcagcctgcagccagctgctgttgccgccgccgctcggtcgtgggctagcgcgcagggtgcggggtgcgggcgggcaggcggcgtgtggtggggggcggggggtgttggcgtctgtcgtccgggcagctgggaaggcttctgtctctttggttccccctgtggctgctgcggggctgcggggctgcggggctgcggggctgcggggctgcggggctgcggggctgcggggctgcggggctgcggggctgccgggctgcgggcggtgggagatgacgggggtgggagcaggagcgggagcaggggcgggagcgggagcgggagtgggagtgctcagtctctcgggtcgcctggatatttatgaaaaggacgccagggaaagggctccgctgtagaccgaagggataagggttcgattcagaagggagcgttatttttatcccctctccacataatggaacgtttaaatggttaaatcaagtaccttgcaggagagggtggggtggccttgagaatacactcaaggcctcagtacatgcagtctggaagtgggggaatcaagagcaccctgtctctagtactgtcctcaatgataaggtgaggaaagccaaacccaggactgggaacagggcctggtccagagccaggcgcttgtttattcttgactctgctctcaaggcgctgaggttcccaacctggaccaagaagtacatattcaggttcaaaggataaaccaaaacaaaacctgagctctctctctagaatgaagtgcctggtcccagttcaccatctaatatttatggaaagcttatcaggtacttggtgctgggggctaaggggcccgcaatgtggtaagtgagcagggactgttgatgtgttggaggtgtggagcagggtgagaagaggtgagcagtgtgtgtgtagtgagagcagagaggccacacagagccaaatgctgggggtatagacaagggagcaaccatgagagttgagtgtaacagaagctacagtcccacttcctccagagaggaggaccagccactaactcttcttagtagcaattaggtgaggctgcaccaaagacagaaccaccgaggtgggctctgaaacatgaggagcagtccaccatgtcaaggcaggaaggaaggcactccaggcagagggatcagtctgtgcccaaggccctttgtcatgagagcacatgcttggtcgcttctggccatgcctaataatctggcagggacagagctcatggtctccaagagcacatggtagcagacagggctggaaggtgtggggccctgagaatcaagctaaggtgcttcgactgtatacccaaggtcacggggaccactcagcatgttcaaggagggaagcagtatgatgagaactttagaatgagtacaaattaaacatcaatgtgcatgtataagtgcacatttacatgtacacgcatgtacaaaaccaagacagggctgacagaacacaagga

SEQ ID NO: 1563959 - DNA, 4001 bp, Homo sapiens
ggtgacattaattttcttctgttaacttgtctgcttcgtgattatttttttcctgcaatgacgctgaattatttttctgacaacagggaaaaggacaggaagtgggcacaggggaagggggtaataaacagtgtttgattgcagcaaaaccactgaggacagggaaacaccctttgcagcccgccaagctggccaagacacacacacaaagacacacacacgcatgcacacacgcacgcacgcacacacacgatcaattacagtgaccaggaggctatgcaggggaaacgggcatactctttactagctgcgctggccggcacgagtgcaaatcggtacaatgcttatgaagggggccttttggcaacacacaggaaaagtctttaaaatgtctatatgtggatcttgcaagtccgcagttaaggagaccaccgggatgctagcaaagatttggcttgacaaggaaggattcactcatcaaagcacagagcacgcaatgttggtcttaaacacagggaaagaactaggcaccacctgaatgtccaacaatgcgggaatgattacagaaatgttaaggtccacggatacactggagcactctgcaggcactgaagatgacatttcataagcctgttgataacatggaaagaagttcaatgggttgatttttgtttggttttagttgctgaaaaagcaggttaagaaacaccacatacatgaaccattctataacggtgtgttaaaagggaaggcggggtgggggtgagcaaaggagagagagggagagaagagagcctggaaaagcagcacaccaaaaaggtaaaagtggttctctctggggagtaggaccaggggagcaattactctcttgtttcttccctcatctgatatccttctcctttctgatgattctaccatgaaattgtaccacctgtgcagtaaacaaagagagaatgaaaatgctttttaaaccaaaccacagggagaagaggcagcctttaacctacaaatggcacagattagtaagattattcacaacgcccttggtgggggtgggcgggggagaggaagggaaggagaggagaggtggagggagaaaataggaagcggggagagagaaggggagagagagagagagagagacctgcactctcaatacaataaatacactgctggtgggttggcgggggagggctgggggtggggggttgtaaaccgggtgtgagccaaggtttggctctgctggctggctagctcctgggatgtcttcatcgcaaggtggcctcctcgtcggtgtcttcctcgaaatccttgacgtcagcactagtggactgcctggcccaggctcccctttcggcctctcgttctttatgcgacttgaatctcccgacgaaaattttgcggtagttcaggaacatgccattcatcacatcgatggcccgctccgcagattcctgcttttggaagtgcacgaacccgtagcccttgggccccttttcgtcacaggccactttgcaggagaggatgttgccgaacgccgagaagatgttgtacagcgccttgttgtcgatggtcttgcccaggttcttgatgaagacgttgcccaccccgctcttgcggagcgacgggtccctctgggaccacatgatgcgcactggcctgccctttatgacatcaaagttcagggtctccagggcccgcttggcgtccaccggttgctggtagttgacatacgcgtagcccaatgagcggcgggtgatcttgtccctgcagatgcggatggagaggatgggcccagctggactgaacttctcgtacagcattgcctcggtcacctcagggtgcaggtcgcccacgtacagggaggccatctgaaaatctgggttcccctcacagtcaccgagggtctcatccgcatctgcatccgcggcggccgccgcagccgccacctcggccgccacctcggccgccaccttcgcattcgcatccgcatccgcatccgcatccgcctccgcctcccccaaggggggccccgcagcctccgctgcggcggcggcttcggccgcgctgccctccgccaccgccaccaccgttgccacccgggcggcctccgcctcccccggggtggcctccgatgctgcctcctctattgaggcctcggcctccacctcagcctctacctctgcttccgcctccgccacggaggcctccgccaccgcctctgccacggtcgccgccgcagcctccgccgccgccgcagccgctgccgccaccgccgccgccactgtcgctgctgtcgccacggtcgccgctgccgccgggccgctgccgcgacctcccttcccgcgagctgggggacggagaggcgggggagggcgggagggcaggagggcgggtgggtgcgggaacacagacccgatgcgcgagcgggagctggcgcaggggatccgaactggcgagttcaagtcacctgggatggcaagtgctgccaggagcgcgccggtgcgagtcgccgcagcctgcagccagctgctgttgccgccgccgctcggtcgtgggctagcgcgcagggtgcggggtgcgggcgggcaggcggcgtgtggtggggggcggggggtgttggcgtctgtcgtccgggcagctgggaaggcttctgtctctttggttccccctgtggctgctgcggggctgcggggctgcggggctgcggggctgcggggctgcggggctgcggggctgcggggctgcggggctgcggggctgccgggctgcgggcggtgggagatgacgggggtgggagcaggagcgggagcaggggcgggagcgggagcgggagtgggagtgctcagtctctcgggtcgcctggatatttatgaaaaggacgccagggaaagggctccgctgtagaccgaagggataagggttcgattcagaagggagcgttatttttatcccctctccacataatggaacgtttaaatggttaaatcaagtaccttgcaggagagggtggggtggccttgagaatacactcaaggcctcagtacatgcagtctggaagtgggggaatcaagagcaccctgtctctagtactgtcctcaatgataaggtgaggaaagccaaacccaggactgggaacagggcctggtccagagccaggcgcttgtttattcttgactctgctctcaaggcgctgaggttcccaacctggaccaagaagtacatattcaggttcaaaggataaaccaaaacaaaacctgagctctctctctagaatgaagtgcctggtcccagttcaccatctaatatttatggaaagcttatcaggtacttggtgctgggggctaaggggcccgcaatgtggtaagtgagcagggactgttgatgtgttggaggtgtggagcagggtgagaagaggtgagcagtgtgtgtgtagtgagagcagagaggccacacagagccaaatgctgggggtatagacaagggagcaaccatgagagttgagtgtaacagaagctacagtcccacttcctccagagaggaggaccagccactaactcttcttagtagcaattaggtgaggctgcaccaaagacagaaccaccgaggtgggctctgaaacatgaggagcagtccaccatgtcaaggcaggaaggaaggcactccaggcagagggatcagtctgtgcccaaggccctttgtcatgagagcacatgcttggtcgcttctggccatgcctaataatctggcagggacagagctcatggtctccaagagcacatggtagcagacagggctggaaggtgtggggccctgagaatcaagctaaggtgcttcgactgtatacccaaggtcacggggaccactcagcatgttcaaggagggaagcagtatgatgagaactttagaatgagtacaaattaaacatcaatgtgcatgtataagtgcacatttacatgtacacgcatgtacaaaaccaagacagggctgacagaacacaa

SEQ ID NO: 1563960 - DNA, 4001 bp, Homo sapiens
tgccttgccccacttccatcatcactttggcccgactaattgacccaaaggaagaaaattcctccttcagtttttcatcattgattgtctcatccaagttcttaatatagataggcacccctgggggccgacttttttcttttaacctcagccgttcaaatctccgcctcaactcagccaggcgttcaattttcttctgtgctcgccctacatagaggacttttccatcgatggactttccatgcaagtctagcacagccttttgggcagcctcgtgtgtctcatatctcacaaatccaaagcctttagatttcccactggcatctcttattactttaacactctcagttggcccatattcacagaaaagttccttcagtttttcgtcatctatgtcgtctccaatgtttttaacgaaaacattggtgaaagttgctctatccctggttctgacctcagccgcccgctcttctgggaatttgaatctgccaacatacacctggcggttgttgagccgcactccattcatgtgccagatggctctattggcagcggccaggctgtcaaagtgaacataggcataacccttagagccgttgtcatcgcatacgactttgcaggacagaatgttcccaaaagcagaaaataagtaaaacagggccctattgtctatggatttgtccaggtttttgatgaatatatttcccactccagactttcttaagcggtcatctggctgagaccacataaggcggaatggttttccattaatcaaatcaaaattcatggtgttcaaggcccactctgcatccgcgggaaagcggaagttaacatacccatagcccagggggctgcgggtcaccggatcacggcagattcgggtgaatcgcagagggccagcaggcctgaacttcttatagagcatgtcctcggtgacatctgggtccaagtcacccacgtacagagcggccttgagatacttctttttcttgccagcaggattaggctccccgctccccatctctctgagcactgggaggaggttctctttgaagagaaaaaaggctgctttctctaagctatgggccaaacagctgttcacgaacagaaaaagccaaggcaggcaaaaggaagctaaaagcagactcagaatcactgtcgaggctgagaaaatgaagttcagaaacagctggtcagcaggctcagaacaaacacatcagacaaaaaggcgccccaaatacgaatctattctccctgcggggacttaaaattgtcacccgttcagatttaaaatcagtttcaaaagccagtaccagaaacgtaattttcctgtccccgtgaaattgtgagaagccaccaagcagctggctggttccccacaactagcattgcagacagaggcctcccgacccgctttctgcataaatataggcctagagctcctgttggtttaaaatgatatcaacaagggcagggaccgagcgcgtattcctccgccggctgcctggccagtctcgggctggctagcctttcgctaaggcctctccgcactcagcgtctgcgaaagggtacaccagacacttggtgcgataagaccggcaggcaggctgcaggcagcggataggacacagagacagacagacagacacacgcgcgggggatcgaagaccgcccagatacccaagatgcccactgggtacggaccgagtgaggcgcggtgatttcagcagcctgaggctcgaggcaggtccggagagactgactggcaaacgcgcagtgagtgggtcagctctgacgcgaggcgggtctggccagatgcggggcggagtcagcgaagaagggcagatgcgcggcgggcggtcccagcgcagaccgatgggctggggtttctctccgcaggacagtccaacggagggaccaagagccagtagcagtgatagggaggggggacaggcggggcgcgagaaacccggaaccgtgctaagtaacttcccgcttcctctgtaccaagatttaaaaaaaaagagagagagagaaggggggagagagagagagagagagagagagagagagaaggggagagaatgagagagagagagagaaggagagaaagaaaaatctaagatggcttttagatgtttcttatattttaaatgttatttattatttaaaacactatatttaagccgaacatctaaaaatcacataagaagatgacgacctgggcaaaaataataagttttaaaaaactaattatcaaaatcatttaagcttagggaaaaggataggttgcatactttcctgagtgcattggaaagtcaaagtttacaaatgtcctggcctcccaatccagtgctaaaggatcacagggtcaagtagaacacaggaccatgttgcctttggcctttagccttacttcattaatctccaacataatggtaatattttcctcaggtggtaggcaaagagatcttttctctgatcccataatactaaggttttaatgattggagagccatataatggcttttgatggtgtttagtgccacaaaacgttgaaactgttgagctgccgcgagaattacagttacaaaatctcagttaaagagataaaagccacagaatcaatacaaaatatgtaattaatatttacagatgaaataaacatgttaagatatatgcactttacacaattatgaatttcatcatgagttgtcaacttgaaacccttgaaggaaacagtgccatcagactggactcaactcagcagtttctcaacaatatctctcttcagagtatttgagaaacccttttggagagaaattttgaccgtgttttcagaaattcactgatatctagcatgcgcaaacaacacttcaagaggctccttccacaattcctacccctccagaaaaatccaaacaaaacatctatcactactcttaggctggaaaagatcctgggaaaaaaagattgcaagagaaggacattaccttagtgggtgttttcctaataagtcctcagaataagaggctaaattaacgtattcattcactttatacattttatagtgtctattagactgtagagttgacattaaacctcattatttactcaaaaacttagtaattttctttactattttttttttttgcttgctttctagtgttcttggttaactaagacatggagattttgagaaaaggcaaatatgaacaatgatattatagactaataaatgggttttacagtgtgaccagagtgaccaacatgtggaaacacttgtgaacatctgcctagtttattgcattttgaatatatttttataaacatattttcttttatgcgtaattaacaatgggttagaattctagtctgttttggacttttctcatttttaaaactgccttattgaaaatagtaaaataacaacataaatccaatttccacaatctcatcattgattcaaatcaatattttcatctgttcctgtaaccaactaaatgttgtccatattcaaatttatttgtacatattttctctaagattatagttagaattgatttgttataatacacgttttcaaaataatcacttctctacacttaccacttccattcaacatagtactggaaaccttaggcagagcaattaggccagagaaggaaataaaagcatcaaaatcagaaagaaaaaagtaaattaatctttgtttgcagatggcataatcttatctgtagaaaaccctaaagtctaatattttttaaatctccatactatccaaactgatcaatataatccctatcaaaagcccaatggcattttttttttacagaaatagaaaaaacaacctaaaattcatttgtagtcacaaaaaaaccctgaataaccaaagcaatctgagaacgaagaaaaaagctggagacaccattcttcctgatttcaaaacatgttacaaagctacagtaattacaacactgtagcactgtcataaaaaacag

SEQ ID NO: 1563961 - DNA, 4001 bp, Homo sapiens
ctgttcctggtatgtgacaatgcatgagacacacacacacacacacacacacacacacacacacacacacaccccaacaggcattcttcttccctttcccttcaccttgagctgcagatgctccctcatcctctctctcttcagcaggtgtagaatcctgactttgagttggtgattccacttcgtcaggttgctcatcactggactccttgtggtagggaatatgtgtgtgagtgtgcaaagacaaaaagttttgttattaatacatgtcaaaaaatatatacgtatacacacagagaatgcatagatgtttctgatcataactaaacctaaaaatatttctccaactttattctatatggttaataaggctactctacccacagaaaggttactgcgagaaaagttacccacaaggactttggaagctattgcactctatgttggaatagatgtgtataatctatgtgtcattcacaagcaaagcatgagaaagaagtcatggccaaaagttggagaacacaagagaaaaaaaaaatcctcctgaatcaatatttccttcatgagataccagaatcttatttttttaatcagcatgaactacctttattagtgtatctatactaatgcaacaacactatcacaaaaattaatttctgctaatagaaaacatcgaattaacgttaaagcactcaacagcataggcccaattacctcagaagattctacatagatcattggtctacgccgatagattaatcttcttagaaaacccatatttcacactgaaaagagaaaattgtgattgggaacatgcacttgagaggacagctatattcgatcacttccatggctaaatgttaacttgtcattttaattttgaaaatactctcaaaataagtcccagagttaagtgcaagtgtgtacgttttctgagtgcttgcaaagccacttatgctccccaagctggcagagtagtcatcttaaggcatgtggcaaaaggcagaggacattattttaaaatttcttttagacacagaatctcgctctgttgctcacgctggaatgcagtggcgtgatcacacttcactgcagcctcgacctcccgctcacgcgatcctcctgcctcgtccggagtagctgggactacaggcgcgcaccactgcgcccctctgacagaggacgtttctgatgaggtttagtttcacaagcggactccacatgaaaacactagtgaatcacaattcccgtgactgctgcttttggcacactcccacttactagagccattcacccccctcaaatcaagtttggttgggccacacagcctctcccagtccttcccattgtttccggaccttctatggcagaggtgagaccttgccacgcttctcactcgggtgtttctcactcgggcactccccactccacaccgctggggggcgctcaccagcccacagccttcccaggttccaggccccttctttaccgccatcttcaccacccacctcccgcctcggggccccattcaggactcaggaatgtgccctgtgtcatgggttcctaccacctcgggactttgacccctccaacagcacccgcagcactcgcctcattttcacctgagcccctgaccgcttccccttcatggcccactttcctccctgtcctggccccttcacgaccacaaagccgatggcggcgtcgcagcctgtgaggagaaggaggacgagctcgaggcccttctcttttggaggccactgaggcccttctccctcaaaagccacacaccaccagaccgaggggcccaccgaacctgcccgaagcccactggctccgcctgaagcccactggctcctcctcaccctcactcacacttcagcccctgggaggactggcctgcggatctaccagatgagtctcagtagaggaaaaaagtgtccggacagcaggaacgcgactgcacactctcacagctccctggcgttctccacgtgggcgaaggggccgacgggaaggcacccagtgaacatgcgcactgaggctagcacccaaaggtggggagggctgcagttcccagccccacaccccacactcccgattttcatccccgtgaagataatggaatccgacctccctctgctgtttcatatgcctcgggtactcaaatacctcaaatagtgctcccctcaaaactcattccatcttcaactgagcccccctcccctccagggccctctcttgctctggccctgccatagggacaaggaccatggtggctgcctgtgaagtgaggtagacgacctgctaaaacagaaatagcaacatacctcatagcattatacaagactaagagtctcataactaaatattaaaaatgtctagcatataattcaaaattactcagaatatgaagaaccaggaacatagggccactgaaatagggaaagacaatcagcagacatcactgctaagatagagatgttgggattatgtgggaaagcctttaaagatgctattttataaacgcttaggctgggcgcggttgctcatgcctgtaatcccagcactttgggaggccgaggcgggtggatctcttgaggtcaggagttcgagaccagcctgaccaacatggtgaaacctcgtctttactaaaaatgcaaaaaattagctgggcatggtggcgcgcacctgtagtcttagctactcgggagtctgaaacaggagaattgcttgaacccaggaggcagaggttgcagtgaaccgagatcacgcgactgcactctggcctggacaacagtgagactccgtctaaaaaaaaaatgcttaaacaagcaatcatgaacactgttgaaacaagtaaaaacaaagtcctggcacacacacaaaaaaagaatatttaaagaagaagcaaatggaaattttagaagtggaaaatatgataacgaaggaaaataattctccccaaatggattcaatagcagaatggagacaagaaaagagtttgtgaactcaaagatagagaaatagaaattgttctgtgtggccaagagcagtgacttacaccaataatcctagcacttttgcgtgctgaagtaagaagatagatggcttgaggctaggagtttccaacctgggcaacatagtgagaccttgtctctacaaaaaaacaattaaaaatagctgagtgtgatgacacatgcctgtagtcctagctactgtgaaggctgaggcaagaggatcccttgggcccaggagttcaaggctgcagtgagctatgatcacacactgcagtccagcctgggcaacagagtgagaccctgtgtctaaaacaaaacaaaaagaaattgttgaagtgtctcataacctgatattcaaaatgtccagcatataattcaaaattactcagaatacgaagaagcatgaaagttaggcatcttggccaggtgcagtggctcatacctgtaatcccagcattttgggaggctgaggcaggtagatcacgaggtcaggagttcaagaccagcctggccaagatggtgaaaccccatgtctaccaaaaatacaaaaattagctgggtatggtggcgggcacctgtaatcccagctactcgggaggctgaggcagagaattccttgaacccgggaggcagagtttgcagtgagccaagatcgtgccactgcactccagcctgggtgacagagtgaggctccatttcaaaaaaaaaaaaggaagttatggaatttcaaatggagaaagacagacaactgacaccaatgcaaagacagagatgttgagattatctgggaaagcctttaaagatgctagtttaaaaaagctataaacatccatgtccagacacaagttttcaactcctttgggtagataccaagaagtacaactactggactgaatagtaagagtttgtttagttttgtaagaaatactgccaaactgcctttcaaattggctttaccattttacattcccaccaacaacg

SEQ ID NO: 1563962 - DNA, 4001 bp, Homo sapiens
tgactagactatgagctttaggcaaaaatttggcactgacatctccagcacttagtatattacgtggtatgaggaagcatcaataaaggtgtgttaaaaagtttcttaaaaaatacatgacgtgtccacagatggcagactaggaagctgcaagctgccattcttccacagcaacaaaaaacagaaaatggctgaacaaagcatacaggagctctggaaaaaggtttatggcaaccatgaaaatacccaatcaataaaaagcctccatcaaagtggtaggaaagcttagtggctttttatgcatccttgtcccacccctccacacagcagcagtaggaaatgtttaagattccttcctaatgctttctgtcctcctgttactggtatgtcataaaatacaatgcataaatagacctccaccacccataagcattattttccactctcccttcaccttgaaaagcaggcactgcttgattttcaatctccccactaggtgcaataccctgattatcagttggtggttcctcttcttgacgtttttcctcagtgggctcctggacctaagggtgtaagtgtgtgtgtgaataaaaagtcaataatataaatacacaaatgcatatgtgcatcgaatcacacatctaaagacatttttccaacatatataaacacatacacacacatatagatagatagatgatagatagatagatagatagatagatagatagatagacagacagacagatacatacatagagatagagagagagagagaaatatccatatccatacaggtaacaccagaatatagtattcctgaaccaaagtttccttcatgagatgccatcatcattttttatcagcatggaacacctgtatcagtgtatgtatactagctcaaaaatatttttaaaataaattgtgttaatagaaaacatcaaatgttaaaagactcacaatcacagatccaaccggctgggaagactcttggtcatttcctctttctgaggattgggatcttgctcttagaagctcactcatatttcccactgcaaacagaatattgttatttggaaaaagtgtgtaagaacttagttatatatatgaacattccacggcaaaatggtgatttgtacttttttaattttgaaaatattttcaaattaagtcacagagcaatgataagtacacatgctttcgaatcaaactaaggacagatttgtttgtatcatagtcgaagaggcatagaaatccccttaacgccatagcaaaagacagaggacatttctgcgttttggtttcacaattagactctccatcatgaagacatttaggaaaaaacgggcagagaattgaaactgaaatgactactgcttttgtcccactctgatttgctaggcccatttcacccccacacccctctcaaaatcaagtcttgttggaaagcacagcctcgcccattccttcctatgatgtccatggcggaggtgagaaattgtgaaacagagtgaacgttatgctcctcacaggacacctctgccaggcactctacagacctcggggccacagtcaccagcccaccgcgctcccagttcccaagccccttcgttactgaccacacggtcccttcccgcgtccctactgaggagtttggaaactgtcctctctcagagggttccaggagttttcgagactcaaacaccgctaactgcacccccagcacttgccccatcttcaggcaatccctcccctctgcggcccaccttcctccctcatcccagcccagtcaggacaagtcccatggtggcgtcgcgacctgggaggagctggatgacggccccgaggcccttttccctcagaagccacagactgtgccgcaggacctgtccaaagccagctggctcctccacacattctctcacaactaaattcccagtaacaccgttctgcagacctaccggctgagtcttggtcagtgagaaagaatcaagatggcggaaagaatgaagacactctctctccttgcagacctctgtgcggacacaagacgggcagcaaggcgcctgcgcaacaacagacacgcatagcaacagacatgggcaccaacaggtctgtgcagcatgcgcactgagtggggtattcgcctcgtgactgaagttttcctgcctctgtggagtaaaccaccagcgctcctgacaacgaaaatgaacttgcaaagcacttttcttttttccccgcccaccctttctttcacttccagtggcgttagagaatatgagcctcaggttactctaataatgtgtttcagaaaaattcaccatcatagaaataaatcttaaatattttaatacctgttttatatacgcttccataaatcattttcttgcctccttcacgagtttgctgtcatgcttgcaatggtctcacccactgcaatatcataagacattcatagtttttggttgcattattgtacgttcaaaatctttgatccatctggacaaaattaaagtggtaggaactcaacattatttgttgaatccctgtttcacccactgttttgaaatggctcttatcatcacctacatccccactcaattttgtatgtaactctcttcttttaattttcttccattgagttgtttatacctgtaccactactacactattttaattgctgtagcttaattatatttgaaatgtgaaataatgcttgccctccctcattgatttctccttttctatcaattctgacacgttggtctttcagatgaacttcagaatcatttgatcaggtgctaaaatattactgttgagacactagttattatttttatattacatgttaactctgggacaatagccatctttctattttagaatctctctatcaaaaaaaaaaagccactcctcaattcctcaagtcttttaacatatcccacacaatgattgtgttatttgcttcatattagttcttcacattcaaattaaatttattcatgggcacttttatttttctattccattgctgacacgtgtttgcttctactccactatgtttttcacacaagtcaaacaatctgtttggaaaccatgtgattctatacctagaaaatcccagaatctctgcccaaaagctccttgatcttataaacaacttcaggaaagcttcaagatacaaaattaatgtataaaaaccagaagtgtttctgtacaccaactaccttcaagcgcagagccaaatcagaaacacaatcccattcacaattgccacaaaaaaaaaaaataaaatacctaggaatacagctaacgagggaggagaacaatctctactatgagaactacaaaacactgctcaaagaaatcagagatgacacaaacaaatggaaaaacatttcatgctcgtgaacaggaataagcaatactggcaaaatggcctaattgaccaaagcaattcatacattcaatgatattcctattaaagtaccaatgacattcctcacagaattagaaaaaaagtactttaaaattcatatggaaccaaaaaagagcccaaataaccaaggcaatcctaagcaataagaatgaagccaaaagcatcatattacctgacttcagactataatacaaggccacggtaatccaaacagcatggtaccggtaccaaaacagtcacagagaccaatgaaatagaatacacagcccagaaataatgctgcacacctcacacctattaccacctgatcttcaacaaagttgacaaaaacaagcaatgtagacaggaatccctattcaataaatggtgctgagataactggctagctgtatgtaaaagactgaaactggaccacttcttattaaaaaaattaactaaaggtggattaagaacttaaatgtaaaacccaaatctgtaaaaaccccggaagacaacgtaggcaacgtcactccggacacaggaaaaggcaaaggtttcataacgaagatgccaaaagcaatgg

SEQ ID NO: 1563963 - DNA, 4001 bp, Homo sapiens
agcatcaataaaggtgtgttaaaaagtttcttaaaaaatacatgacgtgtccacagatggcagactaggaagctgcaagctgccattcttccacagcaacaaaaaacagaaaatggctgaacaaagcatacaggagctctggaaaaaggtttatggcaaccatgaaaatacccaatcaataaaaagcctccgtcaaagtggtaggaaagcttagtggctttttatgcgtccttgtcccacccctccacacagcagcagtaggaaatgtttaagattccttcctaatgctttctgtcctcctgttactggtatgtcataaaatacaatgcataaatagacctccaccacccataagcattattctccactctcccttcaccttgaacggcaggtgctccttcattttcgatctccccactaggtgcaataccctgattatcagttggtggttcctcttcttgacgtttttcctcagtgggctcctggacctaagggtgtaagtgtgtgtgtgaataaaaagtcaataatataaatacacaaatgcatatgtgcatcgaatcacacatctaaagacatttttccaacatatataaacacatatatatgtatatacatatatgtatatatacatacatacgtatatacatacatatatacacatacatatatacatacatacatacatatatacatatatacatatacacacacacacacatatatatatatagagagagagagagagagaaatatccatatccatacaggtaacaccagaatataatattcctgaaccaacgtttccttcatgagatgccatcatcattttttatcagcatggaacacctgtatcagtgcgtgtacactagctcaaaaatatttcttaaaataaattgtgttaataggaaacatcaaatgttaaaggactcacaatcacagatccaactggctgggaagactcttggtcatttcctctttctgaggattgggatcttgttctcacatgctcactcatatttcccactgaaaatagaatactgttatttggaaaaagtgtataagaacttagctatatatatgaacattccatggcaaaatggtgatttgtatttttttaattttgaaaatattttcaacgtaattcacagagcattgataagtacccacgctttccaatcaaactaaggacagatttgtttgtatcatagtcgaagaggcatagaaatccccttaacgccatagcaaaagacagaggacatttctgcgttttggtttcacaattagactctccatcatgaagacatttgggggaaaaaagggcagagaattgaaactgaaatgactactgcttttgtcccactctgatttgctaggcccatttcacccccacacctctctcaaaatcaagtcttgttggaaagcacagcctcgcccattccttccatggcgtccatggcggaggtgagaaattgtgaaacagagtgaacgttatgctcctcacgggacacctctgccaggcactctacagacctcggggccacagtcaccggcccacagcgttcccagttcccaggccccttccttactgaccacatggtctcttcccgcgtccctaccgaggagtctggaaactgtcctctctcagagggttccaggagttttcgagactcagacacctctaacagcacccccagcactcgccccatcttcacgcgatccctcccctctgtggcccaccttcctccctcgtccctcgtcccagcccagccacgacgacaagtcccacggtggcatcccgacctgggaggggccggacgacgaccgcgaggcccttttccctcggaagccacggactgtgccgcaggacctgtccaaagccagctggctcctccacacattcacccacaactaaattcccaggaagaccgctctgcggacctaccggctgagtctcggtcagtgacaaagaatcaagatggcggaaagaatgaagacactctccttgcagagctgtgtgtggacagaaggcgggcagcaaggcgcatgcgcaacaacagacacgtgtagcaacagacatgcgtaacaacagacaagtgcagcaacaggtctgtgcagcatgcacactgactgggacattcgcctcgtgactgatgttttcctgcgtctgtggagaacctaaaccaccagcgctcctgacaacgaaaatgaacttgcaaagcacttttctttttcccccgcccaccctttctttcacttccagtggctttggagaatatgagccccaggttactctaataatgtgtttcagaaaacttcaccatcatagaaataaatcttaaatattttaatatctgttttatatacgcttccataaatcattttcttgcctccttcacgagtttgctgtcatgcttgcaattgtctaacccattccaatataagacattcatagtttttggttgcattattgtacgttcaaaatctttgatccatctggacaaaattaaagtggtaggaactcaacattatttgttgaatccctgttgcacccactgttttgaaatggctcttttatcatcacctacatccccactcaattttgtatgtaactctcttcttttaattttcttccattgagttgtttatacctgtaccactactacactattttaattgctgtagcttaaattatatttgaaatgtgaaataatgcttgccctccctcattgatttctccttttctatcaattctgacacgttggtctttcagatgaacttcagaatcatttgatcaggtgctaaaatattcctgttgagatactagttattatttttatattacatgttaactctgggacaatagccatcttcctattttagaatctctctatcaaaaaaaagccactcctcaattcctcaagtcttttaacatatcccacacaatgactgtgttatttgcttcatattagttcttcacattcaaattaaatttattcatgggcacttttatttttctattccattgctgacacgtgtttgcttctactccactatgtttttcacacaagtcaaacaatctgtttggaaaccatgtgattctatacctagaaaatcccagaatctctgcccaaaagctccttgatcttataaacaacttcaggaaagcttcaagatacaaaattaatgtacaaaaaccaggagtgtttctgtacaccaactaccttcaagcacagagccaaatcagaaacacaatcccattcacaattgccacaaaaagaataaaatacctaggaatacagctaactagggaggagaacaatctccactatgagaactacaaaacactgcccaaagaaatcagagatgacacaaatggaaaaacattccatgctcgtgaacaggaagaagcaatattttcaaaatggccaaactgaccagggaaatttatagattcagtgatgttgctattaaactaccaatgacattcttcacggaattagaagaaaactactttaaaattcatatgggatggttgcggggatctggcaagatggcgtaataggaaaagctttggtctgcaactcccagcgagaccaacacagaaggcaagcactttctgcatttccaactgaggtacccagttcatcttattgggactggttaggcagtgggtgcagcccatggagggtgagcaaaagcagggtggggcatcgcctacccgtgaagtgtaaggagttaggaatctccatcccccagccaagggaagctgtcaggtactgtgctatctggcccagatactacgcttctcccacagtttttgcaatctgcagaccaagagattccctcttgtgccaacatcagcagggccctgggtttcaagcacaaaactgggcagttgttcgggcagacactgagctagttgcaggagttttatgtttttttggtaccccagtagcacctggaacccggtgtgacacaactgttcactctcctggaaaggg

SEQ ID NO: 1563964 - DNA, 4001 bp, Homo sapiens
attttccaagtatgccaaagaactcttaagatataagataagtaaaatgctgaagagaaaatttatcacaaggactacagcagctgaaaactacactattcccttaccaaggattactttacaggtttccagccaatttttaggggatggtttatttattcctgttactagtataaaatcatacatgaaacacaaaatgctcctccatgcccttctcaccttcgatcggaggtgttccttctctctcttgtccaggttcaatatcctgattgtcagttggtggttcctcttgctgagattcaccgggcttttgagaggtgggggagagtagatgcaaatagaatattgttattaatatcatggcaatagaagtcacaaatatacatactatgtgaaggtagctagtcacaaataaatctgaagaggtttttcctatcttctctgtaagtactcttaagaaaagttattcttcctatatagaatatactttaaggagttacctgcaaggaccaataattctggaacccattttcatcttctctgggctgtattatttattaataagcatgataggaaagtcataagactatttccagactcttaaaaacatacatatgcagacaatatcagaaaataagtctccttgctcaatgtctcattaatgtgatttagtttgcaactattttcagcagggaagtcctttatataacagatctatattggttaacaatgttttagattttctttcagaaaaatacatttctgccaatggaaataagatactgaaatgtactcacagccacgaatgcaaccacatcgggagcctcctgaccatctcctcttcctctggatcttgatctcactcgtgcactcatcgctgcaactagaagatcgtgaactgaagactgcaataaaaaggagtaattatacttgactctttccatggccatctgctgattgtaattttttttaattttgtgagatttccataataggtcctgagttaataataactacgcctggtttccaatcacatcaaataaatctatctgcaaactgctttgtttcttccacagccagctcggcagagaagtgatcttcaagtcctagatcaaaacatggggtctttcctaaagagacttaatttcataactaaactccattatgaagagattttttaatatacagccaccccaggtcccctcctccccaggtccccactgagaactccgaaacctgtcctctttcggcagtttcaggtgcctctgggactcaaagatacctcaaaaagtaccccccaagttttgctccatctgatccctctcccctccgtggcccaacttcctccctcgccccagccctgccacaaccacaaggtcatggcggcgccaccacctgtgaggcccttcctcctccgaggccacggactgtgctgcccgaccctcctgaagcccaccagctcctcttcacacttaaactcccatggaggaacgatcggtggacccacccactgagtctcagtctcaggtgaaagagtcccgacaattggaatgcaaacggcaccctcacagctccgcggcagttcacctcgtgggtgaaggggctgatgggaagacccccagtgaacacgagcactgaggcaggcgctgtcaagcgcgggctgtcccaccctttccctggcccccactgaggaccccagcatccgtcctttatggacagtttcatatgcctccaggactcagatagtgtcccgctccaaaactcacagcatcttggctgaccctcctccccttcatggccctccttcctcccctgtccctgccccgccgcatagctgcctgctaggagaaggatgatgacctcgaggcccttccttctctgaggccagggaccacagtgcccgacccaccagaagcccgccggcccactcactcacacctgttctcacttacacttgagtcagcagagagcctggcgaagaatgaagggaagagaagtggcacctacctacttctgcctccttgtttagacctcagcagtgtcaaccccaccagccaatcccaaacctcgggggtgtgtcacgtgggttgtctttccagccctctcccgcctcctagaggctctgtgccacctggaggaagggcctgctcggtgctgagaagggcttgtttctggcttctggcccctcctgcaaaatgttctgtccttctggatctaggaatgttcccagctctgcatttcacctgcaaatttaccctttaattttttctcagtgctgctacctcagtggcccttaagagggtattcagtcttcccagagatgcgtgaaagcttaggttctcagagagtgcaaagccattttaagcatgataggaatccagaaaaaaatgtaaaggagaaggatgataaacccacatacataaataagcctaaacatttgcacaaaaatccaggccaggtgcggcagctcatgcctgtaatcctagaactttgggatgctgaggtgggtggatttcttgagcccaggagttcgagaccatcctgggcaacatggcaagaccctgtctttacaaaaaatacaaaaattagctgggcatggtggtgcacacctgtagtcccagctacttgagaggctgaggtgggaggatagcttgagcccaggaggttgaggttgcagtgagccaagatcacaccactgcactccagcttgggcaacagagcaagaccctgtctcaaaaaataaaaaatcctgtgacccagcatttctacttctaggactttaatgttaaggaaactgtcttgaatgttgacaaatattccttgcttggccaaacttttaagtcaggcttctgaaacttctcctcctaggcccatctgtgcatttccttgtaaaacccagttttagcaaagagccctgctaagtcaatgtggcatgaaccctccatcctcaatatctgatcatacttgctatcgcatggggttcttcatcttccaccatcccccaggtgatgtctgattccccttggcctgtcttcagcaagaatcctgctaggtgggtttagccagaatcccccttacccctgatgtttccttttagtaattttccacccacggaccgccatactgctccttcgctatacattcccactggcctgcgctgtattcagtattgagcccaatctctctcccccactgcaagatcccattgcaatggtccctatacccatcaccacagtcctaaataaggttttccttactgtgctttaacaactaccactgaatgttttttttctttaaccatgtgaacaaaaatttggatacatgggacttccaaaacagcttaatttataatagcatggtcatggacttgctatataagtaaattatggcacacttgaaaatgaaatatgggtgactaccaaaaccagtgctgaataatatttcctgtaatagtggtgctgttcattttaagttattaacttgaaacatccagttatgtagcactgtgtatgtacaatatgatctcaaaagaaaagagaggttcaatagtgctaccacaccaccagccttcctctcagacagtaagtgtgctttgttcttgtgcaaccagcatgttctggggctccaaagatatatggttctccaaggggaacccagcagataaaaggcagtgctaggggtcataggtctcctgcacctggtgcacgtcaaagagcttcaccatcacctaggtggtctgatcctctgctgtcagagaaggtgtggggggttgggggtagggggacagaagcccactgttactgctttgggcaaaagttagatgggtgcctgcaagacagaaaggagcttgccctgcacatccctgtccaacccctcctgcccccgctaaacccctgggggaaaaatatcctttctgtccgtgcatgcctggacctggaccgttctcagactctgcaggttacccttaaagaagcgcacattctttgagagttagaaagatc

SEQ ID NO: 1563965 - DNA, 4001 bp, Homo sapiens
ctgactagactatgagctttaggcaaaaatttggcactgacatctccggcgcttagtatattacacagcatgaggaagcattaataaatgtgttaaaaagtatcttataaaaatacatgagagatgtccgcagatggcagactaggaagctgcaagctgccattcttccacagaagcataaaacaaaacaaaacaaaacaaaaaacagaaaatagctgaacaaaccatacaggaactctggaaaacactcaaaggtttacggcaaccatgcaaatacccaatcaataaaaagcctccgtcaaaatggtaggaaagtttgtggctttttatgtgtccttgtcccacccctccgcacagcagcagtaagaaatgtttaagattccttcctaatgttttctgtcctcctgttactggtatgtcacaaaatataatgcataaatagacctccaccacccataagcattattctccactctcccttcaccttgaacagcaggtgctccttcatttttgatctccccactaggtgcaataccctgattatcagttggtggttcctcttcttgacgtttttcctcagtgggctgctggacctaagggtgtaagtgtgtgtgcgaataaaaagtcaataatataaacacacaaatgcatatgtgcatcgaatcataaatctaaagacattttccaatagatatatatatagagagagagtaaaatatccatatccataaggcaacaccagaatataatattcctgaaccaaagttgccttcatgagatgccatcatcattttttattagcatggaacacctgtatcagtgcatgtacactcgctcaaaaatattttttaaaataaaatgtgttaatagaaaacatcaaatgctaaaggactcacaatcacaggtccaactggctgggaagactcttggtcatttcctctttctgaggattgggatcttgttacatgctcactcatatctctcactgaaaacaaaatattgttatttggaaaaagtgtgtaagaacttagctatatatatgaacattccatggcaaaatggtgatttgtacttttttaattttgaaaatattttcaaactaagtcacagagcattgataagtacgcatgctttccaatcaaactaaggacagatttgtttgtatcatagtcgaagaggcacagaaaacaccttaacgccatagcaaaagacagaggacttttctgagttttggcttcacaattagactctccatcatttacacatttaggaaaaaaacgggcagaaaattgaaactgaagtgactgctgctttcctcccactctgatatactagggccaccaccacctcctccccactccccgaaaaatcaagttttgttggaatgcacagcctcaaccattcctttccatgaggtccatggctgagatgagaagttgcgacacagagttaaggttatgttcctcactggacacctctgccaggcactctacagacctcggggccgtagtcaccagcccacagcgttcccagtttcctggccccttccttaccacccacaccatcccttctcgcatccctaacgaagagtccagaaactgtcctccctcagagagttccaggcgttttcgggactcagacacctctaacagcacccacccccaggactcgcaccatcttcaggcgatctaccccctccacggcctaccttcctccctcgttccagcccagccacgattaccggcccatggcgcctgcatcaggacctgggggaaggcggaggaccaccgcgaggcccttttccctcaaagccacggactgtgccacgggacctgtcctaagcccgctggctcctccacacattcactcacaactaaattaccaggaagaccactctgcagacctaccggctgagtctcggtcagtgagaaagaacgaagatgttggaaagaacgaagatggcggaaagaacgaagacacaacctctccttgcagagctctgcctagacagaaggtgggcagaaaggcgcatgcgcagcaacagatctgtgcagcatgcgcactcagtggggtatttgccacgtgactgaaggtttcctgcctctgtggagaacctaaaccacaagctcttctgacaacgaaaatgaacttacaaagcacttttctttttcccccgcccaaccttcctttcacttccaatggcgttggagaatatgaggcccaggttactctaagaaaacaatgtgtttcggacaaattcgccatcatagaaataaatattatatatgttaatacccattttatatctgctttcataaatcattttcttgtgccttcgcgagtctgctgtcatgcttgcaatgatcttacccactccaatatgataagacattcatagtttttgttgcatgattgtacattcaaaatcattgatccgggccaggcgcagtggctcacgcctgtaatcccagccctttgggaggcccaagcgggcagatcacgaggtcagtagatcgagatcatcctggctaacatggtgaaaccccatctctactaaaaattcaaaaaattagccgggcatagtggcacgcgcctgtagtctcagctactcgggaggctgaggctggataattgcttgaacccgggaggtggaagttgcagtgagccgagatcgtgccactgcactccagcctgggcaacaaagtgagacctcatctcaaaaaaaaaaaaaaaacaaaacaaacaaacaaaaaaaaaattgatccatctgaacaaaattaagtggtagggactctacatcatttgttgaatccctgtttcacccactgttttgaagtggctcttttatcatcacctacatccccactcaattttgtatgtaactctcttattttaattttcttccattgagtcgtttgtacctgtaccactagtatactattttaattgctgtagcttaattatatttgtaatgcgaaataatgcttgccctccctcattgctttttccttttctgtctactctgacacatttgtctttcagatgaacttcagaatcatttgatcaggtgctaaaatattccaggtgagacactaggtattatttttaaattacatcttaacttagggacaatatctatctttctattttagaatttctctatccaagaaaaagccactcctcatttcctcaagtctttttatgtatccctcacaatgactgtgttatttgcttcatattagttcttcacattcaaattaaatttattattgggcatttttattgttctattcccttctggacagatgtttgctttcacttcactatgtttttcatagaagtcaaacaatctctgttcgcaaacaatatgattctatacctagaaaatcccagattctctgccaaaaagatccttgatctcataaactacttcaggaaagtttccggatacaaaattaatgtacaaaaacccggagcatttctatacaccagcaaccttcaaggtcagagccaaatcagaaacacaatcccattcacaattgccacagaaacaataaaatacctaggaatgcaggtaactagggaggagaaaagtctctactatgacaactacaaaacactgcttaaagaaatcagagatgacaaaaacaaatggaaaaacattccatgctcgtgaacaggaagaagcaatgttgtcaaaaggccaaactgcagtttatagattcaatgatattcctattaaactaccaatgacactcttcgtggaattagaaaaaaaaactactttaaaattcatatggaaccaaaaaagagcccgaatagccaaggcaatcctaagcaaaaagaatgaagccagaggcatcatattacctgacttcaaactataatatgaggccatggtaaccaaaaaagcattgtactggtaccaaaacagtcacatggaccaatgaaatagaatacaccgtccagaaataatgctgcaaacctcacacctattacca

SEQ ID NO: 1563966 - DNA, 4001 bp, Homo sapiens
tgactagactatgagctttaggcaaaaatttggcactgacatctccggcgcttagtatattacacagcatgaggaagcattaataaatgtgttaaaaagtatcttataaaaatacatgagagatgtccgcagatggcagactaggaagctgcaagctgccattcttccacagaagcataaaacaaaacaaaacaaaacaaaaaacagaaaatagctgaacaaaccatacaggaactctggaaaacactcaaaggtttacggcaaccatgcaaatacccaatcaataaaaagcctccgtcaaaatggtaggaaagtttgtggctttttatgtgtccttgtcccacccctccgcacagcagcagtaagaaatgtttaagattccttcctaatgttttctgtcctcctgttactggtatgtcacaaaatataatgcataaatagacctccaccacccataagcattattctccactctcccttcaccttgaacagcaggtgctccttcatttttgatctccccactaggtgcaataccctgattatcagttggtggttcctcttcttgacgtttttcctcagtgggctgctggacctaagggtgtaagtgtgtgtgcgaataaaaagtcaataatataaacacacaaatgcatatgtgcatcgaatcataaatctaaagacattttccaatagatatatatatagagagagagtaaaatatccatatccataaggcaacaccagaatataatattcctgaaccaaagttgccttcatgagatgccatcatcattttttattagcatggaacacctgtatcagtgcatgtacactcgctcaaaaatattttttaaaataaaatgtgttaatagaaaacatcaaatgctaaaggactcacaatcacaggtccaactggctgggaagactcttggtcatttcctctttctgaggattgggatcttgttacatgctcactcatatctctcactgaaaacaaaatattgttatttggaaaaagtgtgtaagaacttagctatatatatgaacattccatggcaaaatggtgatttgtacttttttaattttgaaaatattttcaaactaagtcacagagcattgataagtacgcatgctttccaatcaaactaaggacagatttgtttgtatcatagtcgaagaggcacagaaaacaccttaacgccatagcaaaagacagaggacttttctgagttttggcttcacaattagactctccatcatttacacatttaggaaaaaaacgggcagaaaattgaaactgaagtgactgctgctttcctcccactctgatatactagggccaccaccacctcctccccactccccgaaaaatcaagttttgttggaatgcacagcctcaaccattcctttccatgaggtccatggctgagatgagaagttgcgacacagagttaaggttatgttcctcactggacacctctgccaggcactctacagacctcggggccgtagtcaccagcccacagcgttcccagtttcctggccccttccttaccacccacaccatcccttctcgcatccctaacgaagagtccagaaactgtcctccctcagagagttccaggcgttttcgggactcagacacctctaacagcacccacccccaggactcgcaccatcttcaggcgatctaccccctccacggcctaccttcctccctcgttccagcccagccacgattaccggcccatggcgcctgcatcaggacctgggggaaggcggaggaccaccgcgaggcccttttccctcaaagccacggactgtgccacgggacctgtcctaagcccgctggctcctccacacattcactcacaactaaattaccaggaagaccactctgcagacctaccggctgagtctcggtcagtgagaaagaacgaagatgttggaaagaacgaagatggcggaaagaacgaagacacaacctctccttgcagagctctgcctagacagaaggtgggcagaaaggcgcatgcgcagcaacagatctgtgcagcatgcgcactcagtggggtatttgccacgtgactgaaggtttcctgcctctgtggagaacctaaaccacaagctcttctgacaacgaaaatgaacttacaaagcacttttctttttcccccgcccaaccttcctttcacttccaatggcgttggagaatatgaggcccaggttactctaagaaaacaatgtgtttcggacaaattcgccatcatagaaataaatattatatatgttaatacccattttatatctgctttcataaatcattttcttgtgccttcgcgagtctgctgtcatgcttgcaatgatcttacccactccaatatgataagacattcatagtttttgttgcatgattgtacattcaaaatcattgatccgggccaggcgcagtggctcacgcctgtaatcccagccctttgggaggcccaagcgggcagatcacgaggtcagtagatcgagatcatcctggctaacatggtgaaaccccatctctactaaaaattcaaaaaattagccgggcatagtggcacgcgcctgtagtctcagctactcgggaggctgaggctggataattgcttgaacccgggaggtggaagttgcagtgagccgagatcgtgccactgcactccagcctgggcaacaaagtgagacctcatctcaaaaaaaaaaaaaaaacaaaacaaacaaacaaaaaaaaaattgatccatctgaacaaaattaagtggtagggactctacatcatttgttgaatccctgtttcacccactgttttgaagtggctcttttatcatcacctacatccccactcaattttgtatgtaactctcttattttaattttcttccattgagtcgtttgtacctgtaccactagtatactattttaattgctgtagcttaattatatttgtaatgcgaaataatgcttgccctccctcattgctttttccttttctgtctactctgacacatttgtctttcagatgaacttcagaatcatttgatcaggtgctaaaatattccaggtgagacactaggtattatttttaaattacatcttaacttagggacaatatctatctttctattttagaatttctctatccaagaaaaagccactcctcatttcctcaagtctttttatgtatccctcacaatgactgtgttatttgcttcatattagttcttcacattcaaattaaatttattattgggcatttttattgttctattcccttctggacagatgtttgctttcacttcactatgtttttcatagaagtcaaacaatctctgttcgcaaacaatatgattctatacctagaaaatcccagattctctgccaaaaagatccttgatctcataaactacttcaggaaagtttccggatacaaaattaatgtacaaaaacccggagcatttctatacaccagcaaccttcaaggtcagagccaaatcagaaacacaatcccattcacaattgccacagaaacaataaaatacctaggaatgcaggtaactagggaggagaaaagtctctactatgacaactacaaaacactgcttaaagaaatcagagatgacaaaaacaaatggaaaaacattccatgctcgtgaacaggaagaagcaatgttgtcaaaaggccaaactgcagtttatagattcaatgatattcctattaaactaccaatgacactcttcgtggaattagaaaaaaaaactactttaaaattcatatggaaccaaaaaagagcccgaatagccaaggcaatcctaagcaaaaagaatgaagccagaggcatcatattacctgacttcaaactataatatgaggccatggtaaccaaaaaagcattgtactggtaccaaaacagtcacatggaccaatgaaatagaatacaccgtccagaaataatgctgcaaacctcacacctattaccat

SEQ ID NO: 1563967 - DNA, 4001 bp, Homo sapiens
aaggactccctgcagtctcacttaactatgacctctctaccttcatacatgccattctttcaacttaggataccattttccacttagtaacctggtgaattaattcttcaagactcaactcaaatgtcacctcgcccatgaagcctttcttgatcataacccccatccccaatcaagcatacctcccttgggctcccacaataccctgcctgccccttgtcatactttactctaattgtctgtttacacgctctatcttgcctaccagattgtgcactccctgtgagctgagatgatgttttattcatttatatactttcaatacttaacattaataacacatagcaggtatgcaaaaaatgtctgctgtttgattaatcactacctttaactgtatatttttggaccctgaaaaacaatgctttattaaaaccacaaataaaaatgtcaaagagaaggtttagcagttttgttcatttttattgacctcttctttctttgattaaaaagtggccataccagttcataccttatcattcaagaaagaaaaaaaaaacctctatatcaaattcatgactaacacataggtgcatttagtttgttctttttagttcaaacatagaactacatcctagcacaccactaacttcactgtagtaagtaagacctgaagacattaggatgcgctaattaaaatgggtgtgggaaggcactgcagggatcactgtaagagctttggatcctcattggctgagagaggaaaccctgctaagaaagttgggcatctttgggagaacaataacgctatctggtagggcttggtcaacctggctcgaaattccgcatccagaaagtcctaagcaacagtcccagctggggggatttccatcactttgaaaacaatcattatccttccaatgtgggcagaacaggttggacctgatccacctgcgtgttgctgcagtctggcttggcatggaatgagacccaaggacatgtaatgccaagagtagcccagccccatggcgcagacacacacacacgcacacacacacacacacacaccactccaactcgcactcactgaattccacacaaaacccacaccatctccacgacacacaccactgcattcctgtgtgtagtcacatacagggagtgtcctctcacattctctcacttccctagtcggcccgacccacaccccacattgccggcggaccgcagcctagcctggagctggaagctgaggaggactggttttgttgtatgtaacaaagccccaggcacccaggtgcccggctggatcatctccatccatctctccccgcccccatccctgagctccctgaacaagagaaagctcagcctggggaagtggatgcagggagtggggacgcaaagaaagagagctttaggggtgggcgggggcaggagtccgggcagcttcagtgctctctcgccatgaaccaaaaaggaaggcgaactggcaaagggaaccagctgccttcccagcctttcgccctgcatctattcatacagcaagactgaaaactgggaaataatctaccatccctcccgccccgtgccctcccagtggctgttggagccacaagagctccagcagcccgcaacaaagcgccccccctgcacagacctgttccagcctcttcttggtcagagcgaaggagggcggcagccgagggttctgcccttcgctgctgggcaggaggagcaggggatgggaggaggagcaggaactgggggaggaaggaggaccagaggggataggagatcacagccgcagcggtggtggcggcggccgtggtaggaggaggaggaagagagaaggaggaggctgcttcggtggcagctgctgaggatgctctggcgagaggcagggctgggtgcgcggggtgcgggctcacgtgcgccccatggcccggggatgcgcgcgcgtctgggtgtgtgagagcatctgggtgtattttgactgtgattattccaattacgacctagtctggaacttgtggttcctgcagccaggcggaagtgaaacccttccagtctctcaagcctgactgtttaggtcggtgggatgggggctggggggagcgagggcggggagaaggtgcccgtacccctttcttcaatcttctttctgggcactggtagcttgcatcaacacatctctctgaaaactctatagccaaggagaaaggaaagagaccaaggacagttaccatcaccaacacattgcattgagtgagcactcacaccgtactgggcaatgcctggactagtcagaagataagttctgttctcactgtgatcgacatttacaagttggagtgcctataacttcatacagcatttacattctaccctttctcctctatttctttccattgcaataactctgtccctgtaagcaagtggcataaaattaattctctactttttagtcagtttatccaatcaacattacgctggcccctggcttctctggtgacaaggggtcaactaatcctcttggcatttttcctctaggagtggggtactcagtttagatgaggaccaagactggtttcttggggatcagagggttgaaggtcatcacggatccagttggagatccagtttggacctgcatccctaaagctaaagtaagaaaccaattgtcagagacatgaacttcccccatgattcaattcttggtgtttggagccctgatgaaaatctccttcctactcttgatcttttcagcatagcattttgcttcatcttgcctaatggcttatgcttgttgagtaccttgagatttacaaagcactttctaataacaacttccctaccatggcatctctgtaaattaggcacagaagatatcattattcctgtgttacagataagaaactaggtctcagcatggttaagtggatgtgcctaaaattacatgctaataagtggcagatccagaactggaacccaggcctttggatttccaggccaaagttcctttttaaaattatatcttggaaagaaccttcagattcatctatttatctccatattggaagtaatggtttagtgagggaagttgaaattgctaactagaatgagagtttaaaaaatattttcagttaaatcgatgcattcagatgcaatccatagatcagtagacaaaaaagaattaacttttaggcctcagaccccaatcagcacacataattactcctttgattctgctaccagctactacaagaaaaatttgaaatgaagttgcagaaaggacaataagaaaagagtctgaatttcccagggtgataaacttgtaaatgattcccccacaagctagatctgtctcctctaagtcatgagaatgaatcattatttgccatccatggaggaaacctatctcctacacaccagcctgggcaatcccaagcatgtggatatcaaacaagagaggcaggttagtgcagtggacaaaagctagactctggagacagactgccttagctggaaaaccttggaagatgacccaatatcaatggcttctcctgtaaaatgggtggtagaggtgtgagaatgaaatgaagtgatgcaaatgcttaagatacagcaaggctcagtaaaacaataactgttattattagagaaaaaaacaacttcattaatgaatctttctccattaaaggcagaaatgatttattaccaatagtgtcccaacattgagggaatgcagaggaagagattgcttttctctgggataggagagataaagtgttggtgtcaggaaataggcatgatacacaagtaaaaatgagagattctctacaatattgaggaccaacatggaacttagaagagaacgggaccagaagaggatgatgaagagaggacacttaagattgggtgatggattatgacccagattcttgccaatcatggctactgtgattgaatgggaggatatgcctgttaatggttctgcaaca

SEQ ID NO: 1563968 - DNA, 4001 bp, Homo sapiens
attgtgaacaaagttatacattagtttataataagccttcctgaatggccagatcaaacactgactgaaaggctcaagaatctcagacatgtggctagttataaagacaaccttaccatgaggatgcatattggcaaatgtacctgaagcaccaaatagactgaagaatcagcaggactttgaattcaaggtatttttttttcttttaagtagtcttgaacatccacaagaaagtactgttcaaaccatcccttaaggagaggaagattcatctgggcttttctgtttgcttgctagtacactggaaacttggctcatttatttcccctgagagggtttgggcacaattttctgtagagcagcaagggtttcattatgaggtcacctgaagtattggcaaaaaatggaaatgtcagcttctctgattttgttgacctcagcatcagtgggcgcttgctcttcagaagtattcaaagggtttcaaagcttgacactctcgatagcactaaagatttgtgcaggcatgtaatccccttcttcagccacttcctgaatttgtggtgaatacaacatgagagctgcaggaactgtttgttctttggcataactgtcaaataagacctggtctccacattatggtacaccctaaattcctcaaaccatcccttactcccaacaaatttttttctggattcatttcagtgtctaaagacatgtctctgaaaattcctcttgcatagtcacaaatctcttgcatggaatgtggttcattattcttcagtttatcttcaatccagagatttaacttcatttccatcttttccatccttgggtcatgaagaacaaagcatcttttaagttatgcaggtgtacaagtggcagtactggccatactaatagtttcagctttctttgtggtatgaattgtagattgattaacactatataagtgacctacaaagctatttattttaccttgaagaagtagattgagaatgtcctgtttctcttctaaagacatcacccttcttgcccttctgacaagtttctatggtgtcagtgcccttgtacttgcttcatatctgtagaagccatgtttcagctttatgctaattaatgtaacctgaaagttacttactagagatttcatatccctgcacgtcacaaagcattagcatatgacatttaagcaccaaatggtattacaaacaccagaaggataaattataatatattggtgtgctactcagtacacatggggctgtctaggggaaaacaggttgaagaatgataatggaaacaaatgactcagaaatgccttcccacttacaatatagtcagagagacaatattgtggcaacgtggactgattctcatatactgaattcaaaattttcagttatcaaaaaggtatacagaagtaaacctacctatacccaaatttccaaaaagaacaacttatagttagggagggattattgtaaattctactctacattatcagaaagaaagtcactgttgatatattcaagacagtactgttgctatgattacccttggcttaacactatgaatttaattttatgtgaaaagcaaacatagtgtaaatgtattttctgtcagcccacagtaaatcaatcaaacattattctctgacaaaatgcaacctctgaagacgtagatgtaaagggccggcaggccctgaacagtcaatcctcaagaaacaactacctaagaaagaaagtgaaaatgaaagaataaactagcccattttcaatgcccggccactgatactttacttttatcccctcctcctgggaagatagagcgaagcctggctttcttattcttctcttcaggggccatgggaagtggtttggagctgtggttgagtgctgaagaatcccggttgttactattcatcctcagtggaggagccgggggtttctcttcattatccagaccgtcagacattttcagttacaactaatttcacagctcctaaagaaaaggagggaaaaaaaaggagttgagggagaagaggtctaaaaacctaataaatatgtggattctaacatcttagaaacaaaagcattgctctcatgttttctcaggttttgtgtgaggatcgtttttaggggtttctcttctggagggaaggaagttacctcccaaaaaccctgatgcaattttcaaaaaaggaaagtgaaggcagtaattaatggcttttcaaatattataaaaatatgtaagtccctttgcttttcccacattgaaactctattttctcctccccactaacagtgttttagtgaacaatttacaatcttattttaaaattctatcctgatgattgtagtggtcaggtgatcagcctcctcagagtttggaattgacacaggtttggctgttgatttttaatggcccataacaatgacttgttagctgctttaacatcgagatgtccttggtgtttatttcttacatgtgtgtacctcagtcacaaaatgcactctcctgtttttatgataattaaccgagaaaccatcccatagatctggcagtttcaacagagttggagtgtgctgttagggtaaacaatgttccatattctcccaagcaggcagaagataaaggtgggcaaatgttggagggccagttcccgaggagacaccataaccttactccctgccacattttacgtcttggaagaaggaaaaagggaggtgacagaggtagctagctgtaagatccagtctgggttttaggagcttatttgctctgaatttcattattctttttttttttttttttttttttttcagatggagtctcaccctgtggcccaggctggagtgcagtggcgcaatctcggctcactgcaagctccacctcccaggttcatgccattctcctgcctcagcctccctagtagctgggactacaggcacccaccaccacgcccagctaattttttttgtatttttagtagagacggggtttcactgtgttagccagaatggtcttgatctcctgacctcatgatccacctgcctcggcctcccaaagtgctgggattacaggcatgagccactgcgcctggccaagttcattattctttagtatcttgtgtctacatctgagtatatttggttttcattcccctgggaggataaagtaaactggaaaagcatgaactccccaagggaatgtttctgtctccaggtattttcctactctaattcaagtccttccataaggtcctgaccccagcacaagtcaggtactaatagtaccttccaaatgaatccccagtttgaattcaaggaaaatcaaatccctttaaaactatatctctgtaaacttatcaagtattacctggtactaatttaggaacattacaactctccaaacatgacttagcattatcactttgtttccacaacatttactatgaacaaacctaagaacaataaaaacaaaaacaggggtctactcattaactgttgtgctgaaaaattatctatcaatgctttccggccctttagtggttatagtatgtttattactctcagtaatgcactctaagttacatcatgttaggtagagaattttaaaaattttattttgttctaaattctctcaaacatatacagtctgtaattactcaagaataggttactatcaattaatagcttctccatctgcacaggtgattgacaactaacaattggtttgattttgatttgaacgggagatcgcttttgttttgctaagtgtcatgtcttgcattatcttaatgaattaagaccaattctatattttttcagtaataatgatagtgaaaatactaagtaataaatggtttgtcactatcaccaacaatttcataaaccttacattttcctatttaggtcaaactacagaacaaggtacaatgaaaaagtaattgtgatgtcaaggataaagtatattcagagatactatcggtactagagtaa

SEQ ID NO: 1563969 - DNA, 4001 bp, Homo sapiens
tccacctctgaccaggaaattctgcaacctgtgggaatggttagctggtgagaatgtccctagggtcctgtgtcccctagcttataaccctattgcatgtgaacctccttttcctgtcagatctctcctacaaggcccagctgcctgtccggagacttgcagggtcagctccttgacatcctaaggtctctctgacctcaggattctcagctgtcagctcttgcccaggctacctcctagtctcttcccattttgcttcttgcatgggctgggggatatgacacttgtatccagaaacagaggcttacaaatggctctctctccaagcctctgcctgttagtcattcattaccatatcaagtctttttgcccaaagttgcccctgattggaggcctcaagtaccaaatcacagatcttgcccaattataattttgcaaatggcccagtgaaaaccgcactgacctttacaccttgctcatcccagaacagggccacggtgttgtcaccaacaggaatggacctccttctgttccaatacctcagacagccatacacttggcctggatttgagtctgcaaaaccatgaggggagcaagactaacatggctaaaggcttccctgctgaaagccgttttttaaaaatagcactgcaaccgcccccatcatgcttcccaaagccaagccactcacccttctctccttcgcttctacagaccaacagcccagaaccctcaagtctagaatctggaactggattctgaaaggtgggaccaaaaaaaaaaaaaaaaacaagtggggcctctatctctctccttgcctgcatccccctcttcccaccatcccccaccccaccccaccccttaaccaccacctagggaaggaaaacttgccagagtaagaatctaaaatgttcagttcacccaaaagtgcggcagtaatcttgccagagccagttcacaaactgagggcaatgtcccccagcgagctaaggggaacaggagagaaggagaggcagtggacccaatgacactgctccccagacaaagagagggccaatccagggaccctgagctttctgggggcgttattgcatcattccaatccccacaggagaagaaaagggtccccctgttattaccatccccccaccaaaaaaaggggagggggataaagaaaaataaaagaaagaggggaaggcgcccgtttaagaaaatcgtcactttttctctttcctcgtgtgtgtgtgtgtgtgtgtgtgtgtgtgtgtgtgtgtgtgtaaggggcgggggggttctaccccggacttggccagaccgtggccacaccccctccccttttctagggaactgctgtcacagctactggggctgggtaggggggcgggcgggggggtgaaagggaagacttacaggctgacgtagctttcaaggcgggttttgcctcaagcggcccaggccccagtaaacgagtctagggtttgaccaagcgaaggagccccggccctctgggaacggccctgacacacccacttgtccgcgaactgggatcatgcaaactgctcgcttggtctcagggctccggggagccacgtaggagactcgaggctggggcacaaacaggacaggaggggggtccggaaaggcagaacatctgcccagcagccttaaagcatcatccaacagccaccccctcccccgcggtagcccgggtgcagttagtcgcgggatttacctgccacggatccagccaccccgtcaagacctttcctctacctccgagcgctccagctggcggggctggggagccgcagccccgcggccgcagccgcagccccgggcccagcccgctccccctggctcttctcccgcccccgcacactggctcgaggcggggaaaagctgcagcccccagtgcgagatcccagacggttagctggcacagctgcccgcccgcggtagagcccctgctcggcaaccgctccctagcccttctctgctattacgtcacccgagctctgcaccttacctaggccaatcagatggtgagcataaaactaaaatcgccctgagtgggctactggggaccaatcttttgtttccaggcaggaagcgcctgggagggggaaaaaactgaaggggagggaacatggagagggaaagggaaaggagatggaaacttctacactgtcagggttgtctagacagaggtggggccatcaaaaaagaggggcacctgacaggatggagaggaggggagagttcatgtatcttccttaattgctcccctcaggagaattgagatttcagatgaattttcaggggacgaaatctgtacagctacacgggcacactttattcgggggaaaaaacggtttcgatttgggacaccacctgtcagccaggcaggttaaactgacggaatctctaaaatacacagaaaactaagagagacagatgtggcagtggaattcaaagagatggcagtctagatcgggaaactacttttctgcatatgaagcacacacattccaaaaagcaaggaattatacaaaaaataaaaataactctacttcaaatggagcttaaatgcgattctctctgtccatcctttcccttaaaccttcaaagctttctcttgtctttaggatacggttcaaatttttgcagatggccaaagctttataaaatctaactccaaaaataatctcttgctactccaaaatccatactccccatgatttggctagattatgtaaattatggtgaatcccagcaaggcgacagtaagctgccataaaaagtcaaataatacaaaacaataaggacattcaaattataatgatgtaaaatatgcctacagaaaacgatcagaagaggacataaaattgtaaccgttgggttaaactagtagtattatgagtaactttttctttctactttcaaatttattttcataaagataaatatatcctcacatacttaaatggccaaaatagatcatgacccttcccagtgaacttttattcaattttctccacactgtgtaacatccagcaataatttctccataatgccaacaaaataggtttcaagaacaagagtgaactaatatatctgcccaggtccttttagtaaaagtcgtacaaaagagctacagatgaccacacgcggtggctcacacctgtaatcccagcactttgggaagcccaggcgggcggatcacctgaggtcaggagttcaagaccagtctgaccaatatgatgaaaccccgtctctactaaaaatacaaaaattaactgggcatggtggcatgcgcctgtaatcccagctacttgggaggctgagacaggagaatcacttgaacccaggaggtggaggttgcagtgagccgagattgcgccactgcactccagtctgggcaacaagagcaaaactccgtctccaaaaaaaaaaaaaaaaaaaaaaaaagagctacagattcgccagacaaaacatctcaggcagttgaagaatgggatgcctcttttggactgattcattttaaattgtgatgatacagggaattgagaaaaacaacaacaatgatccactctatgccaaaacaagaaagagggaggcaaagactaagtaaacgatgtaatccagaccatttttaagggtcagtttgcattttattttcctaaattcaaaatatatatattaatgcatatatgagtattacattaacattgtagaaagtggtagagctgggatttgtatcgaaatgagtccaaagtccatgctttttctaatatgatacagtttactactgctaagaattaaatgtggtattactggttttgttaaaatacatacttgctttaaaagaaacagactatataagattggcatttttaaaaaatcaggcatttttaaaaatagcttttttggtgtcgtggttgtctttaatgcaaaaatatacaacactctttctcaaatccttcattaataagttggaatca

SEQ ID NO: 1563970 - DNA, 4001 bp, Homo sapiens
ccacttcccactggctcctgacttgctgggaaaagaaaaggaggaacagccctcacgcctgttctttgctgatggaagaaaggtccagttcccgcccccacatcctccctccatcactgccaactctcctaaggaagtgctaggctaatctcaaagacagatgtctctctaagtaagtactgacagattggagggcatctactggctacattggcctgaatactttcaaagtcatgagtccaatgctttctgcccattctctttagtttggtggaaaggattttcttttgctgcctgagtgtctttacccctcagtactctctgttctagaactggcagagaaataagcacaacaaatctactttagatacagcttaacttactgaaagaactaaggttagagaaaagcacagccagtcagtagggatacctcaaaaaaaccaggatgcctgattctgttcctggatctcttttggagcatgactttgccacctgcctttcctggcatattgtgtggtgtatggcatgcatattacataatccagggtagattaatttacattcttgattttatacattggaaagttatgttcccttaagatggatgagtaactgataaattattgtcttatgagttgtaatttttgaaggaagttttgattgaaaatacagggtcttgctctgttgttcaggctggggtgccgtggttcattcatgactcactgcaacctcgaactcccaggctcaagcgatccctcccacctcagcctcctgactagttgggcaccacacgcccagctaattttttttttttttttaatttttgtagagaacaggtctcgctaagtccgccctagctggtctcaaactcagccgtaaccagtagctgagactaagatgcctgccaccgcaccgacgttcgcctccattatcggtcttcagatacatggctgctggcactttcacgctaatctgactccattttgaaaaaacacattttctaaggtagccacaacttctgtgctctccgtgtaagtgtgcccaaatacacatcctgacataaactcctcatcatttgaaatccaaaaaagcaaaaaacaaacccaaaggacaacaaaaacttcaagcagatcctttgaaaagccgctactgccctgaaaattctgaagtctgagatttcacgtgtacaaactgctcaatctgctgaaaaccaggcaaacctctcgatatacgcgcccaccccagcacaccgtccccgactgtggtaatggagacgcgccccagacctgccggacagagcctggcgttctcacccgaaccgcccgctcagaccggcctattcgcgacaccgcaagctttccattcttcccaactctgcttcaatttctcgaaatgtccaaagaaaaatcaatgggtgcctcctatggtgcacctacgatggtgcccaatgcaggaggaggttcagaatgtgggggtcttcctcgtgtaacccccagctacccgctgccacccctctccttctgcctcatcccaaccaaccttcccaggatgaccaggaaaacgagggtcctgcagggaatgtctctgatggagtagcttgggctcctcagccaccgagggacaaaggggctggctccccgccgccaccccaaggcattttactttgcagtagctttcattaacggacttcactcacccttgtggaactcttcactgctggaggccgcagggacttggggtaccttgaagctcctccctgtggtctccggtgagagcccgggagcctggtgggcgcccggaaagtctggaaatgaggagcagcttctagactcttcagggaagtgcgtgggccccagagtgcaaagcgcgtggtgggggcgtggcagagaggggaggcaggcatggaggcagcgtggcagcggaagtaggggggaggagtggtagcatttttccctagacctcgcgatgttggggcccgagataactactgtctctggaactaggagtgcagataagccacttcaacgtagcccttagcttgtcgagtcaaagggttccaccccaatacaggctctccaccctccctggacccctgagcactacctaagcaggacctaatggagcccagaaaatgtatggatcccagaaaagaggggtctttttgagtccaatcatggctctattgtggaactgagaggtgacagcgagctggcaaccctcgcagccgtccctcgcactccgcacctcctcggccttggcgcccactctggccgcgcttgaggagcccttcagcccaccgctgcactgtgggagcccctttctgggctggccaaggccagagccggttccctcagcttgtgggaaggtgtggagggagaggcaccggtggcaactggggctgcgtgcggcgcttgcgggccagcgcaagttccgggtggacgtgggctcagcgggcctgcactcggagtggcccggtgggcccgcaaggcccgggcagtgaagggcttagcacctgggccagcagctgctgtgctccatttcttgccaggccttagctgcctccctgtggggcagggcttgggacctgcagaccgccatgcccgagcctccaccccccccgcccccccccgaccaccgacaccccccgcccccccgccccccccgccccccgcccccccgacccccgaccccccgccccccgcccccccaccccccgccccccccgctgccccctcaccccagccccactccccgcccccccgcctgctccccctgccccggccgtcggctcctgtgcgcaggagccttgcggaggagtgccgcttcctgctccagggtgcccagtcccatcgactgcccaagggctgaggagtgcaggcgcactgggcggaactggcaggcagctccacctgcggccccctgtgggatccactgggtgaagccagctgggctcctgagtctggtggggacttggagaatctttatgtctagctaagggattgtaaatacaccaatcagcactctgtatctagctcaaggtttgtgaacacaccaatcagcaccctgtgtctagctcaggatttgtgaatgcaccaatcggcactctgtatctagttaatctggtggggacttggagaacctttatgtctagctgagattgtaaatgcaccaatccgtactctgtatctagctcaaggtttgtaaataccccaatcagcactctgtgtctagctcagggattgtaaacgcaccaatcagcaccctgtcaaaatggaccaatcggctctctgtaaaatggaccaatcagtaggatgtgagtggggccagataagggaataaaagcaggctgcctgagccagcagtggcaatccgcccgggtccccttccacactgtggaagctttgttctttctctctttgcaataaagcttgctgctgctcactctttgggtccacactgcctttatgagctgtaacactcaccacgaaggtctgcagcttcactcctgaagccagtgagaccacaaacccaccaggaggaacaaactccagacgcactgccttaagagctgtaacactcaccgtggaggtctgcagcttcactcctgagccagcaagaccacgaacccaccagaaggaagaaactccgaacacatctgaacatcagaaggaacaaactccggacacgccgcctttaagaaatataacactcaccataagggtctgcggcttcattcttgaagtcagtgagaccaagaacccaccaattctggacacattttggtgaccacgaagggaccatcgcctatcgccaagcagtgagactatcgccaagtggtgagaccatcgcctatcactgagcggagagattatcgcctatcgccaagcagtgagtaccatcggacccctttcgcttgctattctgtcctatttttccttagaattcggaggctaaataccgggcgcctgtcggccagttaaaagcgactagcgcggccaccg

SEQ ID NO: 1563971 - DNA, 4001 bp, Homo sapiens
gctgcattgctctcatggcccaagccatctcaatgtcaggctgcaaaggagtgaagaatgccaggtcataaatctccccatcctactactgaatagcaaattaaggaagtatgtggatgtctagttaatgctcaagagggctaccaaacttgatgttactgtcaaatgataaaaactggagtaataaatttggacaataattattttgtctgtatgacaaccaaaaaaagctacctacacagtataatgaacacaatgagccaccggctatcttttcccagctgctagtgaaagctgggagactaaataaagcaggagataaatcaccttctcaggattgagttaaatcattgtaaaactgaaataatatacccatcaattccactgagttgttgggagaacaaagaatcaaaatgaaaattacttttcacttttaagactgaagcatgtcataatcatttttgtttaccaaacagccaattccccatactgtaacacctagaaatgaattagcacatgaaacaggtcaaggttataataagtcttaccaagcaccccactggaggttccactggaatctcccattccaacgagaccgagctatttcactgactccagaaaaagccatttgcatttgttacctccatgccttagaccatgcacttttcccacgtgccaatccatgtcctttgtccacctacactttgaggatacaggtaaagctccatttcctcagtcaagtcttccactgccttggccccttagggatttctccttcagctaaattatttggatcttatggcctgacccactcattatatgtatcacactcttatttgggtgtttttactattctcacatcctcttgtcttgttttggaaaatacctcatatactttctcagtaattttctaaaccagacacaccataagctgcacaatggaatccctcagagaccctttaaaaatactgattcttggctctcattacccagacattctgatttaggtggtatgaactgcaatctaggcagcgggatgtttaaaagctccccagtaattctaaagcgtggccaacttggggaaccacttccacaggcgttagtcctgcgtttgtggaccaagattaaaacgaactgaacgaaggtgcagtttctggtgtaagtggagagggtctgcagtagattatcaggacgtgaagttataacttagtggcaggcaggtcctgcagagatcccaggctagctgagtgggtgggagctgtgggtgagtcatactcacatcgttgccatacgactctgctgggagagaaagcgcatgtgccacagacaccaactccccggaaacctagaaaggaggaaaaagagttcaaggctccccccaaggccgggcgcggtggctccccccaaggccagtcgcagtgactcgtgcctgtaatcccagcactttgggaggccgaggcgggcggatcgcctgagcccaggagtttgagaccagcctgggcaacatggcgaaaccccgtctctacaaaaaatacaaaaaatgtagctgggcgtggtggcacgggcctgtagtcccagctcctcgggaggatgaggtgggcggaagatctgagcgctggaggtcgaggctgcagtaagcggtgatcccaccactgcactccagcctgggcgactgagtgacaccttgtctcaaaaaagaaaaaaaaaaggctccacctggctcgacctccccactcacccgaccccagaacagcgtctcaccggctcatcagttccactggtggccgccatcttgcaacccccgaaagcgtggctccttccgcagctgattggaaagctgagccggatcagagtccttctcaactggcggctccaccgtgcgctctccctccagctgaggaagttgctggccccgccttaccctccccgcacaggcgcagaggtggagtactgttgcgtaggctggactgcttgagagatctgaggtgattgactcgtcagtaattttcggtggtgatcacgggaaaaggttgtgttaaaatagtgcccctttcttgtcttcactgcgccgtgtgcccagcaaaaattcaaatttactctccattcatatgcgcatatacgcacatgcgcatacacatacacaccagtaccccaaaccagggagtgattcacgaaaatgcatggtgctagggcgcagagtgcaggaatgaagaatttagtccctgccttggaacaactagatatagtgagggaccggatacagtagtgctcacagcatagcatcggatgatgtgggagcatgaatgggggatacctaagctgaatcatgaaggggagcttagccaagcagacagggaaagacagtccaggcagagggaatagcacaaacaaagccattagtggcaccttgctgggaattacaaaagcagtatagctgaatccaaagtggagtcatctataatcatttgagggagcacagggcctttggtatgctgaatgttaaagagtagagagtttacccttagagcaacagtaagctactgaagatttttaagtaggccagcttcatggtcagatttaacttttatgatcactctaacacaacatagaagattaatttgaggaagacaaaattggagacagagacaccagtttgaaggcagtgggtgatgaaaatctaaactaaagcagtggcagttgagatgaattttgagaattaatggggcttagaatcaatagaactttttgactaatttcatgtagaggataaaggggaatttggattctagtatgactcccagatttcagaataggatttgggcataaatatcgttgagcaagggaacacagaggagaaatgatgagtttaatttgagaagttaagttataagagcctatgggtcattcagatagaattgaccaggcagagggagatctgatcagagataaatttgatagttggtacttcaggtttagttgagctttcataagaaatctctaaagtactgtaaagacataaaaagcagcaggtcaagcatttatgaaggaaaaaaggcagcaaaaaaaaaaagttgtcgattgtctgtcaaagaacaaggcagagcctcacagaaaccaaaggatgtaagagcttctagaaataagtggtgagcagaccccagtactctcagttgagtatactaagcataaaaatatagggaggttgacaaccttagcaagagcaggtttagtggaatggtcattgacaacctgaacaagggcagaagtcagatggtagtgggttgaagagggagtgggagataaagaagagatgttagtgatcatggaaagttcttccaaaacaggtgcagctagaaagaaacatgaggtctagggactttaaaaaaaaaatcggggtaaagatcagataatataaaaatttaccattttaatcatttttaagtgtacacttaggtagtgttaagtatatttacattgttgtgtgacagatctccagaactttttcatcttgcaaaactgaaactctgtatgcattaaagaacgattctccactttcctctccttttggcccctggtagccaccattctattttctgtttctatgaatttaactatgttagacactgcttataactggagttatacagtatttttcttttggggactgaataatgtcctcaactttcatccacgttgtagcatatgaccggatttcctacatttttaaagctgaataatattccattaacgccgggtgcggtgactcatgcctgtaatactaacactttgggaggctgaagtaggcggatcacttgagatcaggagtatgaaaccagcctggctaacacggtgaaagcctgtctgtactaaaaatacaaaaaaattagccaggcatggtggcgggtgcctgtaatcccagctacttgggaggttgagacaggataattgcttgaacctggaaggcagaggttgcactgagccgagatcgcgccactgcactc

SEQ ID NO: 1563972 - DNA, 4001 bp, Homo sapiens
tcagcatgctgcattgctctcatggcccaagccatctcaatgtcaggctgcaaaggagtgaagaatgccaggtcataaatctccccatcctactactgaatagcaaattaaggaagtatgtggatgtctagttaatgctcaagagggctaccaaacttgatgttactgtcaaatgataaaaactggagtaataaatttggacaataattattttgtctgtatgacaaccaaaaaaagctacctacacagtataatgaacacaatgagccaccggctatcttttcccagctgctagtgaaagctgggagactaaataaagcaggagataaatcaccttctcaggattgagttaaatcattgtaaaactgaaataatatacccatcaattccactgagttgttgggagaacaaagaatcaaaatgaaaattacttttcacttttaagactgaagcatgtcataatcatttttgtttaccaaacagccaattccccatactgtaacacctagaaatgaattagcacatgaaacaggtcaaggttataataagtcttaccaagcaccccactggaggttccactggaatctcccattccaacgagaccgagctatttcactgactccagaaaaagccatttgcatttgttacctccatgccttagaccatgcacttttcccacgtgccaatccatgtcctttgtccacctacactttgaggatacaggtaaagctccatttcctcagtcaagtcttccactgccttggccccttagggatttctccttcagctaaattatttggatcttatggcctgacccactcattatatgtatcacactcttatttgggtgtttttactattctcacatcctcttgtcttgttttggaaaatacctcatatactttctcagtaattttctaaaccagacacaccataagctgcacaatggaatccctcagagaccctttaaaaatactgattcttggctctcattacccagacattctgatttaggtggtatgaactgcaatctaggcagcgggatgtttaaaagctccccagtaattctaaagcgtggccaacttggggaaccacttccacaggcgttagtcctgcgtttgtggaccaagattaaaacgaactgaacgaaggtgcagtttctggtgtaagtggagagggtctgcagtagattatcaggacgtgaagttataacttagtggcaggcaggtcctgcagagatcccaggctagctgagtgggtgggagctgtgggtgagtcatactcacatcgttgccatacgactctgctgggagagaaagcgcatgtgccacagacaccaactccccggaaacctagaaaggaggaaaaagagttcaaggctccccccaaggccgggcgcggtggctccccccaaggccagtcgcagtgactcgtgcctgtaatcccagcactttgggaggccgaggcgggcggatcgcctgagcccaggagtttgagaccagcctgggcaacatggcgaaaccccgtctctacaaaaaatacaaaaaatgtagctgggcgtggtggcacgggcctgtagtcccagctcctcgggaggatgaggtgggcggaagatctgagcgctggaggtcgaggctgcagtaagcggtgatcccaccactgcactccagcctgggcgactgagtgacaccttgtctcaaaaaagaaaaaaaaaaggctccacctggctcgacctccccactcacccgaccccagaacagcgtctcaccggctcatcagttccactggtggccgccatcttgcaacccccgaaagcgtggctccttccgcagctgattggaaagctgagccggatcagagtccttctcaactggcggctccaccgtgcgctctccctccagctgaggaagttgctggccccgccttaccctccccgcacaggcgcagaggtggagtactgttgcgtaggctggactgcttgagagatctgaggtgattgactcgtcagtaattttcggtggtgatcacgggaaaaggttgtgttaaaatagtgcccctttcttgtcttcactgcgccgtgtgcccagcaaaaattcaaatttactctccattcatatgcgcatatacgcacatgcgcatacacatacacaccagtaccccaaaccagggagtgattcacgaaaatgcatggtgctagggcgcagagtgcaggaatgaagaatttagtccctgccttggaacaactagatatagtgagggaccggatacagtagtgctcacagcatagcatcggatgatgtgggagcatgaatgggggatacctaagctgaatcatgaaggggagcttagccaagcagacagggaaagacagtccaggcagagggaatagcacaaacaaagccattagtggcaccttgctgggaattacaaaagcagtatagctgaatccaaagtggagtcatctataatcatttgagggagcacagggcctttggtatgctgaatgttaaagagtagagagtttacccttagagcaacagtaagctactgaagatttttaagtaggccagcttcatggtcagatttaacttttatgatcactctaacacaacatagaagattaatttgaggaagacaaaattggagacagagacaccagtttgaaggcagtgggtgatgaaaatctaaactaaagcagtggcagttgagatgaattttgagaattaatggggcttagaatcaatagaactttttgactaatttcatgtagaggataaaggggaatttggattctagtatgactcccagatttcagaataggatttgggcataaatatcgttgagcaagggaacacagaggagaaatgatgagtttaatttgagaagttaagttataagagcctatgggtcattcagatagaattgaccaggcagagggagatctgatcagagataaatttgatagttggtacttcaggtttagttgagctttcataagaaatctctaaagtactgtaaagacataaaaagcagcaggtcaagcatttatgaaggaaaaaaggcagcaaaaaaaaaaagttgtcgattgtctgtcaaagaacaaggcagagcctcacagaaaccaaaggatgtaagagcttctagaaataagtggtgagcagaccccagtactctcagttgagtatactaagcataaaaatatagggaggttgacaaccttagcaagagcaggtttagtggaatggtcattgacaacctgaacaagggcagaagtcagatggtagtgggttgaagagggagtgggagataaagaagagatgttagtgatcatggaaagttcttccaaaacaggtgcagctagaaagaaacatgaggtctagggactttaaaaaaaaaatcggggtaaagatcagataatataaaaatttaccattttaatcatttttaagtgtacacttaggtagtgttaagtatatttacattgttgtgtgacagatctccagaactttttcatcttgcaaaactgaaactctgtatgcattaaagaacgattctccactttcctctccttttggcccctggtagccaccattctattttctgtttctatgaatttaactatgttagacactgcttataactggagttatacagtatttttcttttggggactgaataatgtcctcaactttcatccacgttgtagcatatgaccggatttcctacatttttaaagctgaataatattccattaacgccgggtgcggtgactcatgcctgtaatactaacactttgggaggctgaagtaggcggatcacttgagatcaggagtatgaaaccagcctggctaacacggtgaaagcctgtctgtactaaaaatacaaaaaaattagccaggcatggtggcgggtgcctgtaatcccagctacttgggaggttgagacaggataattgcttgaacctggaaggcagaggttgcactgagccgagatcgcgccac

SEQ ID NO: 1563973 - DNA, 4001 bp, Homo sapiens
tcagataaggagatgtcattgcaggaacttcaccccaaagtgctcacttaaaaatcatctaaattttagtttttttgaggaacctcgaaactgttctccttagtggttgtactaatttacattcccaccaacagtattcaagagttcccttctttccaaatccttctctttctgttttcacttcatatactcaaacatatctgcatttcactgaaatttgctcaagaggtttgtagccttccattcctgaatgaatttataaataaatatatctttacaatagatcagcattagttgagaaattttcccatattatatatcctccaggtcaaaaccttcagatgatatatatcagaatgtcttatttatatgttttggggcatatttttaacactagttattatatagatcatagtttggcagaatatttataaaagtgtgaaaatcccctgaacatatctatctgaaacatgcacattagttatttcattaacatatattttccaagatcattcaagtgcattgtactatttcacatacccaaatctgagttatctatttctctttatatcatataagtaatttaaaagaattgatcattaacttgataaatgtggcccctctgcacatattttgaagaataccaaatattctatctattcttctctctaacttctccatcctaagacccaaatcaagccagagtaggttattcaaattaactgattgactcttttttgttaaaaggcttacttaccctttacaacaaatgaacactctgttttcaaataattgtaaaaaaatgaaaatatttaacattaacagaatattgactaaaatttaatctcaatttgatgatacaggatatgctaaagaccttgccttaccttgaaatcctcatgaaaaatatttatctatatatgttcagaaatgctagtaataaattaaattgttctagtcacctctcaaatagatttatttggcaccatatcaaatggcaagataaaatttgtgtatctaaagtaatcactaggaaaaattgataatcagatttatggattcattcttaatgatttgcttatatcaagtttttggcagaagcatgactggacagattaaaagaatgaagctgggcaaactactgatttgtaagtagcagggctgaccttgtctgatccctttatagattaatggaaacacagctgtttgaaaatgaatatacataccatgaaaattcataatccacctgtaattgcaaaaactgcattgatgaattttctccactatgctttaaattacataaattttgaaaaattggggtgatggcttactcaaaatttgaaatacattaatatcattttattttactctttaaaaaatgagatgatatctttaacaaagtgattttaaaacgcaccttaattagttcgtagttttgaactccgtttattcctacgtcaggatcaacagccgctgggagagtatatttagagtttatagccgagttctctggaattgatatgttgataactgttgctgggaacaatggtgcattatcatttatatcttctatcagaaaacgtatcttaaccagtctaaatatttcatccggcaaaatggcaacctccacttcataaaagcaatgctcatcccttgggataccagcacataatttctcacgatcaatgcgagcgccagtagtgaagatctcaccagtatcctcttcaattcgaatcagtggcacatctccggtcttgtacactagcttgaactgcatagcagttgtcaaggacttgtttggaatcagcgacaagttaaggtctttcaacaagtcgcctatcaggacgttttctggcatttcttctcggatggtgtagtttttctcctgggcgccagagtggaacaccacgcatgctagcaggaccgcgaaaatgtacgtcccggacaacaagtccataccaggtacacttgttacagtttgttgtattaacccgcacaacactgaccaaaagaagaggagagagagaagaggaagaagaaattattaagaagccaaccctaaacatgcatgttaacaaaaactgttttaaattaaaatcagtaaatgagatgttagcataattgacactctgttaattagtgataaatttgttctgaatcaaatattatgaattcgtacattaagaataaagataaatgaaataagatacctacagtatcaaaaatgacacagagtacctataaaagtgtccaccattgataaatatataaaagataatactttaatataccaagatagttaaagagaatacaaataattaaaatatttaattcaatagttaagggaaaataaagggtatttgttacaaatcacaaaatataatcattattctttgttataatatgggtttaaaatgcaattattctcttggcaatgaataatttatacagtagtccatttcttcagctctgggcatcaaagtgaaaaaaaattgatctggataaaacgaggcaaggaatcattataaaggagggactaataaagtttgatttgaagaagagaagtttgggagaggagaggggttgatgtgactaatgcctaaacatggtaacaactatcatgtgaaaaggggattagaggatttttctttggataagaaaaacaagaatagctattaatataaagtacaagtaagcaactttcagattgacataactgcttattaaaggattctgaaaaaaaaaagttttcaggatatttcaggagtgtattccatatctttggaggtactggaccaccagattagatctactatatttgctttagatatatggatttggtagatgacgtccaaacattcaatgggagagttagactagaagacatcccaaccctgagaatttatgtttatagaacgcagaaggtagttcatataaaaatgggttttcacatctatagactaacaggaattatacaacttcaaggaacagcttgagaagggcttgaaaataagaaaggcatttaaaaacagtaccgagttgaaagtgagtcaaaaatcaatctctcttgctacttctccctattatttttcactcactgaaagctttaaaattatttcagttcttgaactcttctgacaaaattcaatgaggaattttgattttcttaaaatctgcaaattttatcttcagtttcctttcgtaattctcaattcttattctctattttatttattctcaagtttatatattaaatatcttttaatctctagtataattaaacattctaatgtgcttcttctggatagtatttgtagatgatatattatataaacaaaattaaatttgtatcacactgagctaaagcctatcagatgtcatacttttataattaaatgaaggttaatgcaactattaaggtatttagcagttttgaaaactcagtggtcagatggttatttaaaattccattccagaaatgtattaatgcatataggtatccagttaaggaatttctcaatatttattggtaatcgataacatcaacaagttttagtaattgttctaaaaacaggaggactacatatgatataaataacttgttatggatattgtgctctggttatgccaagcaatgtgttatatgaaataactgtcccattgcatagctgcacatccgcattttttaaactatgcatatgccaatgttggaatacacaaaattggaaaaaaagaaatcttcctatttacaatcaataatcaaataaatgcatctgttgcaacaatcaagatagtttaggtcaggagtagacttaaaatatctcattaatttttatcacaacattttaaaaatatatactatgaattcaatgactttcctatgttaagcagttggtatcatacataaaatatgttagttatgatagtgagtaatgctagagctgaagacattatttatcctagtaaacaacacaaaaacactgttgcctgtggtatagtat

SEQ ID NO: 1563974 - DNA, 4001 bp, Homo sapiens
gctggacatgacctcgagcgagatgatgcacttggggctctggcggcacagcagatcacggtcaatcttctgcttggtgaccagcaggccagagctgggattgatgtccactaggtgtggagccgagttggacaccacgcgaaaggctgaagcctgccgggggtccagcgcgaagcccgcctctcgcgcgtctttggccacgttggcaatcaccgtcccggcgcgctgctcctcttctaccgagtacttgagattaatgagggcggcagcctgcgtccacagtatggccagcagcagcagcaccggcagcaggagcgactccatggctgcacggggctctgcctggcctcgcctctccacacccctccgagaccgacgccgtcggcgctccagcttcccgccggctcgggccgcctgttgcgcgcgccccgtggccccggaggccgcgggagaagtcccgcccagggcggcccggcggcgcgcgggggacacccgcggcggctccaatgctgaggttgcggcggacgcggcgggggctcgcgggggccccgggggctccgaggggccaagggagcgccgcgcggccccgagccccctccctccagcccggctactcagttttaccccttcaaagttagccgggcgcgactgtcggcagccgcccagggctgcgggtcgggcggcgtctgcgcggcctggaggacgcaccgctgagtccggacagtacttgaggcgaaggtaaagagggcggaggaggcgcagcctttcaggcactgcccggcccgccgcggtgcaccggcactgaggctggcgaactcgctgtctgtgcacctggcatgcgcaaagacctccccccagcgctcccagttcactgcggagagagtacccgcttggaatgcgccctccggggtctgggggggccacactggcctcttcgaggcctgttcgggagaaagggggtgtcgcagacgggagtcagttactggcaagcgccgcgggcacccggttatagggttgagtcggatggcggtcccggggccagcagaggaagggggaggggagagaggctgccagagcttgagcgcgctccctcgcgctaaggctggcttcgaagggcttgggggcgcgtctgtccaggatccgaggtgggagcggagttccccccacagagcagttgagggtctgcgggcgttttcgtctaggaaatcaaagttaacaacgcagtccgaccctccacgtcaagtttgtggaaacggggagatggcaatttgtccaagaaaatcaaagccccggtctttctaatggccgggggtggcggggaatggggaagagggaaggggaggcaacaacagtaccggccaggagaggcggggccgccgccgtgggtaccgggtgcttctcttctctccgtttgggctggggtgtcgctccaaggtccgccgccgccgccgccgccgccgccgccgcgggaggaagccctcctagctcagttgcacgtcgctggggtccgcctcagcagctgccacagtcgacgattttgtcgccgccgaagtttacttgcaggagcgtcttgatttcatcttcccggagaggcgctggccgcgctgcgttgggctcccttcctcccgggcgctcgcgcactcgggaggtctgtctcgctttctctgtctgtctcgggctgtgtgtgaatgtgtgagagagagaggaagagtgagtgtgtggtgtggggagtgtgagtgtggagtatgagcaagcaggaggcaatgggtttggggtaggaggtttaggatttcggatgaaatcgctcagccggaatgctgcggagcgcaacgcgccaagggccagcgccgggctagggacgcgggtgccagtgcctcccgggcaagccaggcatggtgcacgggagctgtgctgccgtctgtgcccgctcgtccgtctccgcgctgcgccagccgccgccgctactgctgctgctgctcctccggatgccgcaaactactggccgcggagtctggagaaagccggagaaagctcaagctgccgagcccggctacgccaggccctggccaatcagcgcgccgccagcgggctccagtcttggggcggggccaagcggaggcggggggtagcgggggggcggggccaagcggaaacttcacaccggcgggaccaagtggtaccccggcccatggagccctggcgggattcatgggaggacggacagacaggccaggcaggccaggcaggagcaatagggcaggaatgagcagggaggcggtgtgctggcgctgcggctgagcctcgccgggaactgtgcgcttctcatgtttgcagagatttcaggaaagatgaggatgatatgattgtcttatcgtgtttacctcccttacatatcttcatatcttgaatataatatatacatatatatacacatatatatatatatacacacatatatatatccctctatttctccttgtctcttcaccctaaaaaatcgtctgtttttgttttcctctcttctcattctctggtagtggaaggaagaaagggaaggagaaagcgcccctgaggtggtcattcatccagctcttagccggtgtgtcttcacatcaggccagagccacggccgccacccccccggaccgtcacccccatccttccaccccgggcagacgccgcactactctctgcgtgccgcactcccagcagggcccctggatcggttcgctcttgtctgttgcttgttaatcaaatgggatatgtggcacagagaatgagctacggagggggccggacacatttcattgcccctcaccccaccctgttggagaatttagctccctataaataaactgtacgtttgagaagagccggtggagcggacgccgccgcgccgcgccaagccagcagagctcaaagccgggcaggagctctggggcgggcacgccatacatgtccgcttaggtcgccgacagctgggagccggcgccgatgtgcagggcgccccagccttcccgcggggtctcggtcccagggggctgccagctccacttgggcggcggtggtggctgcggcatgtgccagtactgggaagcgggaggccggcgtggccagggctgacatcaagctcatcctgccttctgcactgaaggctccctgggggcagcggggcattcctccccacccgggctctgaggcttttaattaaggtcgccagcggcaaaaaaatcaaaaacgtgcccgttaaacaagtttttttttctcttagaatgtggggaagctgcttctgaattcacaattcttggaagagtaaaaatgtcttctgagtgagtcgtctcggatatttgggagtgggataagcagactcataattagcccagcgacattggctcgagcctgtgggcttcacatgagcgtcatttttgccctctaaaaagcgttaaacaagaaaaggaaaccggcatttggacacataatgggttttctcaaaactgccatcttcttgtggagagcaacccagctgctttttaaaatatttttccttccaagaagagctactttagcagcctttaccttggcggtgggagaggggaaaggcggcttcctcttacagaaagaaattatttcgcgagtgagattgcgatcccctgaatatgtagccgaggccaaagggagagcgtagggagcctgatccgctttccgcgtgggggtcgtttcactgtttcacgttaggatgtgattcggcccagaacaacagggagaaaaccgatgcttctgcaatgagtatcatttaattttggtcatttagagctgcgggtggacaccagagtggtggctcaagggagcccggtggcccgaccggttttctccagacaccgttggagaaatgggcaagtagtagagaatgacaacatggcaggcagcggtgggcgcacctcgcgggctccgcgaaaggaagggttccatttgatttatcacagttatttacctttgatgtc

SEQ ID NO: 1563975 - DNA, 4001 bp, Homo sapiens
actccccagagcagctttggcacatacgctactggtcacaagttcgtgaaagatgacagcagcactgttcgtaatagcataaaagggcgggggagaaagaaaagcctggaaacagtccaatgtccactgacaaattgagaatacatatataaatcatgatgtcctcataggatgtaatattatgcagcaataaaaataaatgaattacagccacatgcatcaacttggatgaatctcgtgaccagaatagagccaagggaaaaaaaaacgtcaagttccagaatttcactgcagactgcctgagactactagacaccctgaggacttcctagtgacccctagtgactacgaggaaccagtcacccagtatgattccgtttcaatgatgttcaaaagcaggaaaaactaaacaatggattttttttgagagctacacatatgtgataagctacaaacaaaagtaagggatcaatggacagaaaatacagaataaggactgtgtggggacaggggctgccatggcgaggggcacgcaggggcttctaactcttggtcaggctctatttattaagctgagtgactgctacacgagagagttattttgtcatcattctttacattgtacatatatattaaacacattgttacacggatataaggtaacagttttttttaattcccatctttgatgcagacagtattgaagagctagaggaggatgcctctccaagtgcccttgctggcgcccaccactcctcagtcaccccggggtatcacactcaccagcaatcacagcctcacacacactcatgaggactgacaggcctggagatgtcacatatacagcccaacactgccacagccacatgcaaggacctgcacacgttcacatccgcagctgctcctgcagttacaatcgccaagccacccaggtgcaaggacatgcaccatccttaaagacacaatgcagcagagagacatcatggctcctctcctcaggatgacacagctccacaaagaaacggagagaaacagtctcaggaacacgcaaacgaaatcccaggcacttggtccaacagaaccactatggaatgtgcacacggagatgcgaagaccattccctctcaaacacaaacgaaatcacacacacacacacacacacacacacacacacacacacacagagagagagagacagagagagagagagagagacacgcccataggccaagccaacacacataataaggattcacaaatatccacacggtgtcactgagaaaacaatcggacgcacaaaagaatcgcgcacagaagtatcccggtatcacacacactacacacccagacgcaccacggcacctttctaggacacttggaagcgctcaaaccaaagaacacacactttcaaggacacgacacctccacaccgctctcctcacatcacacgcacacacactgatgcgcgcgcgccctttcttaaagcgccttagtgccgtggacagcgtcacaggcaccgggcacggagaggtgggcagggcacggttaccggcggcgccccggacaacgccacccgcacaggcagagaccaagtcaggtctcaggtgtgccggcgtggcctgggcgcggaccggcggccggagcccgggccaccctcgtcgatctctccgcacgtcccgggagccggctcgggcgggggtgaggcggcgcagccccaaccccaaccctcgccggtggcatcctcccccaacccccacccctcgccggactggggtcgcacctttaccggccgcgcgcagagcgcggggggcggccgaaacaggccgagcagcagcagcaccaaaaggccgacgcccccggcccgcggcccccagagcagcggcgaccccgccatgctgccccagcgagccgggctccggacgggcggactggctggcaagtgcgcagtgccggggcgagctggcgaggctgcggcgctctgcggctgcgcacgcccggaaccaggcccccccccccccgcccccaccccacccacccgaccgacgcaggcgcagcctggggagctggcagccccaccagacctcccgtcgccatggagatgcccaaagggcaaggtggagagctggcggttgccatggcagtcggagggcagttgctggggcaaccgaccttactgttaccttagtagacaggaaaacaggcaagaaaaattgactcagtggagtggaatgggggtctggtcctcatctctcttcctgggggaggagatggactttagtttgttcattagataaatagttaatggatcacccgcagtgggcccggcccgcgccagggagatgggttcaatctaggtgatgtgaccatggacagctcagttggccattctaaggctcaggctctcagcggcgtaaaggggttactactgacagcctccctcaaagtgaccttggaggtttagaatgacattcagtaggagctccataaatgctcctttccatcctctccttgtctctttgtgtttttttttttctgacagtgtctcgctgtgtcctccaggctggaggacagtggccggatctcagctcactgcaatctccacctccagggttcaaccaattctcatgcctcagcctgccaagtagctgggactacaggtgcccaccaccacgcctggctaatttttgtatttttgtagagatggggtttcgtcatgttgccaggttggtctccaacttctgagctcaagcaatcggccctcctcggcctcccaaagtgctgggattacaggcgttgagccaccatgcctggccccagcccaatactttcatctctccatggctctctgtgtttatctttctgcccttatgtgcccacagctctctctgtgtcttcctctccccatatgtctctccttgtctatgactttctctcctttcatctctccaaccgctgtcttgtctctgtctttattttactgtctatatctacttgttttccatagatagatatatacatagatacatatatgcatagactttacccatatattgttccagaaataagttcaagccactaaaatgacatatcaaaggaaacaagatcttgaaaaaatgtatgtgtatccatagggggaaaaatgttggggaggaaatgtcatcaatggttatctctggggaggtaactaatggtttgttactttctcctttatacttttctgttgtctgaaaaaaaaaaattacaataggccaggcgcggtggctcatgctcgtaatcccagcactttgggaggccgaagtgggtgtatcacctgaggtcaggagtttgagaccagcctggccaacatggtgaaaccccatctctactgaaaatacaaaaattagccaggcatggtgacacgcgcctgtaatctcagctactcaggaggctgaggaggaggagaactgcttgaacctgagaggcagaggttgcagtgagctgagatggtgccactgcattccagcctgggcgacagagcaagactccgtctcaaaaacaaaaaaagatcatctgaataaatgaagacacaatacatgttcctggatgaggcaatttcattttataaagatgtcaagtctatccaaactaatatataatttctatgtaatttcaatttaaaccccagctgaatattttaaagaaaatcaattaaatgtactttttattttgttttatttttaatcctactccttctgtaataaaatgtgtaataaaatttgttttggtttgtttatttgtgttttgagacagggtctcactctgtcacccaggctggaatgcagtggtgaaatcacggctcactgcaacctccacttcccaggctcaagcaatcctcccacctcagccttccgacttgctgggactacaggtgttccccaccatgcccagctaatttttgcatttttctgtagagatgggtttcaccatgttgcccaggctgctcttgaactcctgggttcaag

SEQ ID NO: 1563976 - DNA, 4001 bp, Homo sapiens
aaaggtatcagaatacggagtgatatttgcacagatttaattctacatgactggaacatagaagaatcatctcaactttccatatctgcaccagtccagaactgaatctagttgttttttttggcaacagagtctcactctgttacccagtctggagtgcagtggcatgatcttggctcactgtaacctccacctcctgggttcaagcaattctcctgcctcagcctcccaagtagctgggattacaggtgcccaccaccatgcctggctaatttttttgtatttttagtcgcgagggggtttcaccatgttggccagtctggtttagaactccttacctcaagtgattcgcctgcctaggtctcccaaagtgctgagattacaggtgtgagccactgtggctggcctacatctagttattttgatactacttcaaatctaattttgaaatgaggcatgaatgaatgaatgaatgaatgaatcaatcaatcaatcaatcaatgcctcctgattcccccattaactcaatacaattggctagtaaaactcatgagtcttcaatatacagtacaaatttctccaaatttaagataacatggaggtgactggggaagggaccaactgggcgaaatgatcaatcagtcatgtagctcaagtgtctgctggatatgaacctagactactttctgagtaatatggtgcttaaaccagccacccatatccattccaaggggcatgagaaggttttgaagggatgctggtacaggaaagaccagggcctgtgtccattctcagggtagtggagtgaaaccagcttcaccgttaagcagagaaattccctctgcctcgttgttgggaagctgcctctggccctcaatctcttcttcacatcatctggggtccttcttaacactttgtcccactgcctaaactttctccatctagaactcattcagtttaacaaggttccccttgaaatacattctccgggcaccctctgcccaagagaaaagaccatatacagtggtctcacttaagtgacagttgcataacattgaattcagaaatggattgtcttcacttgaggtcaggatttcgagaccagcctggccaacatggtgaaaccttgtctctattaaaagcacagaaattagctgggcatggtggtgcacgcctgtagtcccagctacttgggaggctgaggcaggagaatcgcttgaacccgggaggcagaggttgcagtgagccgagatcgtgccattgcactccagcctgggcagcaagagcgtaactccatctcagaataaaaggaatgggtattctaatcaggattttgtgacgtttctactaggagaatttctcatttcataggataaagaacattttgttaaaacatttctgcaataccctcaggctcccatagcatattgatctgaccttttttttagtaagcaaatttgttcttgtcatctaagtctatccagggagctgacatactctgcaaggggataaagaaatattagtcacaatttgtttttctttgtctttttttaaatcaacttaagacggagaagataatgtttccatttttagtgtgactattaattagcacagattcattacacttgcagatacataggactttactttttgaactgactttgatattcaataaggcaaaaatcaataagaaagtattcacattaccttgcgccacaattggggagcgcgattgtcctcttccatgatgcactcctgatggcctaccatgcctgctcctgatctttttatcttctctagaggcctctaccctttggagttcttttgagtcacaggatgaaatttttgttgctcacttgaccaaaggtcaagcaggctctctgtgcccagcgctcaaagataagctcggaggagctcggagtgtcccagttgttgaataaggagagatttgagttgctaggcactcttgctttacttaccacaagcctcctcttgtcccctctgggctgttgttcattgacaattgctgtgctctgaactagcgctatgatggcctgttgtgcggggacaggcgggttgtggtgaaagctgcagtcgtgaaaaaggctattgtttaatctaccccgtccctcgctgaagctatggcaacaaattccgttggtgaattaactatgtcattgtgcactggctcaactgattatgctcctggaatgacaaacattttctctctttttttcaagacaaacagtgaccgagaccttgaagtgttaatatacaactcagcactttctttaaataggagaataaagatggaaaaaataaatctctcaaacatactttaattgattctaataaacattttatcccttccaaggagctattctcagcaccattgataatgaatttgtgcatcttaactatgtggagtcttcggaatttgtgttaaggtaattttctctcagataactctgtgttaaaagaactctttaaatatgcatgtgcttcaggctttctaagaacaacattctttttaaatctggctgcaccaaagggctatggaaaccttggctgcagactgttacctcagtttagagggaaggcagctggtccacctaaactcacctttgccaagtaaagatatcctttgtcccatcctagcaggaaaactcttagaatgctttctcctctattttaagctccaggacagtaaaacgtgctctgattggttgaaggatgcttttcagactccctcacccctccccaccattcattcatcctataccttctgcatctgggtaccctgccaactgctgggggagctctgccggtggccacactgtttcctagtgtggtagtgtgtagtgttctgacttgctaagttggaatcacatttcccaggattcccttccctgaaggctttgggttagagttgaccaaaagaagaatttgcataagatatgggaggtggaagtgaagtaggagcggttattttgcaacggttgttgtggttaggtatggtaacaaacagaggtagacgtgaaatcggatcccgcttgtcctcactctccctcactctgtgtccagatcttctttgtgagtgctgatcctgttgaccaacaggagccccagggccaccactggacacttggctgcaggcccatagaggtaggaacagcttcccataggtctccccaaccggcttccccttccacttgcacagttggatgtgctgggcttctcagactgatggtgggtggctcctcccatcttccaatttcctcctggaccttcaatcccccatccctctcacaatggggccaggactaattcctatgataaatcgcttcctccacagctcatcgtggttctgcttctgtgactgaattcagattaataacacttactgtttccaaacaacacaagcactgttaggagagcatcctcagcatggagagaggttagagggccgcagggagaaaactccatggaagttggatcgaaaagtatctgaggaccccaaggaaatagatgttatatttgtatcagatctctccctacagttgctgatagccctcaccctgcaaagcctttcttcagatccaaacagttagctcttctttcttcttccctcttgtggcttcccctcatcctcattctgtttgtttgtttgtttggagatgaagtttcactctgtcacccaggctggagtgcaatgtcatgatctggctcactgcaacctccacctcccaagttcaagtgattttcctgcctcagcctcctgagtagctgggattacaggcgtgcaccacaatgcccagctaatttttgtatttttagtagagatggagcttcaccatgttggccaggctggtctagaactactgacctcaggttatccacctgcctcacctcccaaagtgctgggattacaggcgtgagccaccgagcctggctgtcctcatcctcatcctcattcttttttttttttttttttttttttt

SEQ ID NO: 1563977 - DNA, 4001 bp, Homo sapiens
tatacatatgtgtgtatatatgtatatatgtgtgtatatacatatatatatatacacacatatatatattggtccagtgctgtggcacaagcctgtaatcccagctacttgggaggctgaggcaggaggatcacttgagtccaggagttcaagtttgaggccagcctggaaaacagagtgagtctctctctctatttatgtgtatatatgtatatgtgcatatgataatcttgtaatatgcttttagtggtcattttcctttatgctaaaccataagttgtttagtgactcaaaggaatcccttagtaacaaacttattgggatggtttgtatctcatgagaacatagacactgcactgtgtatgtcattcagtaagtggctaaagtgctagggcacagttactattaaactgccctaagagaaaacatttttaaaaatagaagcataggggaaaaaagcccacagggctctaatataacttcctctgtatttgtgctttttaggaagttgttctaagcctcctttgaacccttattaactcttattaagaaataacagttttatgatgggttggccttctcatctgcgagccctaattttgcaggttcacagaaaatgctacatcacaaaatccttttttaaaaaactcttcccagggtcaaactccacagccaatcaaaatattccaccttttaacttgagggaaatcgctaaaggaaaggatagctttaactagtgtgtcttttggattgggggactcaaagagaggtctccccaagttccacaagacttcggaccacagaaaacccaccacccatgcgtgtttttgattccttgaggacacatgctgaggtggttgggaacgaagtttcacatctacctaaaagatcatgaccagggatagagagacgaccaaatttgggagagcagttacggtgcagttacggaggcggaaggacgctctcagtaccccgtttccacactttcattcttaaaggcatgcaacccctttctaaataaatgtagctccccaggtttccactacctgaagagaaaccctcacagcacactctggaaatgttttacaattcgttttaaatgcgtattatttctaactaaatcattgagggactcctatgtatttatttatttatttattttgaacattttcaaacggatggggaagttttgcttccatgtttccatttttttccccccaaattggcattaggcaccaaaatcagttgaggaacgaagcattccttagctagaatttaaaacttaacaagggactcttcccgagcttggtaaagagaataccattttaaaattgcactgtaggatttttttaccttcagacaagaacacacctaaaaggaaaaaggccctcccctcctcccgaagcacaaaaacacagcatatcccaagcagcccgtttcctacccagccaatacaataacgctttgtaaactgagagcagcgcccggtatagaagctaagtataaacagctgagaaggattaggcggtagcgctcttctcatttacatgaaaatcctctaagcatcgttttcctcgctggctgcgggcgcataaggaactcttttatgccatagccacgcatacatttccatcctttgtctttacttaccagtcgaggctgtgggcatgtgtgctctatttcctccatggtttctgagggaggctcattggaaagggattttgggatacctgtttctgactcagcatcagtggtaactactggcatggccagtgaatgctccctctagctctacaccctcagagagtctcctcccaggcagagaatgttttctttgtcacgtatttttctcccctctaccctccacccatccccccgcttcttctccccttctttctgtcttccctaggggaagtaaagaggttaccccccgcccctctctctctctctctctcccagaagccaagaggcaaggcctcagtttatcactataacaaccagacgacactgaagcggctggtgcgggatacagtatctcatttgcatagagcgcgctggttggctactgtcatcatagtaccactccgccgggaagcggccgggccccattggctagccctccgtacccacgggcccgaacttgctgcttttgtttcttctgtttaattcagttgcaaaggtctccgtcctctctgggcacgggacccgggctgcgccacccagataacataaaaccgcttcctgaggggcctaggacgccttgagaaacaacatagcagacctccactaataaaggaccatgtccctgggatgagctagtgcatgatgtgctgtagtcaggatatttgccaaataggagtcaccctgaagacaaagccacttttgagcccaaattcattgtgctaattgccagtggagggcccctccgggcattcactatgggcacctgagtgttcgacccctggacttcatgcaacgtgaaccctggcagatcccctcgtggcctggtgtagccctggagccctcccctggggctgccctagggggaactttgaaggaggtagattgtctttaacagcctgcctcctactcctggctgccctttcgcagttgcttcctctgtcagccactcttccccttccccagctattcaaagtttcctcaagaagtcttgctgttgtgtgcctttcaatacactgttccatgcactgctctattttctcttggttcctactttaccagtcgtgggtcccatttccgaagtaccctgctctcagccaaatgctcatggcaatcagagatggaatgttaacgatcaggtgctttaatgtctacattatctagggacattcacattttaagaggagcattctgaagacacacatccaaagaacttaccaaggtattcattgtgaattgtcacttttaatattaataaaaaatcatgatgatccctggcatttattaagcacaagcacggtgctaagtactttacctagttcttgtttaatctttgtgagaacccaaagaggtagatcctattgttatcctcattttacaggtattcacattcacaaaattctaaaataatgcagctgggatttgaaggaattttttttttttttttttttttttttgcgaagggcgaggtggtgggggcgggcgcgtagggaccagggatgcagcaggtgtagtaagaaaaggatctaggcaggagtcctcttaggacaagtccctgggcttctacatctttcatttttatctacagtagtggttttcattcaagtgtggtctgggaccagcagcaccaacatcagcatcaccagggaacttgttagaaatgcgaattattggccccctgccagaccccggacctgattcagtaagtctggggtggggtcagaatttgcttttctagagagtttctgggtgttgttaatgctgcaggtctgggaactatactttgagaatcagtagcccaaaggatgggataaaaataccgggcttgcctccatcacagaaaggagatcaaatgagatatcatgtcattgcactttttgaattagaacgtgctatgctaatataaggggacattatttttattactcctcaataagcaaagagggctagtcctaaaagaagaagaaaatggattctgtagcagagaattacagtttgacagttttagatgctggccctttaagtcagaataacatcacttaagagtattatgacctatacaggacagaactccagtgttgtgagaattccagtgatgcttcctaccctatttgccctcctggaagcacaaaacacttccagcagcaggtttaactctaccagctcatcacctggaagagccaagccctgtgttacatttaggagcccttttcctacgtgtactgggtgacgtgcaaatgacatggttattctaatctcaatatatgtatttttgccttagagcagtggttctcaaagtgtacttctccaagaagtgcagc

SEQ ID NO: 1563978 - DNA, 4001 bp, Homo sapiens
agtccatgacaagttgagtgacacagaaaacttctaattatctgaagagtttacaccaccaagtggaaagatacctgggcactttcaaaggtgacttcatatctggaactcaattttcttcctactgtaaggtggcggggggggggggaccctgcaaactgatacaggaaacaatgaacctgacttgcagaagaagaagaaaacctacatcaggtgcctaaaggaaggatgtttctgagcccgtaactaccggtacagccctctacccacagatatccctaaagggaacgcttttttttttttttttttttttttttttttaaaatacggagtcttgctcttgtcgcccaggccgtagtgcaatggcacgatctccgctcactgcaaactccgcctcccgggttcaggctattctcccgcctcagcctcccgagtagctgggattacaggagcccgccaccacgaccggctaattttgtatttttagtagagacggggtttcaccatgttggccaggctgatctcgaacttctgacctcaggtgatccacctgcctcagcctcccaaaatgctgggattacaggcctgagccaccgcacccggcagttttgtcattattttaggcaacaggattcctagaggggcatacctcttaccttttgacaatctctgcctgtactaagtagagcggtatcaagtcctgggggaaataccagaatcccgaggcctgcagttacaccaattaacacgacctcactgtgcctaggggggtcagaatgctagctcaggtgttaggcacctctaaatgctgaggccatgaaatagtgctaaactctaccccccacccctcaagcatcgttgctctttgctttagctacttgtaccctaagaatgtgtaggtaaggggaggggagggcagcgtcctctgagttctgcttcggcgctcctgaactcactgccaagaaaagctcagatgttgagggagagggaagaggaggaagtttgtttctgaagaggctgaccttctgtgaacccgcctcagaactgagcacaggtgttcaagaaatgtataccgaactggagactcaataaataacactattcaacacacatgttatcgattatgtgccaggtgctatttggaatcgtttccacacgtgtcactcgttgaatcctcaagacaaccccaagaggtggggactcttattatctccattttagagttaactgataacatttcagagataactcttatctccatttagagattaactccacttcgagcaaacattttaggaaaccgggtccccgggacgtttaaaaacttgctcaaggtcacagggctagtcaatggtgagggtgctgtttgaacgaagccaccctgtctccagattctacgctattacaaagcctctcggtcaagagaaattaagttagaagatccgaaatgagtggggtcaattggagactcgaaggaggccgaggccaccctttccgtgtcctgtaacccaacaggcacctcttgagcacaccgacttcgcctggcgcacagctgggcccgggggcgggaggtgggtgtcgagaagggggaagttcacacggaccttggcgtgatcccggtccgtgccgcttctcccgaggccaggaacggaatgcagggcgcggaggcgaagtaaaggctccccggctcccctggcgccttccaccccgctctgggtggcccggcctggcccgccctgccctccggccccgcctcagccccactcgcgccccatcccggcccgcccgggaggtctcaccggcttctgagaagcgccagacagcacgcgggagacggcggcgagcatcttcctcatgaagcacaggcagtggcggcagcggcgactcctcacaacccaggaggcacgacgcgggtgcccccaagtctccttcaggtgccccagcagacgccacgcctcagtcgcaccgcggcgtgacagagtcgtaataacgtcatgcgctgcgccgggccgcgggccaaccagaacggcgtccagggggtgccccgcccccgctaaaggcctgaggctgcccattgggtatcagcgccagagagggaggggctgagggctctttccgacgccacgccgcgggcgggtgaggaggcggggcttgatagcgcctgcgtgggaaggtggggcccccgcctccagggcgccgcgggaaaggagccttcctagattccgctctgctgactaccggggaggttgtgcaggccccgtcctaccgagcgcctactcctgccggtgctgcagctctgcagccctcgttcagtacatctcgttcagtacactagatgatgaagattagcagcatgctcagagccaaaagacagaacatctggtttctgtaaatggtctgccactaactttgtctttaaaagatcacgtagcagttggacagttctgccctgtctacttgaacgcggatcaaaaaatttgtttcccaatatatgtcgagaggacaatgggaaaaatcttttttctctagttattggttcacaggctcactgcgagttaacagcgtggctcagccgatgataaaagcacacacagagacaaaacaccaaagcaacaaggggctctattcagaggatcaaagggctcaggaacccattgtgttgtgtcctagtgggattgcacctggggttccgggttcagatttgggctccacattttaagggggataatgagtaaactgagtggaatccaggggacagtggtcagaacggtgaggggctgcgattgtgacttatgaagaacgattaaagaagttaggaagaaaacaggctaactagaattggctgggttatgatgtaacaactgacctccaaatttcagtgatttcaagaatttgaagtgacgcgagccatcgtactcgtaacacaggtccctcacagcgtggcaccctctctctggaacttagcttgtctcatggatgaagagaaaagggatcatttaaaccggctctcaaagcttctgcccagaagtgacacatgtcacttcctctcaattttcacggaccagagctagttacccgaccatgtctgagttccacaaggtgaaatataatcctcctgccaggaggagaacagaaaattggatgaacagtaaaaccagagaggattggatatgtcttcacacattttcaggccagtcatgttccaggaggaagagctattttgtgtgtgtgtgtgtgtgtgtgtgaataaaatcatttcatttcagcataacaatgaattttctaacaatgacaatggtccaatgagataattctctcccagtgtcactgaaagtattcaaagcagaagttcaaagcatgaccagctctcagcatagctagagaaataatttgggcactgggccagactctggactgagagatcgtgttgcagtggaagaaaacttcttaaaggagtgagagggcgccattaaaaggcagagatggacgtgagaaacttgcatggtatgatttcagcagctgctgctgctgatagaatatgaaaggtaaaagagaatgaaaaggttggaggccagatgtccagctcaggagaaaaagctggtctgaatggtttgggacatgttgacctggtggtggcagtggcacagctatctgaagatgtcccccgggaagttggagttgtaagtctggaacatttgctaaaaatattaatttgggagtcatctccacggggtggtgatattggttgtgcatgtacgggaactctgtaggccatatgaatatgaattcattcattcatttgctcattcatccaacacctattattgagcaccgattttgtgtcagacactgtactacacactgaagatatagcaaggaacaagtaaaatataggtcctacttaaatacatgattgaacaaatcaatgggttagaaggaacaacttttccttacagtagaattccaattaattaatatagaaggaatgatgaaaatagaaa

SEQ ID NO: 1563979 - DNA, 4001 bp, Homo sapiens
ccacattctgagctagtggcagagccagaattagaacatttgtttccagatactggcctcacaggttttccatgataacactatcctccactgtggttttcctactcacataacatccttaccaaaatacctattaacacgggtagacactagctgctatggaaatcaactaaccaaaattttggctggctattggagctatcacttaaactttgagggtggaaagaactgggagtttctggattccttttgttccttttattgtgaattatcctgtttcagtttacactaatgaaaggctgataccttcagaatcttccctaaaccataaagatggaaaacttgcctatatttatagcaatagcaacattttctaaactctaaagtcagaaactgcctcaaacctctacaattctcgagatagtaagtaaaactaccaatagcttttgggagtgaagtttgaagatgcagaaatcaacgtgtcattgaactttgactttcatcatcattctctggcaaattggcttctaaaattttaatttggtctcaactttaacctattcctctcttcctatcctagcttttaaaaaaaaaaaagtatggacatcactttttgcatatcaggtcttcctcaaatgttctacctactctgcactttagtttttatgcccaactgacactatcactgacacccttgacatttacataaaattcattaaatgaacagacaccctacgatttcccctggagagcttagaacatctttgctgctggatttgattttcctccagggatgctgagttccattctgatacctcaatgcatgcgttttacttttaggtgtttcacaaccagctccttcgttttctggggaaacatgattcagttaacagaaggtggtggaatctattcccatctcagctaggcctgaggcaggctgggaacccgaatcttctttggtcccacctcaatccgtgaaagccgcccaccagcccaccggacagggagaatgtgggtgggacaccaatggagaagagaaacgaaaggtgctggcactaaagccagagttgtattagaccctgctctgatgctaggatcccagacgtccgctcttcccaagcatctaaggcgtctgcaggccaggcctctaactgatttaacataacctgatgaagacaacagttcgagtcctgccactccagccacacagcaacaccttagagcagaaaaggaacaaaatgccattgcataatttattcaacctcaaggtatttctaaacagttcttacccaaccaaaaaaaaaaaattctaaaaataaaaacattaaaaagccacccacatctcgttctgaagttttaagggctgtgaggtttgtgtcaagcagatttgaagctaacgaccgcaggtttggggagtctcgcctgcgatgagggtcctgcaatgagacgccgtttctgtgtctccgggtaagtcccaggctgggtgcgagggggccaggccctgcccctccgcgccccgaaatccgagccccaggagagccccccggatattccctagccccgcctgcggttcccacagactttaccccgaagctgcggagatccggggtggcagcccgaatggcggcggccccgggcccatggggacccttggccccgtactcaccgaagtccaggaattgtttgatggagagcggcgacggcgaaaagcgcgagtagcgctcgatctgcttgggcaccggctgcttcagcagccaccggaacagccgcatcctcgcccgggcggcgcacagacccgcctagacgcccgggtggccgcaagggctggcgcagccaagccgcacggatagggcacgtttgcgaagcgcgcaccccggcctcgatctcggcctcggcgccgccggtgcagccgccgcagcagcagcagcagctccaggacagcggcgggccgcccgcggcttccctaggctccgcctcgctgggcggagtcggttgctgcacgtacgcggcgcgcgaggggaggcgaggagcgcgaggggcacgcggccgcgcgcgccctccactgattggccgccgctgcctctgtgacgtttgtgttttgtccgggcgcggcgccagagacccccctccctggctcatgggactcagcccagcccagcaagtgcagccgctttcagctccgcctctggctgggttctccgctgccgaaaggtagccgaggtgcccgcggaccgggaagaggccaggagcccggaatccgatcctccgcgctgctcaagacccttctcaaccgcaggcgccttttccgggaggaggacttgccgttcgctgcatcctgacacttagattttacagcctaactagactgactctgtttcgtggcccagccccacccccacctccctgcctgactcccaagagaacacctttggaacacctttggactggattgttagttcgctgattctctttttcgtggttcctttcccctccttcccgcacaagattaagtgactgattgcatttcatgtccccccaccaccaccgttggacgggatccattgtgaggtcaagggtcaataacaccccctacctccccaatgccagtggacaggataattgcaaggtcactgactctgtttcatacccccccaccccactactaccattggaaaggatcaaatgtaaggtcactggcactttctttcataccccttctctacaccaccaccataggacagcccccttcacgcttcaccaccacttttggacaggagtctatgcttacacagtgttgggtattctttatctcaagtgaacttgagagcctggcatggtgacatgcacctatagtcccaacgaccctgcaggcggaggtgggaggatcacgtgagcccaaaagttcaagatctgcctaggcaacatacccagacccccctctcaaaaaaaaaaaaaagtgaacttgaactcagggctcagtatatgaaattgttatttcctattatgagtgaataaagtacagcttactttagccatttccaccaaaccttggctttttttttttttttggcaatatgtaaacataaacatatgtaactaaaaggacaggaagaatgttctttaaggaaaggtacaaatgtgactggaagccactccttgggtctctgattggactagttttctcactgaatgagattattggtgggtagctatttagcttttgtgccttcagtggacgtttatgcagccaattctttgcttaataaaatagttgcatctctactctgaatgtaaagaaaagtaacatacacagtaaaagacctcggccaggtgcggtggctcacgcctgtaatcccagcactttgggaggccgaggcgggcggatcacgaggtcaggaaaccgagaccatcctggctaacgtggtgaaaccccagctctactaaaagtacgaaaaattagccgggcgtggtggcgggcccctgtagccccagctactcaggaggctggggcaggagaatggcatgaacctgggaggcggagcttgcagtgagccgagatcgtgccactgcactccagcctgggcgacagagcaagactccatctcaaaaaaaaagacatccagtggtcttctagacttttggattttcaagaacatcttggtcatcttcatcttggtagaagtatgtagactaccatgtcttttccattcaaattaaatcaaagcattaaaaaagacatactaacaacttatttaaccaggagctttaccagaagagctaagtaatccagttggtgtgcatgggcagacaaagagaagaccagtggcctgtggttcctaaagtgactttcaggtgctacctggaagtggagcgataattggtggcagttgtcagtgagcaggaagaagctggatgtttgtggagagggagattttctcagcctaagcaacaaagcgctgatctttctgagcttgcaaatcgcttgtttcacttcttccttt

SEQ ID NO: 1563980 - DNA, 4001 bp, Homo sapiens
cagatggcctgccaaatgaaaagttttaagtgggaaagggggtgtctccattataccccttctatgaatccagagtcatcctctcagcccttgggacattagggttctgcaatctgttaatttaacaaagggaagtaacgatccatattgcctactgggcataaataccttggagatgaagatgcctagctgggaggcctttcctcctcggatgttaaatcccaactgtaagacaagagcacagaatgggggctcaatggagaccacaaacacaagaacaactagtagcatcatcgtacaatagctcagcttgtgtgtccctgagaggaaagtcagaagttgcagaagtgttatctcagcttttctgtccacaagaaggaaagtttcctcacatctgcacctgctttccaatccatccccccaacactgccaatttgtggtatggatgaatctagcctgaaataaggtttcataagttcacctgagctccaggaggcttcttcagtgtgatggttcggggcagaaactgggtcaactcattgttgtagtccgggtggtgtaccctctgcaagacacagcaaccccagaaattttaccagtcttacttcacacctaccttcatctgaaacactaatgaattaccctgaagtcaggaaaaggaaaggtcatagacttaatttaagtagaacagataacacagactaaatgagtagatggatagcactggggcagcccagtagctccccatttcttcaccttttttttttttttttgagatggagttttgctcttgttgcccaggctggagtgcaatggctcaatctcagctcaccgcaacctctgcctcccaggttcaagcaattctcccgcctcagcctccctagtagctgggattacaggcatgtgccaccacgcccggctaattttgtatttttagtagagacgcggtttctccatgttggtcaggctggtctcgaactcccaacctcaggtgatccgcctgtttcggcctcccaaagtgctgggattacaggcatgagccaccgcgctgaacctcttaacagtatggaaatgaaggctccaaatttccagaattaaccggtgtgaacagaccctagcaggaggcttccataaagaagttcccaatgggtcctgttgctcagaatccagcttctgggtcctctggctacaagtgctaagattcactctccgtttcgccttctaaccctgctatcctacctttcatgcatcatctcatgcccacggggaaaaaaatctcctactcaggaatacagatggttcccacctcatgaggaggaatccatgctggaggattctcataggcaggcaagaaaaccaccgggtagtcatcataaggaatccggctgtccatctcgggcaaggccctggaagagtgaatcagaacagacaaaaagtggttcaaaagggagagcagcccagcaagtttcagacagcagctccaacccattccaaggcagtcagtctacaggcccagcccatatctaggtgttaaggttggaggagagaaggaagacagaagaaaactcttaacttagctaaacatcttctggatgccaagcaacctgtcaggtactctagaaagaggacctcatttttcacaatcctgcaaaacagatgttaccgtctcaaacctggagaagaggaaatcagggtcgagtctaaaaagatctactttcgaagcccaagggagtgttaactatccgcagggactcggggcaaggcaccgccccacatttcctagatgtgattagtaatggtagggtccttagatcgacccttccttcacctgaccagccacctcccacgtccccgccccacattctgcctgagacccgcactctcagccgcataaacgccgcaccacctcaccagtgggcagtccacagcgacctcagactccgctcactgacaattcagtctgggaaccggaagcggatgctccgcagggtcgaaaagaggccgggccagggtgcaacgagctgaccctccccttcccaccgcgccggcctgcgcgcgccgacgtgcgcgctccgccctcgggcagtccgcactgcaattggttggcgtctccgggacggatttgaaacttggcggttaaagctccggctgggacagggcggcgggaggcccagggagaacggggaagggacatttagtttggtgagttacgggggcacaccttagctcagaacctgtttttacccagtaccctagggctttggttctttgtcgccgtccccgttggagttttttctttgcctttcagaagcccgtgcactctctttagagtgcagggctgacgggcggtccagccctggccaagtcatggagcgtgaatctcccaagtcagtgttcccgctgaggagggtcggaaccggggaggacgccctcccacccctgctgacctactaacattcatcagcgagccttctttttccccctcgcagagacggtgctgagataggatcatgaaggaagaggtgaagggaattcccgtaagagtggcgctgcgttgtcgccctctggtccccaaagagattagcgagggctgccagatgtgcctttccttcgtgcccggagagcctcaggtgcgtagcagagtccagagcctgtgtctgaacagctggggccaaatggtaacgaggggtgtggtcttgcctttcatttttaaccttacgccttgtcccgtgccttctctaggtggtggttggtacagataaatccttcacctacgattttgtatttgatccctctactgaacaggaagaagtcttcaatacagcagtagcgccactcataaaaggtgtatttaaaggtaaggcgatttgattcctcgaacgtaacatatatattccttgagcatatactatgtgccaagcactgtgcttgggcactgcaaatacaggaatcgatgaatcatgattcctgccttcaagaagcccttagcctaataacatttgtcaacgtctctgtacccttgaagctagttttattctgtatttgctttatgtggttctgttcatctttgacttgtatatgtttgtttatcctggaacttcattagattataaactctgtggtggttgctgatggtgataagtgtgccaacctacttgaggcccaggcactgcaaagcttgttgagggattcaggtgataaataatatagcttcgaggccctgaaggagttcaaagtccaggggataggaatggagatagatgactacataaataattttgaatatataaaaatttttaaattttttgtacctatcttttagaagaaaaatttttcaagttaaaaatatacaacagagtcagtcctatggaagtagtagctctgctctcatacaaagtggtatgaaaaacaaaaggatggctctaactctgcttggggaatttggggtgaatttcacagagtgggaaaactttgagatgggtcttgaataatgagtatacttcttttaggtggagaaggggagtgcctaaagcctctgaatactatcaccagttaataatctttactggggaagctaagtctttaatgctgttgaggaccatagcagggttctaaagaagggagcagtgcctgagagatgtctaattattattctaatacagtggttattcaagattcaaaacagaggttcgtttaaaagaagtagaatcatggcatgctagtgccttaaagttgaaagagacatttgtatatcatctagtttgtttttcatccaaagaaaaatgcgttctaacaatatctgttaggtgaactgccagtgtctaaaatttttttgacagggaactcactgactcacaggtagtccagttgagatttgggttttggacaagtctaattatgttataaagatctttataatgagatgaaatttgcttcctggtaatttctacccagtgatgttagttcattcctttagaagccttcttctaggcaacagctat

SEQ ID NO: 1563981 - DNA, 4001 bp, Homo sapiens
gaaggcaggcccagcccgacctgccgaggccttcccggagggctgtggggagccccaagggctaccggtgtcgtcccatggctcatttcaggcctggggtgcagctcgggtcgctctcccctatccacacgtccccacgaggttggccttaaatgaagtgcgacaccaatccttctccaggaaagtcaaaacggccccggaggaatcgcttggagaaatcgcttgccgtttgatggaatgactcccgaaaaggaagcaggaggatgggatccagagtccccgtcaaccaaccatcccagccctggaatccaacacggattccacaggacgccctctcggtcgcattcctatcccgctagggggctggcaatggccacacaaggtttccaaacagcgggaacaagagacgaggagtggcagccgggaactgagagggaagaaggcggaggacagcgaacgggagaagccgagggccccgcgcacccccggagaagggccggggagagaggaccaggagctccgccagggtggggcaagatttgcgtccccgccctgcccctcggctcccgcaccaggtggccagaggagctcggctcacagcgtgaagtcagtccccggattcctgggaattctcccccgtgcccagcccctccttcccccgcccccgcccccgccccggagttctcgccgatccctgcacgggttcccccacgttctcccaagccaacacccctcctgcaaagcacttgattccttcccagtccagaccaataaacccgggagttgaatccaggccactaaacgcatacctgtctgagccctgtctgctcctgggtgccttgaccttgacctccctccacttagccctaggaggtctcagcccacagcatccgggacatttctctagacagtctgcagggtgcacacagaaagtacacaaatgcggggccgggggagcctccgcgcacacagagacggggcacaggaacgcactcacgtagtcacgccacgcacaggcaagaagccccgttccgggccgcggggctgggctccaggtccgagctccgggccccgcgtctccttccctccccgcggggccctgctggtccacgccccgcaaagcccggccaggcactgccacccgcagagagcccaacccgctgatcccggcggcgcccactcacccgagacgcctaaggcccgggagcccatcgttcgggcagggccaggcgggagtgggtgtcggggtgggcacccagcccccggacggacttggaccgcgcccggggacgcccacgcactcccacgctccaggcccgccgggatctagattcggcgccccccgcacggcgggagcctggctccctcccccgccctgggtcctgcggggagagcgtgtgcggggaactgcgctcgttgctatgcaacctccatcccgcgcccgccgcaccgcgcctcccgggacggaagcgcgccccacccgggccaaccccaacttcccaccccacccgtggctggttcccacggagcgccaacacccaacagccccaggatgggagggtgcggacggctccctaccttgtcctcctcgagccctcccgctctcccacgcccgccgctccgggcctccccactggcccgctcctccccgcggagggccgcgcccccgccgcagcgccggcggccctacctgcagcatcactttgtactgctcctccggtttctggaccacgcacatattacatcccatgttgctggccggcgagaggaggcggagggcgggaacgggaagacgcctttcactgacccgggcgcgggacctcgggtcccgggccggggccaggggccataccctggcgcggggggcgggccgcctagcgggggaggggggcacgcccccgaggtgggggcagcggctcgcccctcaggttaactcttcgctggccgaggccaggcgcgggcatgctccctcgcacccggccaggagaaaaagggcagcgggggatgggcgggcgcgccgggcgttgccaggctacggccccccagggagcgcgggggcgcgccgggccgccaggggccgtcaggggccgtgggccgcgcgcctccccgcccgcggggcccgccgctgccgctgccgcctccggctcctgcccatggccgccagccccgggagcccggccctcgcgctcggcgccgcggcccggcccgcgacaggggggcagcggcgcggcggcggcccccgcccgcggccaggccagcgcccgcgctcccgcctcgcccggccgcgctctcggagctcccggcgcccgctcttcgtccagcagccgctggccgtctccagctcccgcccgggacgacgggcacgcgagcgcgcccacggcggcgggggaggggcgcgggcacggggcgcacgcgcgccgggaggggcggggaggggagcggggccggctgcgggagggagcggcgggggcgctggagccggcgcgggaagccgggggcgggcgctcgacggaagcgggcgggggtcctaggcaccccacgacacccggcgtccggtcctgaggggcgggcaccaggcgcgttgtctgcgcgatgccgctctgggagagaggggtcctgccaggaggagcagtctcctgggtcccccagagagagtccgcgatttcagcccctctccccggtcttggacgcagcagccctcacgcctctgctccttcctcgggcttcgccttaaatgactgcatccctccttcaactcagccattccctgctgtctttgaaacggacacctttgtttaaaacaagaaagaaagagagaaagggaggaaagaaaagaaagagagaaagaaaaaaggatgagcgaagcgtggggagggggtgggtcgtggggagagtggcctcggaggccttgggacccgggcctgcacacagcactggccagcctgggcccgccgcctacctgttcctcagccccagccctcacccggtccccgctttcacagcccttccatctcttcctcttctctcccaccacctccccgtcttcttggacaagcctggagggagaaggcctttgcctggaaagcagcagcgggtggaagtctgcgttcccagaggctgccccggctgcaggagatcacttggagaaattgctacatgcttcatttccaggtttgggcaagtgagggaacccccagccacacggggctgttgaatcggagcccttcctttcctccctggctcctcgttagaagagaaatcaagaatggcgggcctgcccagaatgtggagaagagaggcgagtttcttatccagggcttctcccagaaagcagaacttgagacaagggctggtgtgcaggttgcaacctgccacccaatggctggctagtcttgaggaatggcgtcatattgagggctcagcatcggtctctgcagctggtggatggaagaacattcactagcggcagtgtctagatgagccgtggtaagaggaagcccttgccgttgggcttatacagagcctccagccctcccaccatggccactggcatcgtgggtccatcgcatcctggggagaagctggctgacctccaccagatggtcccctctgttcgctagcttctggcgcgccccctccacactgcatgctccccagcggcatgggcgcgaagacgagcacggggccccacactctccctgagcactcccgtaggtacctcttcgccaaacctgtctcttcttccaatcttcctccacccgggtccctgaccagtcagcccagccattttccactgcccgggggtcatggacaccttcatctcaggccatttctccctctacaaagtagacaacctagtgtcttgctcccctagaggatgtcccctcactgctgtctctcagggccaccctgcaaagggcctcagtgtgacagcaggtgtttttcctagtggtgacatgagatgaccagtcgaggacctgggtctgagtcagtcatgggga

SEQ ID NO: 1563982 - DNA, 4001 bp, Homo sapiens
ctgataaaatttagtcaaatattaatgagtgactgtcttgtacacacagagccccattcttggctatggtgagtggtagagtggaagtagcacagagtgaccatttactgagcatctactatgagccaggatcagggcctgatgttgaggatatgatggtaaataagaccacacacccgctttcttgtttatataacaagaacaataataattaggataattaacaattactgcgtatgtactatgtgctggacactcttctaagcacatcccatgctccagttcatttaatcttcacaactacactgttattaacttccttttacaagtgaggaaacagaagccaagagaggttaagagagttgtccaaggtcacagacacagggggagatagagctggaactcaaacctaggcagtctggatccagaacctctgaatcagtgaattactcccaataacactgggttgcaggcattaatcctgttttatagctgaggaaagtgacactccaaacaaaagtaagcacatatttatttttcaccttctatttgatagagactatattaggtgatttatgtatattatctctccaacttgaaagacacagttcccaggactataagcattctagctctggaggacccgtgtatgcagagaatggcttgcttgtttgtcaactaaacagccccttggaaaaggccaagagtggctggctgggcgagggtacctctcagtctccaggctcctagatctccagatgagtgagtgagagagctggtggagataagaaagagagagaataggagcctagtcttttttctctctcttcctccacccacaccctacctcctgtatattataactatatttaacatcctatatgctcctagatcctctaagcaactactgctacccccaatatccctaagcctgggcctcctctagcattagcagactggaaacttggttagctggcctttggggtgtctgagtcccacagtccacagctgccttatcttaacccaccttatggccactcaggccacaatccctgggctggatgcaccttggtccaccactgtcgcctgttatctatgggaaatggtacactccagattttgttttaaatatgtacaggttttgttttgcccttgatctttcttaaatttccaaagtgagcaccacaccagtgggctggccctgagagactgcctctctcaaatttccagagcagcaaggaagtccatatgtgccaggaaggcaacactggagacaggacattaagtgtttcccaacctaggcaggtatagactcagaaaaggcctgagaaaggagaggagcaatactgaccagtgacatggcactgttgtgtacccagcacctgtcccctgaaagatgatgccaggagccatcaccttatttcacccaggcactatcagtcaggcaagaccaactcccagacacttcacagaagtcaccaaaatgaaacatactaggctatcactgaacagtcctaaactagaaatcttaaattccaaacaagaagcattccaaacaagctctgcataagaaaggaaaagttcctaaagatccctctgattaagatggtcttaacctaatcctcctttgtcttcatctctctttccgcctgtcttctctctcattcttttcctcacgtttttgacactagcctctatttcatccagttgttcatctattccaacttttaggttgaggtaggagtggatggcaaggggaggtgcatcctttgctcttctacacccactctaccaccaccacctttaaacccacggaagcaaaccccacttacagccccttctccgttgcagcctgctgctgccgctgctgtgtggaatccagatcttctgcaacctggtttgggtgagctctcccatctctggagacatcttaggagtcgcaccgaatgacatcactgcccacaaggtacctggcctcacttcctatcttactagctgtcttttctctcgctgtggccacagcagcaggtggacagggctgggacagggggtgtactgggtttctgagccctctcaaagtctgtcttcagtcccctctcttctttcctctggtcctagcctgcctctgctcctgtatgtactagtggggtattgggtgcagagggcgagaggttgggcagaggtcaggagaggcctctgaactccaagggctgtgtacataggaggtaagttggagcccaacaaggaaggcagccagcaacacagcccaggtctgaccagtcacttccctccaatgaagacaagactaatagagtatgcaaataaaagaccaaagatcatgtgcttacagcctgtgtggggtatagaggcaaaggtgatggaggtaggtctcagcggctttcccagctttgaaataaaaaaatgggcccaagtagaatgtcaagctccaacccagaaaccaagattcacatcagaaatgcaaggttcccaaggacaaaaacacaaacacaaagtccctactggggaatgcagtgttttgagctggcaattagaggcccaaactggacatggaaggtccactacttctctgcttccccgacccaaaatggcattgcatcccttgtcttctctggattctgctgccttccttgccacagggcctctcccacctgaaatgtgctgcctggagcactcttgaagagatgggcactatccgatcatctttctactctctccagccaagggctaaataaataggagtaaactgacacctttggaagagtgcagccattgcctggggctggaggtgggggaatggtaagctctgcccacatggctgttagccaccatcagatgccctaaggagaatgacactggcatcatgaactgatagaaaatttcactaaagttcctcatgccaagctattaggatggagatttaggagggtggaggctgcagcagggaacagagagcaatggcctcaaagtaggacaagtccataggccagagtcatccagcccagatgactcactctcacctgccctctcccgctcccctgacccgttgttttgaggcttttatgtgtataactcatagaactgcacagcttgcctcgaagatgcacaagtgtcctcttacttcactcttttgcaaccttcccacccccaatgaacctccaacgattggctatgaagaagctcaactttcttccactgagctgggctacacaagggcaatctcttggggacagaaatttccaatccctgccctcaaatgctctcagttccactttgccttttaagaagttccctaaaatacatttgcaagccgtagtctacacaagggtcagattccctccagttgttgtgtataaatcataccaaatttttaatacattccagagcccacctatctaaatgaatcaactgagatagcagatcatgatggttaagagcaataggctctggagcaatatttcttgagtggaatcctacctctgccccttgttggctatgaggcaatgagcagaagactaaacttttcagtgcttcagttttcttatctggaacatgggaatgataggagtacctaccctccttaggactgttgaagattcaatgtgttaaaaaatgtaaagcaatctgtgaaatgttaaaaatatattatctaacactgttactccctttgggaggtaaatgatcagacacctccttgactaatctgaaacttctaatataatgctgaccatacagaaaactctcagttaaggaaacttacaatattatgggaaagggttaacatttataatacacaaagagctcctgcaaatcaattagaaggatgaatttggttttactcttttgattttgtgtaaagacttgcaagatcatttcatctcaccctctcaggtaagaaaactgaggtctagaaatattttcctaaggtcatgtagtaaatcagtggccaagtcaggaatagaacactagggacctaatttctc

SEQ ID NO: 1563983 - DNA, 4001 bp, Homo sapiens
ggggtccaggcttgaaagcctaacttaaaattgcctggaattagctatgagattcctcactactgttaccaattctgatcccagaagcaggagaccaaaacaagctttatggaaagacctcagcttggcactcaagacttttcaatcaagcttcagcctatctgtccagccatatctctccttagatcatccttaaactgcactggctgactcactgggccccaaaatacatggtgtattttcctgttttttggcctttgctcagcctgaaatgccattttcctccttctattcccaacaaaatctgatccacttttcaaggtctggtttgatgttcacttcctctgggaagtgacccctgtatccttgggacaggccttgtatttggttcttatattgcccacatgctcctatctgagcaagtatccaccagtattttcctggtctgcttccccactagactgtgaactccttgagtatggagactagatctcagtgatctgtaatttgtgtttccagtgtccaactcaggccctggcacagaggacagagaagacacttgcttattgtgtttgtgcagtctacatctctctgccctagatgagatgaacttgtggacaactaatcctagttcaacaaggtaaatattataacagagagctgtgcagggaattggatgggagaactaatttgtctgaggtaggaggtggcatccagaaaggtttctctaccttgaatgggacagaaacagataaaagaatgaagtcctctctgaaaagggccaatgaactcgtggcagagaaagggttcagtcagtaccagattctcattcaagatcaagctctgacctgcagctcttggtctaaaattctaaaatggggctatctctagggaagaaaagattacaatgtgatttcccaaggcccccagatcctgaccccatacccctcccaaagtatagggcatgtgtatcgggggagaataccatgtaaagcagcatatgacagtgctgatggataataaagtcacgaatggggtctccctattggtagctctcagactgtttgggtatgaatgcatttgtggagagtgaaggtgtgaggggagatcgaccacacacttacaagctaggtgcatgtatatgagtgtcaggccttctgtgacagcagcctaggatccccttccttctcacccactgtcctggcccaccatctctccactattttcggcctcatgcctgggccccaaacctcactgaatcctagtcatggaagtggctctccacagactatagtcgcacagcagctggagggttttgggtgggattgcttgtggagcctatagaaaaagcaagatgactactcttagagcgaggaagtcctgaaatgtctccaaagagctttggtttctgcctttccactcttcttgatcgtgacagccctctgaggaacgttggctagagactttgatttccattttactgaggaagctactgatgcccagagaagcaagagagcttgttcaaagcgccacagcaaatcaaccctactttacacatcagtggggaggtaagagctataatctcaatcactcagttcattcaaaaccagacttgaccaagttagagagactttcacaggtgctagtgaattgccctgggggccagtgtcccataaaggccagaatggacttttaaaaatatacagacagataaataggttacatatagatataatcttttcccccactttcccatgccctttaatgcacacgacaaccaaccatctatgcaaagaaaactttccagagggcctgaagaatggatgtggatttgtgcaactcctgcctactttcccttctttctcacctaccttttattctagaggttttttcttccatcgctaattatccaacactcggttctcttgcatttacagacccccaaggcaggtccagtgggtggcatcaaagaggaagcctggaggtgttcgttggttccctgagaaggctgaggacgtacccttgttaagtgggggatgtatgtgctctgttgaaatatcagctgttgtagttgccaaagacgttcctgagccaccagaagccttttctcttcagtccaaccatgtgttcaccttgccccaaaggtcagaactaatattaacaagccactgcagaatggggaaattaaaaccagccatggagacaggcaagttctggatttcgctggtgctgagtttcagatcgatcttcagtgtaaatgggcataatcccttactggaaagcaatctggcaatatgaagcaagagcaataaaaatgttcatttcctttgtcctagttatcgcactcatgggagtcaatcctgagtcaataactcccaaagcatgaagaagctcaggacatgcaaatttttattttaatcacagagctattttctgatagcaacaactggtaaccttttaagtcctccaggaggaaaagcagtttactgcgtctttgctgtaaccattgaggatgatggctctaagacttaaattctggggaacaaataattatgctgcaattctgggtgaggaacctaaagatgcatcgttatgcttttccctggacattgggcatatccattacttctaatttttgtgctctcaaaaacaagccatgaacctgtcgatgctcttgctattatcctttgttcattcattcacctgacaaatatctattgcttcccaacatatgctgtgtccagtattaggggatggggctaacaagatgaaccagacatggtcattgctctcaagttgctggcattctaatggcagcagaaatagaagtcaatgatagctgtgtattataagtactgtgacagaatggaccatagggtgccgtggggccccagaggaaaagacttaactggggaggtgtgtggtcagtaaaaacactcagaaaagtaattattgagctaattaagacagggtgtgaatcctggctctactacttcagtgtaagagagagtgaactgtgagaatgaaatgaattcattcgacgtctctaacttagcctccatgtcccgaactgggttgtcttgagaatgaaatgagataacatatacagaagagccatggatgcatccggagacaatgctgctcacgagcttacatttcctgggcttcgatttcacttatctgagaaacagaaccaagagtaaggatgtgtccggctacatccttcagaatgttaagagccaagacaaaagctacagggcaggcttgagacagcctcctcctcctcccctctgccccaataaagccaaaggccctcctcctaagtcttatctcagtggagcgactcttactgctccctcctccaaccatgaacttccctttgcccagtccaacgcgagcacttagcgccagctattcctggggcgcaagcgctgcagccatctgtgaacttaggtgggcggtccgccgcactgagggcggggctttggcagctgagcagttccgctcagggttccgtcgcttaaaaagtggcaaaatgccgtttgtaagtaaccggacgcaccacttggacttctgagtagaggaaaaacgcattgagactcagctgtccgagcggaaggagcgggagcccaactggaaactcctctcgccattcattgcccctaggcttccgctttgcttccttcagcgtccacccagttcctcctcccgccaatgagagctgaggaagttgaagcccccgcccgacgtgcgtcaggcgctttagtggtacgcacgagaacgcctgcgcaaacgcgcgcgggaggcgggcctggccaacttctgaacaggaagcagttcgctcgcgcctaggttggcgcgggctgggaggtgttccagccctttaagatgttgcgcgtggtgagctggaacatcaatgggattcggagacccctgcaaggggtggcaaatcaggaacccagcaactgtgccgccgtggccgtggggcgcattttggacga

SEQ ID NO: 1563984 - DNA, 4001 bp, Homo sapiens
tggatattagacctttgtcagatgggtagattgcaaaatgttttctcccattctgtaggttaaaaggctgaattttatagcatgtgaattatatcccaatttaaaaaagaatgcatatgtcttagttcaggcttccataacataataccatagactgggtggtctaattgttcaaagctccacagaaattagttggagaagttacaagagtccattaatcatcttgctttgttagtagcagcgggcatggttcagcattttctgcttaagtttctctgagctcaccaaaactaaaatgatgttgtaatactttttttttttaattgcacatcactcctttattatactgatctggtaaaaggatttagtacagttatgctcagatgaacactgggcccatgtggcagggtcaagcaactagaacatgattcagaaatcagtgaaagacacacttggacaggaccaagaggcatttcactgccatgaaacaaggcaggaagggattctaatacacacaccaggaagcactcctgcccctcagaggtcaaggagctgatcctatattggtatgaggaatggcttattttctgatgaccacatgtgggactatttcaaccgccacaagaaaccccagaagggttattgttttgtattattaatatatactatacttttttaataaaagtaaatataacacataacgaaattcaggattgatcccaacctagagccagatcctctggggtcaaggaggaaacagttgtcacatcaccatgcagattacattcatcttccactggaatgactagagcccccaggcagtggcctgactgcagaagagcagaggacagactctgctcatggggacagacaggctctgttgcttctcctcattggtcgtggcttagcatgttcctccccaaagtccttagtaaacaaagcactcacaaaaacccaagtcactacttttaaactctgttggataaggggagcttttccacagcttagactgagaacctgtgctctagaactgctattctgactagattgtatgaagggagtgggtgcaggcgacaaaatggctaaaatgaaaatgggagccactggtccccatctgcagctacaactcaagatgtctacagatgtggtcagtgtgacatgtgcaggtgggaggggcagagggacaagaccagcagggagggtgctcctggggacagtatcctccccgctggccttcacttcttggccttgccctgggcagccacagcttctatggctttgcacaccgtctcttcatcccccagaaactgcatgggcttgataggcttcaagttcttgtccaattcatagacgatgggaataccagtcggcaggttcagctccatgatagcctcttcagagagaccctccacatgcttggcaatgccctggaggctgttgccatgggctgcaatcagtacacgtttcccctccttgatctggggaactatttcttcattccagaagggcagagctctggcaatagtatccttcggactctcataggagggtagctgatcttctgtgaggtctgcatacctgcgatccttactgatgttgctgtagaaaggatggtcgggctccatcggaggtggtgggacatcataggagcgcctccagatcttcacctgggcctcaccatgctttgcagcagtttctgctttattgagaccggttagacccccatagtgccgctcattgaggcgccaagtcctcaccactggcagccacatctgatcaatggcatctagcactgtccagagggtccggatcactctcttctgcactgaggtgaggcagatgtcaaactcatagccagcatctcgtagcgcctgcccgccgcgcttcgcctcctcgtggcccgccgggctcagatcggcgtcgtaccagcagctgaagcggttctccaggttccatgtgctctcgccgtgccggatcagcaccagtttgtaggcggccatggcggtgggctgcaatactttttataccatttgaagtaaaaggtacaaaaggttatacgctgaaaattctttttcccacccttattccctaaccactcatttcccctcaccagaggaaccactgtttccatgggatatattagattgatttatatgaaattgccggtgtttgactatgatgatttcatgtggttcagcctaatatcagtgaaaaaacagagtcctatcttcatggagtttttattctagtgggaagtgtattacttaattattgcagtgtaacaaataaccccaaaatttagtggcttaaagcaacaaacatttattatctcacatttcctatgactcaataatttgggagcagcttagatgggtagttctggctcagggtgtctcatgaagttgtagtcaatatggtgtctggggatgtagtagtttaaaggcttaacttaggtctgaaggagcagtttccaaggtggttcacttacctggctattggcgggaggccttaggtctttgctggtttttgacatgaggcctcagttcctcaccatatgaacctctccataaggctgcttgtatgtcttcatacttggtaggtggcttcccccagattgcgtgattcaggagagaggacaacaaggaaaacacaatgcttttttctcctcttgcaatgttttttatgacctagtcttggaagtcacaccttgtcgcttctaccgtagtctattcattagaaacaagtcattaggccaggtgtggtggctcatgcctgtaatcccagcactttgggagggcgaggcgggtggatcacttgaggtcaggtgttcgagaccagcctagtcaacatggtgaaaccttgtctctacttaaaatacaaaaaattagccgggtgtggtggcatgcgcccgtaatctcaggtactggggaggctgatgcaggagaatcacttcaacccgggaggcggaagttgcagtgaactgagatcgtgccacagcactccagcctgcgagacagaattgagtctcaaaaacaaaaacaaaaacaaaaaccaaaacaacaacaacaacaaaaaacaagaaacaagtcattaagttcaggccacaccgaaggggaaaggattaaattccacctcttgaaggaaggagtagcaaagaatttgtgggcgtattttaaaaccaccacaggaaggcagacaataagcaataaacagaataaatcagcaagttatggagtatgttagaaggtggtacgttctatgaaaacaaaagaaaaagcagaggtaaggggaatcagagtatgtttgtgtggaagggatgtaggttgcagttttaaatagggtggtcagcatagtcctcattaaggttagatttgaacaaagacttggagacaaagaagttagccaagcagttatctggaagaagaaagtcccaaagcaagagaatagctaaaataaggccttgaagtaggagtcatccttgcatgcgtaacagccaggaggccagtatgactggcacagagaagggtttggtgagtggtagaagaggaggccaggtaaacttgagggggacaggcatgggaaatcatgtgggaccttgttggctgttgtaaggatttgaggcatttttgattagttcttaattcgtacttacaaatgttaaatgagattatgtatgggaaacattagtaatcaggaaagcactctatgaaagctagttacttgtattaaagtattgaaatttttatttttagttagcatatccatagaaacaactttcctttacttcatctaaggtgataagaattttttttctaagcaggaagaatgcttaccatattttattactagcacattttaattttttaaacatgacacttgagcatatataaaatgtagcatatttttaattggggaggtgggggaaaagttgaggaaagattatttgcatggctgaaattaatgaatttattgtttctaacaggaatgtaatgaggaaatca

SEQ ID NO: 1563985 - DNA, 4001 bp, Homo sapiens
gtgctaaatgaaactttattaggtccagagggagaaaagttaagcagctcctccaatcccgcccccagctagcttcctcaagccagtttccctagagagagaggaaataaagcccaagactgcaattacaggaaggttatcagcataatgtcccactccttgtctgttagttggtccatgcatctggaagaatcagcgtcgaacacaggggagatgcaaggaactaattaaaacctaaaagctagttgcatgccaatgtccacctgtcctgttttttacagggtctatcccctttttttaggattgtatgagggccagaaagggcactcctctagtactaacatggctgtgactcctactttgtccagattacaaaggcctatgtcatttggggaaatgtggaaaccaggtatttttcatggacataaattattgggttcttctatctccacagcagggcagcggttacctgcaaaaatattgaccaaagtgaaattagagagaagaggagagctacatgtccttttagggtacccatacagttccctaactcaaacgtgtcctcatatgtttaaagttagagtaaagggagatctcctactgacttacgtgtctgttaatatccaacacaagccctcatttgaaccagcccaaattggaaaaggggctagattacaccagccaaataaatacctacccatcaatcaaccacttcccaaaaaggtcaaggttgcaaaatgctatcaacagaaacctttatgacccctcaaaaacaccactcttggatcctgttaaggtatatgaacagtcaagtccatcagttacataccgactcatcctcctgcaccttgctcctggtatgcacaaatatatcacacgtgacaaaaaggataaatgtaaaagctgcccactctaccaacaattctggcagataagagagaaaccgtgttggcaagtgactagagatccacatgcgcagagtaagagacccaaagtgcacgaggaaacttcccccaattttaaaattctacttttctagccacacgtggggatgagattggaggccagcaagtatgagcagccacaccctgctctaccattacctagtatgtcacaatcctgatgcaaatcctgtgcccaagagtccaacgataccgcgctgcagggcagcagacgcctgttacgtaagctctgcagggcctcctccagttcgccccgccctaccctcccaccccaattctttagtggcggggggcgggggggtctactcctgaagttaaatcaacatcctcttggaaaaatatccttttgtgcaggaacctgtgagatgtgggccgtttctcatttggctgcgacggtctaggagcgtgggggaagggaaagtaaaatgacctttcaaggtcccttccttgaagcctagagatttgcaggataagcattaagtcccatctcgccgactgggagctggaggcaacggaactgcatttcaccaataggaaaaaggacaaaatgggtcccagcggcaatctcagcccttcctcagtgggatccatccccgaagggtgacttcgggtgctttctgggctggggaaaatgcggctagaaaccaccaaacccgtgagcagcctcgccctccaagcctaggacccctggggcccagccaaaagctaaaagaacttagagcagacgagagaacaagtcggctccggccaaagaggtttgcgacagagcacagagagcacgcgggcaaacgtgcagaattacctcataacgacccgcttccctttaacgtccagcttgtccagcgtcagcttgttagaaagcgacattttggaaatacagctggggagagaggtcggtgattcggtcaacgagggagccgactgccgacgtgcgctccggaggcttgcagaatgcggaacaccgcgcgggcaggaacagggcccacactaccgccccacaccccgcctcccgcaccgccccttcccggccgctgctctcggcgcgccctgctgagcagccgctattggccacagcccatcgcggtcggcgcgctgccattgctccctggcgctgtccgtctgcgagggtactagtgagacgtgcggcttccgtttgtcacgtccggcacgccgcgaaccgcaaggaaccttcccgacttaggggcggagcaggaagcgtcgccggggggcccacaagggtagcggcgaagatccgggtgacgctgcgaacggacgtgaagaatgtgcgagacccagggtcggcgccgctgcgtttcccggaaccacgcccagagcagccgcgtccctgcgcaaacccagggctgccttggaaaaggcgcaaccccaaccccgtggaattcgaggctgccctaccaggatcaatgcaaatgccacctccttttggaaaatcctggtttcctagctcccttcatggaattctgcttcttaaggcttacttagtaatagagacctctcagaagttggaagaggcccaggtccactctggcccccaccttttttaaaataaaaaatgcaatgtaatttttctggttatggcatgattgatgctaatggcaaacacgtggcatttttcatatattaaccaacgctcacaaaacgcagtagtgactactgttatcctcattaggcaaatgaaataactgatgcacagagaagtttagtgggccaggcgcggtggctcacgcctttaatcccggcactttgggaggccaaggccggcagattgcttgagcccagtggttcgagaccagcctgagcaacatagcaaaaccccatctctactaaaaatacaaaaaattagctagacgtggtggcgggcacctgtagtcctgttacccgtggagggtgtccaagttcttagcgtcttgaactaagaactggacgaaatgcacaaagcaaagaaagaatgaagcaataaaagcagagatgtattgaaaacgaaagtgtaaccgcccaatgggttcaccttgtccgctgcctagacagagctgatttatgaagacgggaattgcaatggcgaaagaataattcacgctgagcgctgtgcgggagaccagagtttcattatcactcaaatcagtctccctgagcattctggaatcagagtttttaaggataatttggcaggtatgggttcggaaagtggggagtgctagttggtcgggatgaagattaaatcacggggtcgaagtgagttcttgcgagttcttcctgggtgggatcgtggagctagttgagccagattatcagtctgggtggtgtcctctgctgcatgagaatgcagggtctgcaaaatatctcaagcactgatcttaggatttgcaatggtgatgttattcccagaagcaatttggggaggttcagattcttgcagccagaggctgcatggcccctaaactgtaatttataatcttgtagctaatttgttacacctacaaagaaaggcagactggtcccagcaagaaggggaaagggctgttatcaattttgtctcagagtttacactataaattctttcccaaggctagtttggcctatacccaggaatgaacaaagacattttagaagttagaaggaagatagggtaggttaggtctgatctctttcactgtcataatttcctcagttatgatttttgcaaaggcggtttcaaaagtatactccacaaggtgagagcaggcctgagcaagcagctcaagagcttggttacagaattttctggggtctaaatacccggtagaggtttcccattagccacttggtgtataccccatgcaaatgaagtagtggtccatggtcagtctgattggttgcagaaagtgaccaatcagaggctgaagtgaagttacaaagttacactcctatacaaatgaaaacttggcctgccaccagcctgattggttgcaggaagggaccaatcagaggtactttcaatttctcattcaactgacttttattcacagtgctgggaaaatatat

SEQ ID NO: 1563986 - DNA, 4001 bp, Homo sapiens
accctgtctctaaaaaataaataaaatttattttttataataaataaatgtctgcaagaaaaaactgagctccttaaccttaacacatctgattttgatcagttggactgggagactaaaatgaatgcctgagtttgtgtactgccttctgtactcttccctctctcaggccagtgtggaatgagcaccgtccatgtggacatcctctaagctccctgtgtttagaggagtccatattggaggagccaaaacctcttcttcctcatctccaagtattctataaagcaggactttgcaagcctggctgcttttcaaattcgcctgggaagcatattaaaatacagactcccggaccacccgagactcatttgcagctctggcggttagactgggaatctgtatttttcctcagatgcatcaggtgattctgatacgcaaccaggtttgcaaaaacctcgcctctaaggaacccatcaggcctgccttctccaacagctcagcagtgcagcagtcatccattcttcatttccctctggttggcttttcctgatatccccccacccagcagtcttcttagctctactccttttgtttcttggtatcctcccacttctccctccctccattttaatttttcttggcttctaatcctttctctcctgctatagactaaataccatattaccttaaaagcttgccacgttaccattgtccaccatattcagcctttattcctccctcaaacagcccccttcctccttgttcaccttccagcctttccccatctgccacacacagcacaagcgcacacagaccaaacacatgccacacacatacctgacgcatgacccatttcaagcgcgcatgcacacaccacacacacacacccctgataaatcacatacactaaacacgcacacaccgcgcatgcacacaccacgagtgcacacacacatcactatccaccgggcacaaagcttttacctgctgctaatcccgtctcggcgttttctcccacaccctcatatttcaaacctactcccggtgtcattggccttcccgtcttctctaggtctggaccttttctcactctcgccctcccccatgcctccctcggaacaccctcatttccttcctagaacccgacactaccccctcctccttccaggaatccccaagcccaggaccttcgaaaactaccccaacagcctgggctttgatgtgtcccccctcaacgccttcgagcttcgtggtcccacccacccccggcttaagcgcctcagccttctttctctaaccccctcccagcgctgtcagcgcgggccggggatccgcgtccctgactggcccgcagcccctctagagcgcctcttgttccctgcccgccccgggagcctcccggctctccgcctgcccgcctacccgcctaccctagctcgccgccattcctccctccactcaggggcgccccgctcccgcctcgcctctctcccgcccagccccgtgccggggcccccttcttttgtctccaagcccccctcgccggccgcgtaccgggcccgtagaatttgcggcctttggtcacatcgaacaccttgccgttgatggccatgagtatgcgcgggtcctggacgccgtcgaagcgccgcagctcggcgggggtgaagtcgcgccgcttgaggcggggcagagggggcggctcgtcgtcgtcgctgtcgccgctggccgccggctggtccccgcgcacgatcttgtagagcaggaagatgcagaggccaagcagcagcaggttgagcggcgacgtgaaaatctcatgcagcagcccgccgctctccagatcgcttgggtcggcgccagtcgccaccacatcctcggcagccatgatctctggagtaaaggttgggccgcgctaggcagggatccggaactcgccactttctcctccctctgagcgagcgagtggcgcgcggggttcggcggcggccaaagactagccggggaggaggcggggcctgaggggcggagcctccaagccccgcctcccccgaggccacctaagcgccccgccctgctcggtcccgccccgcagccctcaggccccctccaaagcctctagagtccggcgccgctcccccgcggccgcgcggtgcccccctcagttctacctgggaggccccagcccagcctcacgccatcctcgcgccatcctatagctgagcgcgacgcacgcgctgccctcctctgaaccccttttttgctcctcgcagaccgacccgttgggagggcctcggcattgccgggctctgtgcgagcgcccctccgccacctgatgcgcgccagacaccgactccctttctgttgctgcaggcttttccctgcctcccattctgaagcccctcatcttccccctgccgttcccgggccctccaagctgtcttaggagacaggaaactcattcttcgaactccattttctatgttagagccctacacgactcattttcaccttgggaacccccattcgctctccttgatggcccttccccaattctcccccagatgctgtgggaccgacacccccgggattgctaaagtcagtgcacaactctccctattatctggggaaacgaatctgatcgcccagttaactttgggtttgttctccgaaaaacccttttgcaattactgatttgctcagtcaccaggcattaacaagcaacgttctcttgttgctcttttttcccccctcagaataatgtgaaagtttctttgtttggcagcgttcttctatttggagtctgtcaggctacccttggcagtcacaataaccctgagctggagcccagacaaaggcgggagtttggaaggatcctaggcctggtcccttcctttcctaggtatttcatccggcctttgatgtgctaacaggctgcacagaagcagacctccacggaggaaggggttgcctcgtcctaatctggccctttttctggtggcggggggaggggaggagaagaaaggatagagagggaaacaaataattaaaaccaagccgtgcacacatctgcagcccagagcagtacttttccaccaagtgttctgttggcttgcacataacttactcctcctcccaacacgcaagagacttgagtaaagattggcttcctacctcagaattctaaaaatttctggcaaaaactgcttccatccctgccccccacatcttcttaaatcattataaagtgcaatgagccaaacaatctttgtatcgggcccaggcatttttctcagagctaaatttgggattagctgaaacagcccctccaaatcttttgtcaaaactcttcaatttaatcatggagaaacaggctcaaactgagggcacttgtctatagttagaatctatctcttttaacatgtatggccaagaaaatttagaaagctaataaacttataaaatattttcatttgcaactaatatgacaaagggttaatatttatttgagagatcatttggattgataagaaaatgtataagattctagtcaataaatgggaaaaaataggaacaggtagttcacaaaagagagcatgccagtggtgaataagcatatgaaaaatgttcagtctcattagtaacaaaaagaaaagcatggagatgccgctgtcacctactacttttctacaggaaagataaaagggaaaaaaaaaaggataacacactattggcgagagagtggtgagactcacatacgctgttgggtataaccttttattatccataaaaatattttctatccattaatcccacttctagaaatctgctctttgacctagtaattccattttcaggaatccatcccaaggagacagaaacgcagacaaatatttcattactaagatgctcagcagagattcatttttaatacagaaaaactggaaacaacctaaatgtccgacttcaaataaaatggcgaattaattcacttgaattgtgacaaa

SEQ ID NO: 1563987 - DNA, 4001 bp, Homo sapiens
ccgatatgccacggcctcaggaggtaatcataaaagtagagttttgtaaaagtttcgtgcagtggtaatatcgttaaaaagagtacatatttttacataaacaataattattgggatttttaagtttgggagcatttgcaaaacctaaccttgcagtcacgttgcacgtagcctgtagtcttttggcatgcccatagaatttttcctcttgtttggaatttcagcagaggacccttgtttaaaccctaagtgctgagaaatcttacaagagttttcaagagccacagattcagttgcaggagtaggagatttcgctttatcagaaagcaataaacccatctaatttcctaaatcttcagccacagaaagcgtggaaagatggtttgctcattttagcagttttcaaccacacaaccctaactcttttaaagtttaattactggtttacccctgccaaaataaacatggcctcctgcaggtttgctacatttcaaactgcacctagaatctcctcgttcctatgtaacgttcaagttaatgaagtattatgggttgtatgagaaaaattaaaacggtaatagtcaagggttcagaaagcctagaattttagaaaatccctcactcctttccaagatatttgattctttttcatgggaatacacttctatcatcctatatactctctgggtacatcattctcaccaacagtcattaaaataactgaatcacaatatctttcaaatcttgggggaaaacctctgttttccttcatattaatttgtaaatcaaattgcatctcaccagagtcactggataagaaaggaattgaagaatatcattaaaagcacactttaaaggactgatttgtgttttgtgaattaaatttcatgattcgttcaagcaaacattaataaaagtcaaatggaaagacactccagcatggttttcatcacaatgtaaagtctttcctcaaaatataaatgaaactatgtgactatgaattcacaaacactcattttgctaaatgtaccacataaaaaattttccacccaatgcaacagaatcagccagccactcgaagccacttacacccactttgccttctggactatacatttggtacttgggtgtatttatttatttaggctccttaaaaaagccttctttatcatttgcatatttgatagaaactaaagatacaccacctatgaacgcaggcaaacagccctatacctgtgttatgacaagttttgctacaataaagcacaaggaaacttctcgacacacacccagttcccccggcctcctgcactccacttacctagaaagaggatcgtgcccagaactagggtgccaccgacaaacacgaccagggcaattcgagtgcctctgttggccttctttccagtctccacgctgctccctgtttctgcttccatcagaagggccgtagagagcacacgagaagaaagtcacttttcgtggtttggtggctggtctcaagagcgaggcgttgacatccaaggctttcttgctcttctactaatggacagcttaagaaactgccgtcaggaaatctcccctcgccaccctttctcaaataattcttcacaaatgaaaattataaaaaccaaaatattggttgccttggctttccccctgactagacaaaacaaacagtgttgctttatcttggtgctctccctcagcaaagtccctgtttggcaggctcttctctcaagcgttccgagtatatatgttttactatgttgctgaacagatgttttagctatttaaatgtatagtcacttggggaggaaaaaaacaattgttttatcaaaactggattctcgtgaaactcccccaaatcatgataagttaggtggccaggattcaccggacccacttcaagatctcaattaatcatgtaattctgttgcaagaatcattctgcttgcctgaattgtcttcatcaaagatattctttcagtgtgtgagtccctttttaaagccttctaagagttcctaggatatcctggagcattttatttcaggaactttgtgtatgatagcatgtgccaaaaatcagtcatagtccagtgcagtgcaaagtagcaattaagacaacctacagaggctgatggtttgaactggaactttttcttaaaggaaggagaaaaagcacttcctctttgtggtactaagaagtgtacaaaaaaaaaaacccacaaaaaaacacaagtgcgtgaattaagtttattagcaactacaaaagatatgatgaaaaattttttccttgtgtgtttttgatgaaaagtgcaccatgtgttttgtctgccactcctactgaggcagccattcattaggatgtttttgtgtttacataaactgtccacttcagcagattccccaggatgaattcaaaggcaattggtttcaggccgggcgtagtggcccacgcctgtaatcccagcactttgggaggctgaggcagggggctcgcttgaggccaggagttcgagaccagcctggccaacaaggcgaaaccttgtttgtactaaaaacacaaaaattagccgggcatgttggtgagcacctgtattcccagctactcaggaggcagaggtgggagaatcgcttgagcctgggaggtggaggttgcagtgagccagatcgcgccactgcactctaacctgggtgacagagagagagaccctgtctcaaaaataaacaaacaaaaaacaaaggcagttgacttcactggaaagactgatgaatgactgggtctttgatatttttgattatgataatgatttaaacgataacaatgtgctttcttcatggggaagggcaactgatattccaatgctaccactgaaatgatatagattttattatccaaagatatagatatcgttaactcacaacacaattactacctacctgcttttgttttgctggaggtcatagggcagtgggagtgggggtggagaattcaactatatctagaaaccagtagagcaattatctcaatgcaaaacttgtgcgcatggctttagaggtgacacaggagctcagcaggtgctgatgagctcagtataacatggccacacattcatggtcctgtctggcttgtcttggtcagggcttaagcccttagcatgggattctctcaagttttggggcttattccataatataccttactttctgctcatttcatgttgcgccaaagtcagggggtcacaagcctttgtccaagttatgacatcatggtgtgttgtagttatcctgtgctcattggctgttgacattattttgttgctgttattccataacacaccctagcaggactttggcccctagtatgggattctcccaagagtttttggacctcactctagaacacatcttagaccatgagttccacaaagtcaggaaccatgttcaatgttgcagctccaacatcgacatttcctggcccttcacagtgaaaaggagagcaataaaaatcatacaagttagccctagccacttactcttaacaaccagcttcagctgggcgcagtggctcacgcctgtaatcccagtactttgggaggccaaggcgggtggatcacgaggtcaggagttcgagaccagcctggccaacatggtgaaaccctgtctctactaaaaatacaaaaaatagccgggcgtggtagcaggcgcctgtaatcccagctactcaggagactgaggcaggagagttgcttgaactcaggaggcgggttgcagcgagctgagatcatgccactgaactctagtctgggcggcagagcaagactgtctggaaaaaaacaaatacaaaacaaaacaaaacaaaaaaccaacttcggggccagaagtggtggctcacacctgtaatcccaacactttgggaggctgaggtgggcagatcactctaagtcaggagttcgagatctgcctggccaatgtggcgaaaccctgtctctactaaa

SEQ ID NO: 1563988 - DNA, 4001 bp, Homo sapiens
aaaatattctagtgtattttttctgtaatcagcttaaatttaatttgtaaagtaagaagagccacaaaaaaagtgcaccaaaccaattaaaaactttccccaatgtgcaatgactaaatggatttttccactaaaattcaaataatacatctgcgcatatcttggtaatttttttagtctccttgtaaaacatgaagtggagaacatcatggaaacaatgactcctagcaaaaatgtctttatcataaaagtacagatttttatctaatgttgtcacatttgtggtctctacttaagcagaataagggcattccaaggaccaatactaaggggttcataatgatccacagctatatggcattttaattttagtctaaaaggtttttcaggccatgcggagatcaaagtttgatgctttcacgcaacaatgaaggcttttctttaaaagaaacatcgcattatggaaaatactacaaagcagaaataaagaggcaacaataacagcgtgaaatacataatttaaatgcctggaaaaaaaataaaagctagattagttaagctgaagcaatcaatgcatttctgattttccaagatgctgcgaagcaccaaggtagaaataacctgaaacatcagagagagcattcaagaaccaactccagagctcatcaatgcctggtatctgaaaaagcattttcacagaaaaacaaacaaaacaacaaaaactgcagttccggaagattaaaacattccacgcgaaagcaagctgaaatatacaaatcaaaacagataacaaacgtgattccccaaagaagcagtatttctaacaggaaagttacagtggacagaaataaacgaataagatgtaccggaagggcacctgaatttggttgcacgatattattacatgcttcgcactgctttttgcggttattcaaaaggaaactaaaggaattttccagttgtttcaaacccaagggtagagaaagaatttgaacagtataaataagacctgacattaggtagtaaggcgatgaaaataaaagattttctaaaaacaaaagattttttaacttccacgcagaatatcaaaacgaatggaaattggaaaagaataccgtggtgttcatccatataatgaaagacggtacacataaagtaccggatcctctccgttatttattcccccaatacacactagactcccaagatctccctctaatcaagcgctaaagtcacaaaactatcttcccctaaaacacttcagcaggttcctttccgtcgtaaagtcagggtcccctaatcgtccttttccaatcctcccgaatctaggaaaatatcatcctaccactttctttatgccccctcccccaagagttagccctctcacagtcttcgttgtaagcttccccttatacctcagtttcacccctaattccccccaccccggagtttttcctcattccgtaaggctctctctcttgccatcctaacaattcttcctcttactcttcccaaactgggagtctccctctttcccaaatatgttctaagcaatggcaaaaactaaaaattcccagttttttccctcctcaaatgttgcgccccctcccccgaagtctaggcgtaagcctaacctctccttctgcacctccaaagcactttctcagcagcctctccgccaagcgcctacaatgagcggcgcttctggggtccctgacaataaagcgagaccaccaagagtcccctttaacaacgggcaggggcggcggcctggccaccgccatcctccttgtcttctcccgccggggagagaatggggggccccagggttccgtggggactcaccggcagggcccagaggcggactgcaggagagaagcgccaatgagggtaaagagaaagaagtcggtctcggttctccagcagtgcctgagagcggggctctgtcgccggaggttgtttcctttcattcgaggagagacgggctcgcggagcgcccttacgtcgcccccctcgcacgcacacgacccacagagcgttgatacgtcccgagcgcgccgcgggccctgattggccgcagagagggggcagctgaagccgcacagccacagcgcatgtgcagaaaccaccccctgtacgactgaaggcggcaggccccgcctcctgttcgcgcgcggaccttctattctccgctccgccgctccgccgagtgtttgggggcaggatcagaggagatagagaaagagattcaaagatatcgctgtgggctgggcggagaaggggcaggattgggacggaaaccgttggacaggggccctgggtaaccagttcacaacagtgattcacgtagacaggccttatcccttgcacttgttcgccgaggccttttcacatccattatttcattgtactctcatggcatctctttgaggtcctccgttcgttttattgccaggaatgactgagaagcttgtagtggagtcaccctgcctgcatttcaatccttgggcgaatcgttttaacctctatacctttttttttttggtctttaaaatggggataaaaatagtacctcacgggtttgtggtaaggaagaaatgaaataatgcaactaaagcgtgttattagcatccctggcatataacagactctccataaatgctgggattatcacaatcagaaaagatagggtgattttctttataatctatacatgtaaaccagacacctagacgagtgctttcctctttggtgtattggagccatgcttgggtttgaactccagctctgccacttctagctctatgaccttgatcgctttctattacctctcagtccctcagtttcatcctgtccaaaatggagatcataatagtattcgtctcaaaaggtagttgtgagaaatgagatagtatatgtaaatcacacagaataatgcctaggcacatagtatgccctatgtaagggttagcttttgttattttctatgggcttcacagactttaacaacaaaaaaaagccttaaaccagtgaaaatttaaagatgctcttcaagagccatttttcctgtagtggcggtggatttccacggtcttgatccaatgctgtttctatactgtttcgtcaatctttttacttttctctgcaatgtcaactttaaagtgtaagttcccaagcaaacagtgaccatggtggtgtgacgttgaactcttcaaatagatacctaataagggtggacaaatcagccatttagctgcaaggaacccttagccctttaacccaaggccctatgctgtgaaagggagtggctaaagatttgcataagaagatccagaatgtgtattccaaacatttatggtgtatatgaagacaggttccccagcatcattttctaccagctttacacacttactgatgccaggatgagacagatgattgtgtaactgacaaaatgcaatgcctatgcagtatgccatctttttaagtttccccccaaatccccacattttgctatcttttattcattatttcatccatgcattcatttcaacaaactttgattcaataaacacttgcaaaactattaagttccaaacacaatggagacctagatcaatacaactcaatccctgcccttgagctcatggtcaaaaagaagagacggcaagcaaacatacacagtatgatgtgataaatgctgtattacagactatggctggtacagacatcttctgcctattatgtacaaagcactatgctgaggtatgacacaacagtaactaagacacagcccttgccttcaattgtttacagtctaccaagaaaaagatagttacaataggagataaagtgcactgagtgccttaaaaggtggaaaggaagtgcagagagagttcaggagagggagatatcagtggctccagttacttccaggccccaagtctggtagccagtcccaattagcatggctgatagatgcagcctgttatttcaaggcctac

SEQ ID NO: 1563989 - DNA, 4001 bp, Homo sapiens
catctctcactgaaccctcccctagctgacccctgtttcacagggctccctctattatgacgcaaaccacagcgtcaaaaatgaggctgggggtatctcaagacaagaccctcctctcaccacctgaaatagggccaaccagagagagataagggatccctgaaagtctcttcaggttactcaaagccttcacgaacaagacagacaagactaggcgcccaactcaaatcacagttctggggtcgtgttcggagagtttaaataatcctttccatcactctcaatatcattccttccccgaccagtcaggagtctcatcacccccaaaactgaaataaatataaatctctaaactgaccagctcgttctgtactttaaagatgacagggttctggctgcatccctgaaactcaaaaggatctattcaaaacccctcaaactgactagaatttcctcacactcccgaaactaagcaaggattcttttgcatcgctcggaaactggcagcgtttccttgcagccccccctcaaactgatgagagctccctagtctccccaaatgttcaggtacctcacagtatatcctaaaactgacagtaatagcctcgcagcccccaaaacttacaggaatcttaacgcttccccaactgacaggaacctcctcacgccccaaacctgacaagaacgtcttcagtccagaatcctacagggacctcctcatgctttgggctgcaaggactccacgcccgcggagctcagccccagcgacacgccggcagccgggctagctccgggactgcgaagcgcctcagcggaggctcgtccggtagttccggcccctacggcgacgcgcgtcgaattctgggatagtccccgtaccgccgggaacctcgctcgccttcccctcgagccccccgctgggtcgcgcggcgccagccgctcaacggtgcttcagagcagcctcctccacaacattcccctcggcccggccgttcgggcctactggagaccgcggcttgggcctagtctggcggccgcccggcgaacgggcaagtggcgtcgtcgctgggccggcaggagatactcgcgagcaaaccaacggggaaagagatgaaccggccgccacgtccgaggcacacggcccgaaaagtcgctgggagaagcccagtggcggtggtaggcaattcggagtagtcaataaagtttattcaaaacaatgaggaagttgaggcggagaggggaggagaaatacgggataaacagctaccatgttgagagtggcggcgctacccagacaaccaaggcgaccgccatcttatgagggctggactcgcgaggtgagcgcggcggaggcggggaaccgcgagccgccggctcccgggtgacgtcatcgggggggcggggcgccaccttgagaaaggagggcggttctcagccacctttggacccgctcgtctctttaaggtgcccaatcgccgctgaagaccttgagcccagaggcggagaagccgccatcttaggcgaggcagacgtttggctccattttgagtggggcccgaaacttcctagccttccccctcctccgggcaaacagggagttcagctaccccgactcgcacactcctcctccccagccttctcctcctatgagaggaggtgaactcggtgactccaaactacaaaattaataggtggcggcgggggcgggcttcagccggggtagaggcggagtactcaccgcggctcctgttcattgagcaccttcgataggctgggctctttcccacggtctctgcgttgttggttcttccccctgtgaaggaagctctgtgattatcaccaaatgaaggcaggggcttcgagaagccaagtgacttgagtcccggagcagggacgttgaaccttgtgccctgtgctacccgcgttctgtccccaggccctcagtgtagttcctctgtaaagctgctgccaactccacaactccctctgaactcttctttgaccctactgtttcacttcagttcaaatacagttcaaggatttgtttgcacctgtcccacaattttctgactatagcctgaggggaggggagaggaggggggatgagaggaaaggctgagttagtggagctttgctgagttagtggagcttcgtacatatgcttcaagatggcctaggttttctcaaacattctagaaaattctctaggagttatcttactatttcattttcttaaagggtcccattgctttaaaaaggaaatgtgtgcgtgcacacaatttactaaccagtgatggtggggtaggccctggggatgcaatggtgaaaacagggcctctggagtgggagggcatctgccagtgcaggaaacaaagttgcgagtaaacaattggaatagaaggcacagtaagcacacaaataccacctgcaaaatgacctttgcaaaatgcaacatgaagctacaaaagagccttacaagctgcttgcagctgctgtaagaaagacggcagggggacatggacgattaagttcacttaaataaacaagcgagaacattgtactcaaaaggatcaacgtgtacaaatgcatggaggcacatagaaaaatatttactagaagttgaatattgttggaacaaggaaaacagaagagagataggtaggaggtcaaacagtaaagggtcacaacatgaaagattgcgaaatgcaaaagagtttagattgtatgcagttagcaaaaagaaaacacaggtttttgagcaggggtagcttagtctcatatttgtgacttacccagaggatggtttagggtttttttttttttttatgtttgttgttttagagacaaggtctcactctgtcaactcaggctgggcggtcatagctcactgcaccctagaactcctggactcaagcggtccttccgccagagcctcatgagtaactgagactataggcgcacaccaccacactcggttattttttattttttatagagcccaggcctcgctatattgctcaggctggtctcaaactcctggtttcagatcctctaaaagcgctgggattacaggcctgagccactgcactgaaaggtccaggtttaatgggacctgaagcttatatggtttgggggaggaagggtgagacgtctttaagaaaaaaatagccgggcgcggtggctcatgtctgtaatcctagcactttgggaggccgaggcgggcggatcacaagttcaggagttcgagaccagcctggccaacatggtgaaacgccatatctactaaaaataaaaatattagccgtgtgtggtggcacatgcctgcagtcccacgtacacaggaggctgaggcaggagaatcgcttgaacacgggaggcggaggttgcagtgatccgagactgtgtcattgcagtccagcctgggtgacagagcgagactccatctcaaaaaaaaaaaaaatgacttatgaatacaaaattaggttcaaaggtaggcagtaagagtatttctacaagcaattccttcacctgggtaataattacgaagagaagtgatacaaggcacatgtaaatgtaccatggggccgggtgcagattgcatgtctgtaatcccagcactttgggaggtcaggatgggaggatcacttgagcccaggagttcaagaccaggctgggcaacatagtgaaaccctgtctctacaaaataaaaataaaatgaatttttaaataacaaatatcccatgaaacccaacctaaatatatcccccaaatcaacttccccttaggtggatctcaaaaatgtcaggcagctccaacaccacctaatgcaagggaaagtatggccaggccctcagtggaaagggacagcactttgaaccaattgttgtttaaatgtattttgtgaactttataaaacacatcaccatgtgaccctatggaaagtgacaggtcctgcagtttaagatgtcttagcttcacaaggagtcaggaggaatgaggct

SEQ ID NO: 1563990 - DNA, 4001 bp, Homo sapiens
gcctgtaatctcagctacttggaggctggggcaggaaaatcgcttgaacctgggaggcagaggttgctgtgagccgagatcgcgccattgcactccagcctgggcaacgagcgaaactccgtctcgaaaaaaataaaacaaaataaaaaataaaatagagaagaatataaaaatgattctttgtaacaggaaagaaaagggggggggggtcttataaatctaaaaaaacactcaaaagaaaagtgcaaagaagaaatacataggggaaaacacaggaaaaggagaaaccagaggctaatgtcagctaggtcctgttctgcaaggagagatggcagaacctgagtctgggagagggggtcctgagccggaatctaaaaacagagctgagaaaggaagagagagcaagtgaacacacctggccaccgcaccctgtgtagcctggcctgccctccttacctgccatgaaaccagtcctggcacatgtcacactcgatcatgaagcgggtcacatcgtaaggcagccggcagaggcaatacaccggcaccgaggccatcttcgctcggccctggagcgttctgcggccggccaggttcgtcgtgtcaagaggggcgggaggcggcagcacgcgtcctctctggacgatagctaggcacaaataacactttttacagagtgaatcagcccccgccccccacccccttgcaccaaccctcagttctccaatagagttaccgccgccgggatgcaacacagctggtgcggctgtagggggcaaccagagaaagtccacccggcccttagaatttctttcacacgtaaagaacggagctcaaccttccaggcttcccaccgcccccacactctccactccccaccccccaccttcttcggccccgttgtcagtgataacttctttccgggtttcaagaaaatacctgaagccttttcgggaagcttctttcatctctcactgaaccctcccctagctgacccctgtttcacagggctccctctattatgacgcaaaccacagcgtcaaaaatgaggctgggggtatctcaagacaagaccctcctctcaccacctgaaatagggccaaccagagagagataagggatccctgaaagtctcttcaggttactcaaagccttcacgaacaagacagacaagactaggcgcccaactcaaatcacagttctggggtcgtgttcggagagtttaaataatcctttccatcactctcaatatcattccttccccgaccagtcaggagtctcatcacccccaaaactgaaataaatataaatctctaaactgaccagctcgttctgtactttaaagatgacagggttctggctgcatccctgaaactcaaaaggatctattcaaaacccctcaaactgactagaatttcctcacactcccgaaactaagcaaggattcttttgcatcgctcggaaactggcagcgtttccttgcagccccccctcaaactgatgagagctccctagtctccccaaatgttcaggtacctcacagtatatcctaaaactgacagtaatagcctcgcagcccccaaaacttacaggaatcttaacgcttccccaactgacaggaacctcctcacgccccaaacctgacaagaacgtcttcagtccagaatcctacagggacctcctcatgctttgggctgcaaggactccacgcccgcggagctcagccccagcgacacgccggcagccgggctagctccgggactgcgaagcgcctcagcggaggctcgtccggtagttccggcccctacggcgacgcgcgtcgaattctgggatagtccccgtaccgccgggaacctcgctcgccttcccctcgagccccccgctgggtcgcgcggcgccagccgctcaacggtgcttcagagcagcctcctccacaacattcccctcggcccggccgttcgggcctactggagaccgcggcttgggcctagtctggcggccgcccggcgaacgggcaagtggcgtcgtcgctgggccggcaggagatactcgcgagcaaaccaacggggaaagagatgaaccggccgccacgtccgaggcacacggcccgaaaagtcgctgggagaagcccagtggcggtggtaggcaattcggagtagtcaataaagtttattcaaaacaatgaggaagttgaggcggagaggggaggagaaatacgggataaacagctaccatgttgagagtggcggcgctacccagacaaccaaggcgaccgccatcttatgagggctggactcgcgaggtgagcgcggcggaggcggggaaccgcgagccgccggctcccgggtgacgtcatcgggggggcggggcgccaccttgagaaaggagggcggttctcagccacctttggacccgctcgtctctttaaggtgcccaatcgccgctgaagaccttgagcccagaggcggagaagccgccatcttaggcgaggcagacgtttggctccattttgagtggggcccgaaacttcctagccttccccctcctccgggcaaacagggagttcagctaccccgactcgcacactcctcctccccagccttctcctcctatgagaggaggtgaactcggtgactccaaactacaaaattaataggtggcggcgggggcgggcttcagccggggtagaggcggagtactcaccgcggctcctgttcattgagcaccttcgataggctgggctctttcccacggtctctgcgttgttggttcttccccctgtgaaggaagctctgtgattatcaccaaatgaaggcaggggcttcgagaagccaagtgacttgagtcccggagcagggacgttgaaccttgtgccctgtgctacccgcgttctgtccccaggccctcagtgtagttcctctgtaaagctgctgccaactccacaactccctctgaactcttctttgaccctactgtttcacttcagttcaaatacagttcaaggatttgtttgcacctgtcccacaattttctgactatagcctgaggggaggggagaggaggggggatgagaggaaaggctgagttagtggagctttgctgagttagtggagcttcgtacatatgcttcaagatggcctaggttttctcaaacattctagaaaattctctaggagttatcttactatttcattttcttaaagggtcccattgctttaaaaaggaaatgtgtgcgtgcacacaatttactaaccagtgatggtggggtaggccctggggatgcaatggtgaaaacagggcctctggagtgggagggcatctgccagtgcaggaaacaaagttgcgagtaaacaattggaatagaaggcacagtaagcacacaaataccacctgcaaaatgacctttgcaaaatgcaacatgaagctacaaaagagccttacaagctgcttgcagctgctgtaagaaagacggcagggggacatggacgattaagttcacttaaataaacaagcgagaacattgtactcaaaaggatcaacgtgtacaaatgcatggaggcacatagaaaaatatttactagaagttgaatattgttggaacaaggaaaacagaagagagataggtaggaggtcaaacagtaaagggtcacaacatgaaagattgcgaaatgcaaaagagtttagattgtatgcagttagcaaaaagaaaacacaggtttttgagcaggggtagcttagtctcatatttgtgacttacccagaggatggtttagggtttttttttttttttatgtttgttgttttagagacaaggtctcactctgtcaactcaggctgggcggtcatagctcactgcaccctagaactcctggactcaagcggtccttccgccagagcctcatgagtaactgagactataggcgcacaccaccacactcggttattttttattttttatagagcccaggcctcgctatattgctcaggctggtctcaaactcctg

SEQ ID NO: 1563991 - DNA, 4001 bp, Homo sapiens
catggtgaaactccatctctatcaaaaaagtacaaaaaaatttgccgggcgtggtggcgtgcacctgtaatcccagctactcgggaggctgaggcacgagaatcgcttgaacccgggaggcagaggttgcagtgagctgagatcatgccattgcactccagcctgggtgacaagagtgagaccttgtctcaaataaaaaaaaaaaaaaaagaaaaaagaaaaaaagaaaaagaaatagcccctctggaggagaccagacaactgaaaattctagaatctaacaagcaacaggaggagggtgccatacactgttttgttgtgctccagtgtacaaagccccctcaaggttgtctttccatagctgagatttaaatcccattaatgaaatattagttttatcgtacacactaacctctccggaattctgggtgacaggtgcttatgtgcacacacggttaactgaaggaaattcatcagtggttttactcctgttttacccagcatctattctgcttaattcaatttagttggatggtgctgcagataaatgctgtagaaataaaatactcttccatttctgcctccatttatggagtacatccaaactgctttgcaaagtcagaaaggatgtatttgataacattttatagctgaagacaatgaggctcagaaaagcaaagcaacttgtgcatggtcactctgaaactaagtacaaagccacaacttaaatccctgtttatggactcaactacctcaaataagcaacactgttttcccaaaagccagtgtgtgaggcagaacataattgtcagactataaaaatgatgaccgggcacggtggctcacgcctgtaatcccagcactttgggaggccgaggcaggcagatctccagaggtcgggagttccagaccagcctgatcaacatggaaaaacaccgtctctactaaaaatacaaaatcagctgggtgtggtggtgcatgcctgtaatctcagctacttggaggctggggcaggaaaatcgcttgaacctgggaggcagaggttgctgtgagccgagatcgcgccattgcactccagcctgggcaacgagcgaaactccgtctcgaaaaaaataaaacaaaataaaaaataaaatagagaagaatataaaaatgattctttgtaacaggaaagaaaagggggggggggtcttataaatctaaaaaaacactcaaaagaaaagtgcaaagaagaaatacataggggaaaacacaggaaaaggagaaaccagaggctaatgtcagctaggtcctgttctgcaaggagagatggcagaacctgagtctgggagagggggtcctgagccggaatctaaaaacagagctgagaaaggaagagagagcaagtgaacacacctggccaccgcaccctgtgtagcctggcctgccctccttacctgccatgaaaccagtcctggcacatgtcacactcgatcatgaagcgggtcacatcgtaaggcagccggcagaggcaatacaccggcaccgaggccatcttcgctcggccctggagcgttctgcggccggccaggttcgtcgtgtcaagaggggcgggaggcggcagcacgcgtcctctctggacgatagctaggcacaaataacactttttacagagtgaatcagcccccgccccccacccccttgcaccaaccctcagttctccaatagagttaccgccgccgggatgcaacacagctggtgcggctgtagggggcaaccagagaaagtccacccggcccttagaatttctttcacacgtaaagaacggagctcaaccttccaggcttcccaccgcccccacactctccactccccaccccccaccttcttcggccccgttgtcagtgataacttctttccgggtttcaagaaaatacctgaagccttttcgggaagcttctttcatctctcactgaaccctcccctagctgacccctgtttcacagggctccctctattatgacgcaaaccacagcgtcaaaaatgaggctgggggtatctcaagacaagaccctcctctcaccacctgaaatagggccaaccagagagagataagggatccctgaaagtctcttcaggttactcaaagccttcacgaacaagacagacaagactaggcgcccaactcaaatcacagttctggggtcgtgttcggagagtttaaataatcctttccatcactctcaatatcattccttccccgaccagtcaggagtctcatcacccccaaaactgaaataaatataaatctctaaactgaccagctcgttctgtactttaaagatgacagggttctggctgcatccctgaaactcaaaaggatctattcaaaacccctcaaactgactagaatttcctcacactcccgaaactaagcaaggattcttttgcatcgctcggaaactggcagcgtttccttgcagccccccctcaaactgatgagagctccctagtctccccaaatgttcaggtacctcacagtatatcctaaaactgacagtaatagcctcgcagcccccaaaacttacaggaatcttaacgcttccccaactgacaggaacctcctcacgccccaaacctgacaagaacgtcttcagtccagaatcctacagggacctcctcatgctttgggctgcaaggactccacgcccgcggagctcagccccagcgacacgccggcagccgggctagctccgggactgcgaagcgcctcagcggaggctcgtccggtagttccggcccctacggcgacgcgcgtcgaattctgggatagtccccgtaccgccgggaacctcgctcgccttcccctcgagccccccgctgggtcgcgcggcgccagccgctcaacggtgcttcagagcagcctcctccacaacattcccctcggcccggccgttcgggcctactggagaccgcggcttgggcctagtctggcggccgcccggcgaacgggcaagtggcgtcgtcgctgggccggcaggagatactcgcgagcaaaccaacggggaaagagatgaaccggccgccacgtccgaggcacacggcccgaaaagtcgctgggagaagcccagtggcggtggtaggcaattcggagtagtcaataaagtttattcaaaacaatgaggaagttgaggcggagaggggaggagaaatacgggataaacagctaccatgttgagagtggcggcgctacccagacaaccaaggcgaccgccatcttatgagggctggactcgcgaggtgagcgcggcggaggcggggaaccgcgagccgccggctcccgggtgacgtcatcgggggggcggggcgccaccttgagaaaggagggcggttctcagccacctttggacccgctcgtctctttaaggtgcccaatcgccgctgaagaccttgagcccagaggcggagaagccgccatcttaggcgaggcagacgtttggctccattttgagtggggcccgaaacttcctagccttccccctcctccgggcaaacagggagttcagctaccccgactcgcacactcctcctccccagccttctcctcctatgagaggaggtgaactcggtgactccaaactacaaaattaataggtggcggcgggggcgggcttcagccggggtagaggcggagtactcaccgcggctcctgttcattgagcaccttcgataggctgggctctttcccacggtctctgcgttgttggttcttccccctgtgaaggaagctctgtgattatcaccaaatgaaggcaggggcttcgagaagccaagtgacttgagtcccggagcagggacgttgaaccttgtgccctgtgctacccgcgttctgtccccaggccctcagtgtagttcctctgtaaagctgctgccaactccacaactccctctgaactcttctttgaccctactgtttcacttcagttcaaatacagttcaaggatttgtttgcacctgtccca

SEQ ID NO: 1563992 - DNA, 4001 bp, Homo sapiens
ggatgctggtttactgaggggaagtgccttaaaagttggcttaaaggcatctgctgactctgacctcattttgcccaggagttgggggagggaggaagcaacaggctctgaaacagtggccacagctataaaaatcaacagataaagtctttactgtgtctagtccagaaggtttgctgattcatgtcatttaccctcatacaaacaccacaatttttaaaaatgaaataaaatagtagatacctgctcccaaacattttctcaatgagaataaatacagtggtgactacaagatagattaacttagagagtcatgcattttaggaaagatcccaggataggattttccactgtaacagaacagactgttccctctccctcaaatcagcaagtttcaagtttccactgcaagaataccacttcagtacaatacaggaaagctttctggaatataatttcagaaagatgatgaaagagggaaaggcaaaatacagttctcttagcttttggtgggtttcacttccttcagtccccactctgcccccaacccccaatcacacatagctccagatctctttgtatttttattttgagtacctgctccaattcataggcctttgccttatcctcatcccggtctgcattcttccgataggccaggcccaaaccccacacagccaagatgctgtacacattatctcggacccaagcatctttctgatcatagctggctggaagcaagccagtcactggattctgcaaggtcaagaaaaagagggcaggaaggtaaccataggtgttaacatcaggaaacagaatcttccaaatgggttttttagggactttggtctttcttctacttctccactcttgagttttataacctcctcttcttctgacctattgcaggcaaatgctatcttcccaccttcccaagctttactgagctatattcaacacattaaaaattgtgtatatttagggagtacaacatgatgatttatgtattcattggaaaattaccaaaatgacgtttattaacacatctattacctcacagctacctttttttttggtgtggtgagaatacttaagatctactctcttagtaaatttcaagtatacagtacagtatgattaactacagtcaccatgctgctgtacatcagatccccagaacttactcatcttataactgaaactttgtgccctttgcaaatactatcttgaataaggggtaagcggtggctgaagcctttcgagtctgaaatgtgggtattattaaaggcacaattaaaggtattattaagtgcatttataatgggtattattaaaagaaagttttacctttctagttagaatgaactagcgaactagcaatgaaaaaccagcagaaaaaatatataattaacaggggcgggagaacctgctacagacagatacagatacacacacaaacacacacgcggagttcatgcaaggtctccgtcacacacacacacacacacacacacacacacccacacacgcacgcacgcacggagttcatccaaggtctccgtccaagctatgacaagctacatcctcgctcggtgattacgagagacacccctgcagttacctgatggcacaggatggtctgttgcaccagtcgagcgtagccgtccagccggaccccggagttactccggctcctcatggcgacacgttactaattgtcctctgagaaatagcccgggtgccaccggagccttcggtccctaaggaacaagtatccaacgctgctccaccctcgtggtgggacgcctgaacaccaggccccgcagagccctcccaccgctcaggcctggcgccgcggattccgcgtacctctccggactccggcggcctcaggggcccaccacgcgccagcgctagcactggcttcccgcggtctagagccccgccgcagcgccccaggcgccgctcctgcccccttagtccagtccggcctccgcgtgtgactcctgcatcctcccctcaaccccgggagaccgccgcggcccacagcctcccgcccggccgccgccaacaggtcaacgaccgctgcgccgcctccaccttgcgggagacgcgagcgggaggcggggcgggcgcgactggttctggcagctgcgcgctgcgaccccggggctcgcccgccccggggccgagaatgtgtcaccgtaggcaatgtgctttccgaggtttattttcgaaacacctcagatcactatttcagttttccacacttgctgtgcacacaggatgttggggaggctctccttcgttctacaggactagttttataaaggaacctacagtgaacttcaaaactgaaagacacgcttgtgttccaggtctgaagacttggatttctgggtctttattgtattttagattttgactttaaaagctcagattacacgcctcacttccagccagaccaaccaaacaggaactccctagggtactttactccttagtaactggcgagtctgcgggcttgggagggaggaggcagtggtgcactctgaggaagccagtgcggggaacagctgggagctggcagccccagaaggcggcgttggcaggactcgagctggaagagatcctataactgctttggatggctccctcgtgcgcacgtaggtcacaaggctgaggcaacaaatattcagctgaaaataaagtggagaaggaaggctgcgtaagaagcttggaggccgggcgcggtggctcactcctgtaatcccagcactttgggaggctgaggagggcagatcacctgaagtcaagagtccgagaccagcctggccaacatggcggaaccccatctctactaaaaatacaaaattagcccggcatggtggcgcgcgcctgtaatcccagctactcgggaggctgaggcgggaaaatcgcttgaacccaggaggcagaggttgcagtgagccaagatcgtgccactgcactctagcccaggcgacagagtaagactccgtctcaaaaaaaataaaataaaaataaaataataaaagcagcttgtagtggccgggtgcggtggctcacgcctgtaatcccagcactttgggagcctgaagtgggcggatcacttgaggtcaggagttcaagaccagcctggccaacatggaggaaacccccccccccgcttcccccgccgccgatacaaatacaaaaattagccgggcgtggtggggcgctcctgtagtcccagctactcgggaagctgaggcaggataatcgcttgaaccctggaagtggaggttgcagtgagccaagatcgcgtcactgcactccagcctgggagacaagagcgaaactccgtttcaaaaaaagaaaaaaaaaaggcagcagcttgcagataacgctgcttactggcctcgtggaatcagtctgcaacccttggggcggcccggcttggaccccagtgcctttgctccgttcatctccggctcctccctccatcccccacctgttgctctctgcttattcaaaccttgcaaacctttcaaggctctgcttaagtaccacctattccctgaatcgcgggataagaaaattagaccgattgacttcaagttctaaaccttccttagccacctcatccaggccacggtgactttgcattttcgtttatctttttatttctctcctcataagctccctccattccaccccaaaacctccgcccaatttagcatagaggcaggcacctaggagatgactagtaatttggtaatgatgatgaggaaggagggaatgtttaagaactcaaatatgggactttcaggttcaacagccagtgatatagttagatatcgtgacacacttagagttctcaaggagatgctttccattgcagtgattcgccacgcaaatgcaatgactggcaaataacaagccacttcaaaatctaggtgcacagtggaagaaaaagtctctccatggaaagcaagtgcatc

SEQ ID NO: 1563993 - DNA, 4001 bp, Homo sapiens
aaattatgtgaatattcatattctgatgtggaagtaataacctgtttgatgaaggggtgctgcccagatctggctgcagttattatggtatatatagtacgttgtacgcatattacctttctaaaagccaaacatttctgatgggcaaaccacaactggtccaaagggtttcagataatggactctgaggccaggtgcagtggctcatgcctgtaatcccagcacttttgggaggccgtggtgagaggatgacttgaagtcaggaggtcgagaccagcctggccaacgcagtgaaaccccgtcactactaaaaatgcaaaaattagctgggtgtggtggcgcacgcctgtagtcccagctactcgggaggctgaggcaggataatcgcttgaacccgagaggcagaggtttcagtgagccgagatcgcgccactgcactccagcctaggagacagagtgagaccctgtctcaaaaacaaacaaacaacaacaaagaaaacagattaagggactttggacctataccttatgcataaatgttactgcactacgatcatttattcttgtaaccccagcactttgtagagtgctttgcatataacagatacaccacaaatatttcctaagtgaggaaacaaggctaagaaattagttaagaagggaaaatggtcagtgccttggaaatgaccatggctcccaacttgcaggtcaggcctctaacccctgaatgccacttccttcgttgactttgaaggccctataaatagttgctgttgattgagggcaagaaacatagctgctgtcttcactaggaataaaaatagttcagtggtcttacactgatggacccacacataattttagcccaggaatacaaagcatagcaggcaaattcatacctcggaccacatgggcagtgtcataggaccctgtgagcttgggagcctttgggtctgacctgctacatgcagtgacctttctagcctcacaattttcttatctgtaaaatagcaaccaaagtagcccctaagggcttcccaggtgggtctctaccaagacagctcatgggagggacggtagctgtcgccccacactgcagagtcctgcgtaaacttcaggagcttcttcactcctgtctactgttctcattcagtgtagtctgtccaaaccccccacacctcttctcgtccaaaaaaagcagagtcaatgcaaaaagaggcagtttggacccgggcacggaggcggctcattctcatcctgaacaatggccaaagaattctgtgaaaagtagccgtagcaacagttaggtcccctgaatcttaaggagcacggggtggcaatggggtggtaatcactggctagcaaggactagattcaaatagcaaactcttaattgcaaggtctcaggtcacaagagggccagacctgggaaggagaatgagttacatgagagggtagttccacgcgttccctgggggcggtccctccttacctggtaacacaggatggtttgctgcaccagccgcgcgtacccgtccaagcggaccccggaattgctcctgctccgcatctccccgaggctcccaggccgcagcgcccgatctgccgcgtgggcgcgggacgtcggggctgtggcctccaagcgggtctggttcccggacactcacagccttagtcggttcttgggatgggaccgggccggaggaggtcgagacttttctaaacgctagccccaaagtccggttggaaagcaagccaaccagagctccgcgcggcggggaggcgcgggggcggggacgggggctggagcgacgaaggtcccgcctcggccaggcctgctgggctcccgacgctcgcgggagcagcgggaaaccaggttccgggagtggggcgaggacgcccctgccaagccccttttacgtcccggcggtcgcgaggaggtcccccgggcgcgaagaagacgccagcccaccccagccgccggggagatcgcccaggccgcgctcagccccgcccctggctctgcccccgccgcggagcggaaccctccaagtcgcggcctgaggaggaaggaaaagggggcggcccgggagagccgctgcgaaatcagcaacgggcgggaaccaggttgcctccctgagtcccttctctccccggccggctgccaaccacagccaaggccagagaaacaggcccttctgccgcggccacctgggcgccttggacccgccctccggactcgcccccgcccctgccgcggagtggaacgtttggaaccctgaggggcacaggtaagggggcggccccgccccgcgccctggaacgacctcacggccccgcccacatccccgcccctggccccacctccgccgcagagcggaaccctcagagtcgcggcctcgggggggacgaaaaaggaggcggcccgtgggagtctaggggaacccggcttcgggcggcggacgagttggctttcctgcgtggtagtgtggagccccccgagacgggtgccagtcccactcgaggccggagaaagagggccgcctaccgcggccgcctgggcacccctctgagggccaagattgtagtcccacctctggccccgtctccgccgcctagcggaactggagtagcgggacccagcccggaagaaaaagggggaaggcccggagaggtgccccagcgacacctctggcgcctgtgaccccgcccctagccacttgggcgccgcttcctcgggcaggttcgcagttcatctcccacgggtctacagcttgaaacttggcattcattataatgtttcgtggctgctgataacctacagttcacaatcttcggcctggtattcattgtccaccaaaatctggcccacataggaatttactggacagctagactaatgcaatcaatttccgcaagctcttttccagtctccatgcatttactctatgcttgaccccttcggcccttcttcctcctccttgactaactgaagcctatctttcccttaacggccagctcagctcctctattagccttccccattttctgaatttctgtagccattggtttagtaagagcttaggacttagagtcagttcattttgagttcaaatgtcagttctgtcatttacaagtcgtatgacctttggcatcccgttttacatgtttgaacttaagtgttctcatctgtaaaatggagataatcatagcacctacctcacaggatgacttaagatcaagaggatgaatataaagcatttagcacaagcctggctagtagaaaaatacttaataaatcatagctaatttcgttgtcacttggccacaatgtattgcctcctgttgttatttatgttttcatgtgtggatgaggcatattttcctaattggaatgtacgttattcattgaaacagtcttttggtatctcctactatgcctggtacagtgttgagcatatagttggagctcaattaatgttgctcgcatgagtaaatgaaatcagtcctgcttagctgcgttcccttatgtttggtccttaaccaagtttatattagatattccagaacataaatctatggctttactctgtcactcaactaaagcaccaaaccccacatcagctcacatattacttcatataatactttgttttcttaatattggcttttgaattatgcagtgatccatgtgatgtgcctccatgaagaatttgctgtggtctaggggtgaataaaactagacattgttatcaccactaaatgttttggaatctgaatatgtactcttgctagaattttcatgtattcatctccatctaaaagctgggatcattgcttcttttcattgtggcttttgtttccattgggtccttccttaggagttgattttgcagccatatgggaaataactgatgatctttgctccttatctggcatttccacctagtatagaaacattttcagtttcctgacttcattcttcgctaattctgctgtgc

SEQ ID NO: 1563994 - DNA, 4001 bp, Homo sapiens
cctgtggtcctagctactcgggaggctgaggcaggagaaccgcttgaacccgggagtccgaagttgcagtgagccgagatcgcgccgctgcactccagccagggtgacacagcgagactccatctcaaaaaaacaaaacaaaacaaaaacaaaaaacagaaacacaaaaaccaaagagggtgattatgtaactgctcccttcactttttaaacttttctatcagttatgcaggcctttcaaactcaatgagtgtccctcccttcagtgcggtgtctaaagataaaggctaaactagagatgggctgtatctgggaccattttctcaatttaaagtgcgaaatgtttatctcaggggtcccctaaagctttattaatgtgaaatgcccactcaatatttagtactactgtacattcttagacacttaaagctaaaaagaatcttggatatctagtcaaaatcttcctcagctttacaaatgagatttccaaggctccagaaaacaaacaactatacaatgagaagccatcctaaagctctgagtttccggtttcacctgcaaactcagaaaatgccaattaactgtatgtgcaaaggcttaactgtctagtctctccaacaaattcatctactttttttttttttttttttttttgagacggagtctcactctgttgcccaggctagtgtgcagtggagcgatctcgtctcactgcagcctctgcctcccgagttcaagcgattctcccacttcagcctcctgaatagctggaattacaggcgcacaccacaagcccagctaatttttgtatttttagtagagacggggtttcatcatgttggccaggctggtctcgaacccctgacctcaggtgatccaccagcctcggcctcccaaagtgctgggattacaggtgtgagccaccgtgcccggcctcatctacattttaaatatactctcggaaagaccccagaagtgtttgttgactgagtttactaattaagattcaatattaccaaatattgaaattccccaagtttgtacttttaggtggcttaactaacattttcttactgtggtcacctaaacccgaacttccagttctaccagttttaaaagatgaacgatagcaaaaacagtgagtaatgaaccaaatgatatcatttaaaatgttgtcattagcctgcaacgttctgtgaggagtctgcccacttccgccaggttttcagtccaaacatctttgacataaaagttcattatgctgcacaatcgcagaatcttagctcttaaagccgaaatgaggcttggagctctagtgaatacctctctcgttttacaaatgagaacccagacaagttgagtgatttgtccaaggttcccacccagccacttaaagtggcaaagacattaccgtaaaattctcgaccacgaccaacgagccctgggcaatcattagcagtagaggttcctgaagaaccttagggagacctggcaggagttgtgggtcaagagaatggtacttccaccgacaattcctgggcactgtctgagcttcattccctgattccctgagaggtcgctggggaaacgctcgggccaaggaggggatacccctgctcagacagcgaccccgctgggttcatggcggggatggccaggcccaaagagagaaagaaaacaaccaaagagtggacgttggtctcaggcccggggttccggagaccccagtccctcgacccacccgcctgagccaaggaacccagcgcgtccgccctaaacgcaccctcagccccaacctactctggagaccctccgacccaacttccgggcttcgaaccgggtcggtttcaccccctccaccacccgccacgatcccacgcgcgcagaacagccccatccgaaagcggcccagagcgctggagaggggcggcgcgacgcgcactcaccggtgagttccatggccgccagtgtccggacctcccgcggctgcagccggagtccctccctgctgttccgcagcaccaatctagggcgtccgcgcccaagggccgcgcccccgaggcagccaatcacaaagaggcgctgaggtcacgtccgagagagacgctctgtcgtccccacccttaagcgcgagatgtaacgtcagcgcgcgcctgcgcccgtctcctagaagcggccgacggtagggtgggtgctcaccctggtttcctggttacagcgtctctattccggacgccagttctctgcgcgcttgcttctgattggagagactttttgtttgtaatcagctgtgccacggcaaaaccgtgccggttcttaccgctctgggacgtttgccagataaataaataaaaatacacaaaaagtcaaaacagatgaaactatgaagttttaatttcagataaagcacaaatgatgtttaatacaagcatgtaccaaatattggggacttcactacacattcgttttttatcggacatgtaaatttaactagacatcctgttatttatatggcaattctacactctgagggaaacatacgaggtctgatctgaaatatcaactcccactcgactggttcaactagttacgatggtgcttgactaggaagctaaagaatcagtgagagtggtatgacggtcatccatgcgtcacagctggtacttggaatcccccatccctgccatacgtgcgttttcgagaagaaattcctttctgagtaccatcacagccaccgttactggcacccattttattaagcctagtgtaagcctattcatccctgaaaatgtctgctcctttctgatgctttccccaagcctccagagaatgaaatactctcactttttaattttaatagtactttggccacatgctggccaaagtataacatttatcagatgatattcaagttgtttgcctgattgcattctccctcctcaccctgatccttgattacttgtctcttgagatctcacatggacttctttctgaaaacggaaattgtatttgcttgttaaatgtctgccttccctgccagatagtaaactgaggcaggatctgttcttggtaatggatgttgaggaagttttagtttaatacatgaatttctttacccaatgtcagcacactccctgacacatattagatgctcacaataaaatgtattgacagtatttcgtggagtgtaccttatacaaattacagtgcaataacatcattgaaagagcattttagttgtgagatttgaagcgaattaatgagttgatgagtaagactagagtagcaatcgatactttgccctgtgttaatattgatgaagcatcggagaattacagtgatgaagactcaaggacacttaattaagctttataatttgtagttggtttcacagataacagcgacattaccagataggtacagcatttggcctcctttccatttttgtaataggttttaagacaaagagtgggggtagaaatcctggaaggtataaatgagggttaagcctcacttattgagcccctggtttgcccctgccatagttctgatcacagtacacgtttgaaattccaccatgaatcttttttcaaaatataacaaatatttcttatttttatcatcaaacatttactggatgtctgctctgtaaaaggccttgtggggaatacaagaaatattaagcatagtccctgtgtttcaacagctttttattttttctagcttttcctgtacatgttatcaatagtcaaaagaaatccacctttcttaaaaggttctttgtgtttcaaatatagaataggctgacctttataaatagatattaatagaggcacactgttgctgagtctctgtgggggagggcgttgaggagcctgcaggctgttccaacaaagtctgaaaacattgaacatttatttaaagctccagcttctgtcctaggcactgagcattaaaagataaataaatcatgattccgactcccaagggttcataatctc

SEQ ID NO: 1563995 - DNA, 4001 bp, Homo sapiens
ccgggaggtggaagttgcagtgagccgagatcgcaccactgcattccagcctgggcgacagagcgagactccgtctcaaaaaaaaaaaaaaattgcgtcttttgatttaatatttcctctgttttagtcatttattcataaggagtctgtaccatcccaatcctttttgaaaatggaggggtttttttgtttttttgtttttgagacagggtcttgctgtagcccaggctggagtgcagtggcgcgatctcggctcactgcagcctcgacctccctggctcaagtaatcttcccacctcagcctcccaagtagctgggactacaggctgtgccactgcacctggctaatttttgtgttatttgtagagacggggtttcgccggctaatttttgttattacttgtagagacggggcttcaccgtgtagcccagatgggtctcgaactcctgagctcaagtgatccctcgcttaggactctcaaagtgctgagttgacagaaaaattagttttaatatggagaggcaaatccttggtatctgtagaacccatcctgaattatcgaatgctctatagtacatttcagacaaacaatacacttaatatttttttctcttcgtttatctatctcaagtctcatactccacctctatctaaaaagaagttggagggactctttttagatacaggtggagtatgagaactcttttgtttttgagaccacatctcactctgtcgcccaggctagagtgcagtggcgccatcacggctcgctgcagcctcgatctccagggctcaggtgattctcccacctcagcatccagacaggcaggcgccaacacacccggctaatttttgtatttttagtggagaccaggtttcgccatattgcccaggctggtctcgaactcctgacctcaagtgatctgcccgcctcggcctcccaaagtgctgggattacaggcgggagccaccgcgctcggcctggcaaattttcttgctgtgctttaaattttctccctagtcctatttttttcctttcttcaggaaatatggtctctgttctgaatccttatcacaagaagctcttaaggagtaatgactcctccctctttggtcaaactaggttctctcccttcactcagatttaatttttttggtcacacttccccaccttttgatagttacagtcaaacgacatgtaatacttactctcccaatcagcccttggcgagtagcaggtcttgtaggtacaagtagtctctgcacagtacactcgggcccaccaagtgaaggtctgattacttctcactcctcagcttatctaaccaagcaacactggaaccctcagaccacagcgttcaagttgtcgcacaaaggacattattcacgtagtaagtactggggccatttttttttcagtctgaagtgtgatatcccccaaaacatttcctaaccaaggcatgctaggccaggataaatcgtgcctgcacatataaaacagaagggtacagtggctgctccagtttggagcacccaggtcctcctataagaaaatatggtttacattcccaaattagtcattattaatgggaagggagaaccaataagtgcatgtgagagttgagagaagaccagttgggaaactttcagatgtttacttttgccttctgacagtcgatcagcatccatctttcactcacatcctgtaaaaccgagttttgttaaagcagcgtcctgtttctagagtctaggatagcgggatttagtgaagagtctaggatagcgggatttagggaacgggtcttctccaccttgcccaacttgtggctttttggggtatctcgcagagttataaatatctagagttctccctagtttttctgatagccacagcatctgaggaccctgtctttccccgtcttgaggttcgagtttcctcaccttggtcagttttcccgtctctggctaggctccgaaaatagactgtgcagagcgtggcgtctctccgttgctagggtaacaactttgttttgttcccgccccccacctgccaacctccgggttcccgcttgacttttctggccaatcatagaagagtctcatctgagactgcactggaatcgaccaatccgagcgcgtccaggtcagggtcactggtcgccctttctagttaaccaggtcgaccccttttaagcctcagtctcggttagcttcacttcagcgggaacctgcccactaaggaggccgattctttccggctcgagcaggtccggacccgcccctctggcgtctagcagtctcggaggcctgcccgtatagttcagggccggacagcgagcggcggcgacttgccagtaaggtaagtttgtggggttttcgtttgtcccgttcgtcagcaggcttcgctctcttttgcgcttttcccgcgcgtgaattcccgatctgaggactcgaactccagccgatctggagagacgggggcagaagggtagggtcagtgggccgggggtagagaaggttttgctacagtcctccacgcccccagcctttcacgtctcccccacgcgacagaaacacgtgttgtgcttctgtcttggcttgtcgcgggcgatagtgtgtttgtatgtgtgcaggtgggatcgcgctttttattctcctctgtaggcaaggcttccgggccccaagtccccgggggagcacctggtcaactgccacccggttcctgtggggcactggcttgagctacgtgtcgttcccactctaaggaacatcgcgactccgggagctctgcttttcccgcctcggagtggagaaaagcaggcgcgccgctcgcttgccactgctagggaatctggttgtcttaagttcacttagagatagagttgttaccctagtttcccataaattccgtggcttggttttaaacaaaggggcggcggggggatggcgtaataaatatttggagtattcaggactgattagccatgatcaatagtaggaccccacagaaggttttaatgaatggttacttttggttattcaggtattggaatttgattatgaatgaactaaactgcttcccttctttctatataccatgcatttcttaacgaccatcccatctggcataagagatagtgaagtttgattaatttgtcccttctacttgttcttatctacagtaaacaaaaaatgggggtagaataaggttattggctaaagtaacgttattggccttttggccaaattaccaataccttaattccgcttattactgtgaatgatcagagtttagctgtcttgcattttgctaattcactagatacttgtggagcttaaattatagatattatgccatctccttcttcttgcttttttgtttttattctgcctcactgtgcattattctaagtctgtaatgctcagccggtgtttttcagaccttttgactgtgaccgacagtaagaaataaattttatattgtgacctagtacacatgtagacaatatataaccgacaactgtttttacagaaacaacacttaacacttactacttgcaatatactctgataatttccattacattttaaaaaatgtacaccacaacaccctaatgatttgtccctagacctttagttttcaaacttgtgtgtgcactttatttaaaatttatttaaataaataatttatttaaaatttatttaaataaataatttatttaaaatttatttaaataatttatttaaaatttatttaaataatttatttaaaatttatttaaataaataatttatttaaaatttatttaaataatttatttaaaatttatttaaataatttatttaaaatttatttaaataatttatttaaaatttatttaaataatttatttaaaatttatttaaataaataatttatttaaaatttatttaaataaataatttatttaaaatgcagattgccctggctccctccagaaattggttctgtggtctagtg

SEQ ID NO: 1563996 - DNA, 4001 bp, Homo sapiens
agagggagactgtgtctccaaaaaaaaaaaagtataaacgctgggggccacaaaatccgccccccactgcctccccaagccctgcgcaggtacacttcgagcagcaaccttctgggatgaggtagagccctctcctggccaggctgctgacttgcacggcagcagacgttttctcaccgagatgcaaaaataccgatattgcgcaggcgcaccctctccctttgggtcccatggactgcgcaggcgcagtttcccctagagcccgccagggggcgctcccaactctacaacttgcccagacccgccctgatgtccgttagcgttataacggcaagagagaagcagccaccatcaccatggcaaccagtgacctctgccccttgttccccaccagcacgccctgcgggcagtcccccagcagtgtttggaggaaggatggtaaaggtttgttggaggggagaatccagggctctaggggaattggggtgaatcagaactgtatgtcaccccaagggagtataaatgggctggcagtattctcactgttacagggcccagggagtcatacatcccctggaaaagcaaggaggtgaatacatcagtgatggagtaggtaggttaggaagggctccgaaggtactcaccaagggggaccagcccagcacacgattccggggaatcactttgatggccacctggagaagaaggccgtgataaggaggccagcaggtgatccccagacccctcccagtctagaccttctgcctacctccagtattcctccatctaccagcactctagtctttctggtccccaaccacagcaccccacagaacgcgtaccagggcgtctcccctgccctccaggtcctcggaaccaagtttatctctcccaccttccttagccctgggctctccgttctcaggcatcaggactcatcactccaagtcctgagttctagatttcctgataccccaggcccacaatcttcctatttagctctacgacaccccaactctgtaccagggtcctggtccgcatgactccacactggacacctacctccaaaagtcccacaaatctcacatctaggtccctgctttcccacacatacacagcctggaccccggggtcaaggaactccggaatctgaagccccctgccccccccccccgcccataacctcctagaccgacacacacacgcgcacgcacacacacctggccctctacacacactgcaggctcactcctcggacacggacacggacacacacacacacacacctggtcctctacacactctgcaggctcactcctcggtcaaccagcattccagggccaggacccccgcccccgccacacgcacctgaccctcccaagaccctcatgacggatacctggagtcgatctgtgaggcggtgtcctgcgaagacggtgccaaagccccccttacccaggagggggccgagtcgatactcggcctcgaacgcttcccgatccttgcctcctacgcaggcggaggcgaggaagtcagggtggcggcgtgctgagcccagccacgactccctccccccgcgctgcaacccatcattccagcccaccccgtctggttgcagtaggggaggatgtactcacctggcggcggcgtgggggtcccggggggcgcgggaggcccctgtagaggcttggtcaacatggaggtggcgctgcgcagattgagcccactgaacccgctaagcccgcagggcgtggacgcccggggcagcgcagctggggagccagggctggggggcgccagggtggaaagcagagaaactggtggcccggaagcgcccgcagacggcgcagcgttgagattcgccgcgcgcgccagccccaatgctactgagcctgggcacgcgcctcccgggagagtcaccctgggcgacagccccgcccacctggctttgatcaatccggacgcggcacctgctgtaccacagccaatcggagccagttcttatttgcataccaccctcatcgtttcaagggcccccttatgcaaatacacgctcggttcttccgaggaggcggggcctgcatgtaaatgagggggcttgaggtggggctcacaccaagaggaaaccggttctgggaatccctttgcagcaccgcgcttgttttggttgttgcgcggggttgttgttggtagtggtggcggtgtgtgtgtgtatttacacttaaaaaataactgcgcagtatcctttcctgggaagttggtttgccgccgctgcctggatattagcacagagatagcgccaggccgggcttctaagaattcgcgcttgtggctatccaagactccgtctcgaaaggtgcttgtcggactccttcaccggagtcctccaggcgactggcggccttcactggaaagctgaggccagggccctggaaatatctggtagccagggagggggaacccctaccatcaacgccacgggtgtgcattggtcaaaggcagcattgcctggtgagtgtttattggagcttttaaccctgagccctgggcccagtcagcaagtctagaatctagaacagcagggggtggttcttgggggatgggggtgagcccagagtggtggtggcatggggctgctcttggagttgagagaggcaaggactgagagacatgatagaggctgctagagaagtggcaactctcagacacaaatttgtgaaaaacagccagaaaaggcgccacaccccaggaagaaaaatgcactccaaagacacatgaatgccaagatatacacaaacacatactgtcagacacattcacagaaacgacctagatacacatgcagccagagactgacatacactttcaggcaagcacactgtcagaaaaatagttatgtcctagaatgacacccagagatacactgttacagaaaggcactcacgcagacctacatttgccatgtgatgacacagaaatgtcccgtcacactggcagaacttgtcacaaacacactgtcaccatcagatatgcactgtcacagcaagacttgtactgtcccagaaatgagagacgcagagtctgtcacaggaagatgcacagatgctccagggacacacatgcactgctctgaaggcagacatgtactgatgtgatagaatcacattttgtggcagtgtcacaaaaacagacatggatagacctgttcagacacagacatacatacaccatgacacatgcagtttatcaatggaacaaactgtccagaaatagctacccagaatctgttgcaggaacacaaacggacatccaccccatcagacagaaaccacagatgcactgtcacagacagacccacgcaggcatgcacgcatcttggatttagacacaaactgtcagagataagagtcccacactcagtcaccatctgacacacctggaaacaagcccttcatcacacacacaactggggacactctgtgagctgcacatgaagacttggactcaccacagtcacacacacacagacaacaccaaaaaagcacacatgtactctcctttgttcacccaacgttattgggggtggtttgctataagcctgccaggccttgatggggatgttggtatcagagatgtacagataagtcaggcatcaaacccgtgccatgaagtttatctgtagtacagctactggggagatttttagatagaagtgagaatgtgaatgggcttctcagcaggtgaccctctgtcttgaaagacaaagaaggttggtggctcaggacaggggagggcaaattgcaggcaaaggccaagaacactggacagagcggcgagagattggcaggggccaaatggtgcagaaacttctacaaaaagaatactactaacatttgtgctctctcaatgtgccaagcactgtgcccaggtagtacgttactttgatcatacatattccctctagatgatcacagcagaagcatgagggagtagatatcact

SEQ ID NO: 1563997 - DNA, 4001 bp, Homo sapiens
aattaaaactttccaagaagtccaaattaccacttcccagtcagttctctagtcacggtaatctggcttctgtttcactgaaaccacttttacccaaggccacctctaatttccaaatctgctgttcttgatagactataccctctctctttaaaacattctggtctctccagcctctggccaccattctgcactccctctatctgtctgcctctttctctgcctgtcctaggatcacatcctctgctctctgctcttttcattctataaactctccatggataattgcatacactctaatgggctcaactaccatctataagttagcgactcctaaaacttacatgtacagtctagacctctccctcaaactttagactcaaatatccaaccacttcctgactacatctccactgagatgtcccacagacacctcaaagccaatctatctgaaagtgaattcatcaatctcatccccgctcctcatgtatccttgatgttaccctgcaggaccagcaacaggttagaaatccaatccagaaaacagaatgatcgttgatcctccctcaccacccctccccaacccaataaatcaccaagtcttgactatttcacatcctaatatttacagaatcttttctcttttctcagttcccacagccactcccttaggtcagtccaccatcatctctcaccaagactaccacaacaatctccttacaggtctttctgatccttaactgtccttcttagcagaatatatagcactctccatgatctcgtctttgtttctgttttcattctcaccacttgccattctgccttgagtttttgctccagcaacactacgctgcacacatcatgctgtttctcacctcagtgcttttgctgctggaccccaagtaaggaatgctttaacctaccctcaatgcacatcttgacctgcctaattcatctccaggaagtcttccgttccctgttccccagctaaatgaaggacttccctcaatttctattatatcccatacacatccctcaacactacatttagtacagtgctttatgatcactaagcctttatcttcctcactacttcgggagctccttaaggccaaaatctcttttttttttttgagacagaggctcgctctgtcgcccaggctggagtgcagtggcgcgatctcggttcattgcaacctctgcctcccgagttcaagcgattctcctgcctcagcctcccgagtagctgggattacgggcgcgcaccaccaccacgcctggcgaatttttgtatttttagtagagacggggtttcgccatgttggccaagctggtctcgaactcctgacctcgtgatccatcctccctcggcctcccaaagtgctgggattataggcgtgagccaccgcgcccagccttctgtcttatttgtgtatcctcagcgcttagcactctgcctgacacatttctgttcaatggatgaatgattccttccccgatggtgggcatgtcattctgtaagcattaaagtgaactttaaggaccataaccaatgtgtacttcctattgctggcttttgataagacccaattttagagctctaataaccccttgaaatagcagccctaagtcatcgcctccgaggaactatccccatcagattccattacccactaggacggtccctgaaccgtagcccaatgtattcctacagatgtaatcgatggcagcactgtggggccactggctacctgctgcgtccgtcccggactccggagatggactgtctgttccctcccttcgctcctcacccgcccccattctccttgatcgctctggccgctctacctttccccgcttttccagaaccactttttcctttgggcggcatcttggaagcttgttgttgaacgctgaaccgctccagttgccgtacaagcccctttagaagccccgccatgggcatgtcctaaacaaatgcctgaaagccgcatctcaattgaccgttcttattgcggctccggaagcaggcacagcttggggcagaccccgtcctttggctcttggaccaatggggctgaagatgtctgaccaataagacgcttgggccgaaacaaaggcagaggggcggagacaaaggccggattagggcgggaagcctggcctctgcgctttttgtgacttctttcacgcaccctaatttgcaccagatcccccactccccacactctacgcccgaagctcccccgttcccctcaacctggcttttttcacgcgtgcgcagtaggagccacgggggtgggtggctctgcagtccctcggcgccagctctggccaatcccgcggggccgccagacaaagggaagcaggagtactgtggtggcggccaacttccgctgtctcctcctacacacagggctgccctccctggcagtttttcgtttgttaattttattctgcagttgtagctaattaggttcaaaaggtagtttttaaaaaagcctgtcacctttttgcgtcttgcagagctcagtcatggagaaacattggaagcagtctgagtgctcctcagtcgggtactgcttaaataatgttttagccacacaagaagatattatacaacattcaaaataacgattgtaaggctgtgtgtacagataggggaaatgtttttaagaccaagataaagaatatgattccttgtaaaagaagtatatgtaatgtattgtatgttatatgaatataaaggagaggaaagctatagagcaagatgtggccagtggtgctagtgcatacaggtcatcgtgtttgtttctgtgtattttccaaaatttccataatggtgcagcatagtgtagtaaaagcatggattctggagccagattgcccagtttcaaatccctgctccacatctgtctactagctccatgaccttgaggaagttacttcacctctctttggctcagtttcatcatctgtgaaatggagttgatgataatagtacctactattatcctatcaggtgttaagagaattaaacaagttcatatctgtaaagcacataaaatgatggcttgctcatattaataatgtttgcctaagataaatgatttttgaatttgtgcccacacactttttctccccttacaatccctcccaccatcaataatttgtatatgatatgtcagggcgtttcctccagtccatgagagagctgtcctagcttgccactaccagccagaatatagaggtcttccagctcagagtttagtttttggatgcagccttgctggacctggagatgcttcatgctcataccagggaatcaggtgtttctgagactgtgctcattccctactcaagacataacatggagccctcttatgtttggctgctttaaattctggacacattttgggcactccttgttttcggattgggagtgatcaactgcggaggacacatctagtggtgaggggatcattgctctgccacttctgaagtggatcccgcacctgtactaattctccaagttcggctgcgagatggaggggcgggggagttgggattgggtgttgacgatgacagcgtagccttgtgttcatcaggttatctatggccaagaggcccaagaggaacatttacttttgatttttctttcttttttttttttttttattttttattttttattttttttttttattgatcattcttgggtgtttctcgcagagggggatttggcagggtcataggacaatagtggagggaaggtcagcagataaacaagtgaacaaaggtctctggttttcctaggcagaggaccctgcggccttccgcagtgtttgtgtccctgggtacttaagattagggagtggtgatgactcttaacgagcatgctgccttcaagcatctgtttaacaaagcacatcttgcaccgcccttaatccatttaaccctgagtggacacagcacatgtttcagagagcacagggttgggg

SEQ ID NO: 1563998 - DNA, 4001 bp, Homo sapiens
cctgccacataatgacattcaggtcaacattacacagtcaacaatatatggactgtatgtatgacagtagtcccataagactataatgccatatttttactgtatcttttctatgtttaggtatgtttagatacacaaatactcaccacggtgttgcagttgcctcagtattcagtacaggaacatgctgtatgggtttgtagcctaggaacaataggctataccatatatcctactacacacctaggttataccagctaggtttgtctaagtgtactctaagatgcttgcacaacgacaaaatcacctaacaatgcatttctccgaacatatccccatcgttaagtgaagcatgactttagcagctctgttggccccttactaaaaatctccaatgaacactttgtctttcttacttcactgaattctctcgatctcccaccccttccccagtgccactcatctgtcagcctcactggtagcacccatgaggtagttgctaccaatgaggctgacagatgggggcaggtttgtgtggcgccttagagaaaatggagaaaaacaaagaggtccctaactcttaccagaacatgctgaagatcttggcattaaaagagatcttcgagggtcattgaattcaaagacccatctattcctgaagttcagggccaacattttgggcaagaaatctttcagcttactcatgaagtctcctagagcataggcaagtcatggaccagctgttcttggcaatgtatctcatatttcaggacttacctatagccagagtttgttattcgaaagtcttttcctctttgggaggtctaggttctaatggactatcccagaaggaatataatctatccctattccacttcaagtgtttgcagacagtacccccaatcccttaaatcttttcttcaagtgaaatatacccaattccttcaaagattcctactgaaacgaagagaggtgctttggcaaaaagcagactctggaaccagacagcctaggtttgcatctcagcttcaccacatatcagctgtgtgacctgaggttttctgtggctcagttttatctgtaaaatggaatgataagaccgcctacctcaaaggggtgcagttagtgctatgagaatgttagctgctgttattcagaagggctctactccacaataccctccacttagtcaaggcctaccctaaaatgtatcctccctgaatagtaatcgataaatatttattgggtgataggttgcaaggcgcagaaacgagcttaatactcaaagcagtacaggccggtcatcacctacatcgaagcaaccagaaagtatctttatccccatctagattatgtctgggtccttccagactcctacgattaaattgtatgcatgtgaacaactgatgaggtacttagatctcagtgctttgcagaaagaaaagccgtctaccattttcaccaaatttcgtagtacaatttaagtatctcttgttatctcccctaggagtctaaagtgagctggggaaggcaggattttgcaaactgaccgccagcattccctcacctagtggacccctgcaggagccccaggtactcacgctgcggtagcggcacctggagccttagcggcgggggtgacgcgaagagccgccgggagcgagtgcagggagggcaggttaagagagtgtgggtccagtagcctcaccgtgactcagcgcttcgcggccggcggcctagaggaggcgggaggcgggagtctacgggtctcggaggccctggggctccgccctcgggaatgtcactccactctcgctccgccctacgcctctcccaggccagcttggcggccctttggcctccctgcctctcgtgccgggaagagatgctcactcgggtaatttaggcggcacttgctgtgctccaggaggaaatgtgtggcccgggcaggtgctctgatcggcgctccggtcggtcttgtgggaaatctgtttttaactgtagtctccctgtcacccagccggcggagcttggcggcacggattccagtgctgcctccaccgctgggaggcaccacttgacatgacctgggacaggtggctcagtctctctgtgcctctggttcctcctctataaaatgaggatggtgatgataatagtgccagccttatcgggctgaaatgagaattaaatgagcctgtcacattctaagcactacagaatcgtttgttccatagataagttgcctgctgtttgtcagttagaattgcgagaaaaggagtgcgggagtggggacgggcagccatacgtctttattcctgcctgaagagaaggcacactctagtggggagataattggttaagagtttgtatggtgttggaacacagtgggcaggcgttggagagtttttccagaagaatgaggagctggcacaagccagtgaggggatctagttgattactaggattattaactagtggtacaggcatagctgcagtttctattctctaaacaccagaaggctcattgcctggttttgagaaaggaaagacagtggtgtctctaaaataaggttggaaaactttgtctgtgaaggaccagatagtaaatactttgactttgcaggccatgtacattctccagtttgcctttgtagcaagaaagcagccatagataacatgtaaataaatgaatgtggctgtagttcaataaaactttaattatgaatactgaaatataaattcataaaattcatacaattttgagttcatataatttttacttgtcatgaaatattatccttcttttgatcttaaatgtaaaaccacttaaaatgtaaaaaccattcttagccctctggctatacaaaaataggtagtgggctacctactcattttggctgcaggcctagtatgcagatccctgctctaaaagaacaggttagtagaggaacgaacacttttctctgggcttttaaaatatcagtggggcttaaacccgtcctcatcaccttacttaggcagttcaaggctagctgagataatacacatgaacattaaaggtgctatggaataacaaagtattgtttcttatcgtcattgtaactagttctgcaactgtctcctctacctctgcagctgtaataggtgtactaggagtgaacgtttctcctctttgtctctcagaagccagttacaggtaaaagctaagtccaaggttgtacatggttagagcaatgcaggaattccatttacaggcccctgcagaaaaaagaaaagaaaagaaaaaagaacaagtctgaaaaggtagaagacttaaaatgaggagaaacaaaggtgagagagggaagaattcttacaaatgaacaaagggcgtataatgtttcactgtaacagggtcctgttttgagatgagaaatgtgaccctgtatattaagctttgagcacttttcacactgtcattgacatccagatcaagatgtggagtaggtggctaaatatatgagtgtgtagatggactgttgatcacctttggaatcttgggaagcataaagaaaactcatgctgatatgacaatgaacaaagccttccctaaatgattccaaataacaccattataatctttaaagacaaccacattatttaggtaccttgactcttttcttttttattcacgaattccattttcctcctctgtaaaacttattgaatttcttttcaaagatacatattatagaagtacatggggccaggcgcggtggctcacgcctgtaatcccagcactttgggaggccgaggcaggcagatcacctgaggtcgggagttcgagaccagcctgaccaaaatggagaaaccctgtctctactaaaagtacaaaattagccaggcgtgggggcgcatgcctctaatcccagctactcgggagactgaggcaggagaattgcttgaacccaggagacggaggttgccgtgagccgaggtcgtgccattgcactccagcc

SEQ ID NO: 1563999 - DNA, 4001 bp, Homo sapiens
ccagacttagaggagaatctgacggaaggttggggggtgactggacgcttggaaggtgggtgaagtactgtggaattgtgcaacgtggggaaaggaaagactgctatagttttttttatggggtgtctgcatttttctgagtgctgcagacatacaggagaaatgcaaattggaatagagtggaaaatacagatcgccgtgtgtgcacgagtgcctatgtgtctgtctatcaagaggagagggacaggtggaaggggaccagtaatcctgcaacagagggatgtttacgtttgtagggggaaagggtatgagtgttagaatgagacccattctggatgtgggtatgaaaatgacaggcatgggtggggtggctttggaggagaggggtgcgtgtatgtatgaggaaagggaaggtgtttgtgtgtgtagctgtatgtgaggcagctgaaactacagaaggatgcccatgtttatgcgtatgtcacaggcagaggagtgtatggttggcaatggagaggagtgtctgagagtttgtgtgtgtgtatgttagtcaaaatgggaggcaacaatggagaaatgtcagtgtgagcaaatgcagcaggcacaaatggaagcgggggtggggggtgcgcagcactggagagggatgtgcttgaggtggatggaacagaggcaggcaatcaaagaatgatgcctgcctgtgtggatatggcaagcagggaggcaggttgtgtccccgtagaaggatttatgtgagtgcgagtgtgtgcacctcagggaccagcaaaagagagctgtgtctgacacacgtggcagacagagcaatagaggagagcatttgagaagggggtatgaatgagcacatgtggctacatatgtatgtcactggccagcgatagaaggatgtccttatgtgtgtatatgacaggaaggaagaaggagggcagccggagggggtgtgtgaataggcatgtgttcgcgagagcacgcagaggccgagcagggagggggccggtgctagaggtgtgtatgtggtaggcggatagaggagggggaaggcatgggagggtgtgagggtgtgagggtgtgtgagagggtgtgtgctgcgtgtgcctgcgcatgcgcgggggaggggaagcactggaaccttgaggatggaggggcaaggagggggctgcaatggaaggcttctgtgcgggggcgcgtgctcgcgacacacggggggtggggggtaggggggacgcaatgtcataaaaagaggtgggaaaaggccatcagctcaaacgggagaccccaaccgatgtggcaggggagagggaaaatgaaagaaaagggcgtgcgtgggtctagttttccctgagaataattattttttccttccaattttttccctgggaacagtatttttacctaaaaatcttaaccatttaccatttggcaaaacaacagcaaaatatgggaagaaaggccacggagtgctccgcaaaggggccgaggagggaagaaggaaggagaggggaggagaggcagggagaagtgggagagggccgcgaccaccactgccctcccaatagcgatgaaagccactcgagtggggaccgcgccacaccaaaggggttccggcagcggaagatgtggccccagaacaggccgatggaggacatgggcctcactctgcagtcaggtcccgcgtccgccccaccccttcccgaggggcgaacctgaaaagcagttcccaggaaccccccaaaatcctcgcccccgtgcccggccactcgccccgcgcccggccactcgcgccaccgccagcgcccggatgaatcgaggaaacaatcagcctttcactcaccaagtccagaaagccacacgcttttcagagaagcagagctctcggatctccgaccgccacgaccgccagagccgctgctcccggtcccgagctcctcccccgccagacagcagcggggcgggcggcgactgcggcggcggaagtgattgtgaagtcagctggagcccgcctccttgatgtggcgggggcggcagctgctctccacaaatcagggtgggcccgaaagcattatttcatcttaaatgatgaaatcgtcaaggatacagaaaaggacagcgaaaaatgtcacaaacacccagctttaactaatgttaaacatttagctatattgccttctggttttttaataaataaaataaaatctgcaaattctttctgattaagtccaatgtgagagtaattacgttactacatcacatcctatgttacgtgttatggttgtaccgaaagtattaaaactgtgaaaccatatttagggttgcagtaagcttaaattttttttaacctgatggttaaagcaaattgaagctgtttatgttgaatttgttgctgctaatcacaaaaccaagcttctctgtccaagagatcataggacacaacacaggttcatattctgttattgcattgcagttaaaaatattgtagttacgccttttggatttataccattttactgaattctgaagtctttaaattgcgctttataatggaactctagtatttacagccaatgtaaacatttcccatgttcacaacagtagcaaagttttgttcttactggaaacaaaatgcataatagaacaaaaatcttaggggtaacaacataatagaaataaaatgtataactttcaaaccattaaagtaataatatgtggaacaaagagaaaaactcattcttaacaaaggtcaagaaatgttgctgggggggtacaaaaaaaaggatgcaaaaagaaaacaaaaatgcaggaatccaaatatatcagcatgcattatgggttaacatctcctaataaaaaccaaactcttattttgagcattttgtttttaaaagctaagttatattctatttatgtgagtttcacctaaagcagaaataggaataaaaaatatatgagagtaaaatactagcagaaaaaagggagagagggaatgagggaaggaaagaagcaaaaaaaaaaaaaaggaaggaaaggaaggaggaaacaaactcgtaacaatatcaatatcctaaacatcgagaactcaaagtaaaaagaactaaagagaacaaaacaggttgctttattcactgagaaagatatgacaagctggtggtgtgtgcctgtagtcccaactacttaggaggctgaagcaggaggattgtgtgagcccaggaggttgaggctgaagtgagtgaagatcacgccactgcactccagcctggacaaccaagcaagatgccatctcaaaatgatgatgataataataacaataatagaacttcattggtgagaaatctgaaactatcaaattttttaatggagatacattttcatctagcaattctacttctagtcaattgctctattgtgtgttctattgagacacacaaatggagaaagatatgtgaataggagtgtagcaagataatgcaaacaactttaattctcctcaacaaataaattgtttaaatttatttaaacatgttgcatggtggctcatgtacagacatggtggttgacacctgtaatcgcagcactttgggagaccaaggcaggaggattgcttgagcccaggagttgagaccagcctggacaatatggtgaaaccccatctctacaaaaaaaacgtaaaaatttccctggcgcaatggtacgtgcctgtagtcccagctacttgggaggctgaggtgggagaatcacttgagcccaggaggttgaggctgcagtgagccaagattgcgccactgtgatccagcctgggcaatagtcagaccctgtctcaaaaaaaaaaaaaaaaaaaagaaagaaagaaagaaggcaagtatatatgtatatatgtactggtctaatataaatatattaagtgaaaaaagcatgttgcagaacagtgcattttaaaaaaaaacatatgatagtcacaaaaatttatgtgccaaacaatgtagtttcaa

SEQ ID NO: 1564000 - DNA, 4001 bp, Homo sapiens
cagcagcaccccctctctgaatttccatagcacttgtggtctatagggaagaatttagcagatactagtcttattgcccactcatatttacattttcctctttttttcttttcttttttgagatgcggttgtgctctgtcccccaggctggagtgcagtggagtgatgatggctcactgcagcttcgatctcctgggctcaagtgatcctcccatctcagcctcctgagtagctaggaccacaggtgtgccccaccaagcctggatattttatttttagtttttgtagagacggtgtctccctacattgctcaggctggtcttgaactcctgggcttaagtaatcctcctgcctcagcttcccgaagtgttgggattacagaaatgaaccaccatgcccagccttttttttttcttttttaacatttgtagacattttcatcttatctgctcatttggatggccagggccccttgagagcaggagtagatctacccattgtttctcctagagcctgttagagagctagtgctatgctgagcatccagcagctccgagctgtcacttgaccgtgagaagatgctttgttcatctttagagtcctcctttaactctgattgtctctaactccagtgagacaggaaggaccaagggttgcgaccatcatccaaataatcatagtaattccacctatttatagagcaccaattatgtatccagcaccttgaacatacggatgctccttgacttatgatggggctatgtcccgataaaaccatcacaaatcaaaaatatcataaatcaaaaatgcattcagtaccctaataagcccgtcataatgtcaaaaaattgcaagccaaaccattgcaagttggggactgtctgtatattctatttgatgccaattaagcagataaagaaacagaagatcagagaggataagcaacttgcccagtgtcactcagctattaactgctgaagctggaacttgaacccaagtttgtttaaatacagagcccatatttgttccctgctgcctctgtagtaacagtgatcagtatattgatagaaagaaggacaagttattagagctgctgggattagaatgcaatttattctactactctttttataaatgagaatgtccaccctgagagtaacattgtgctaccagtggtggtgtagtttctgtgaatctgtttcctctcagaatcaaggtccagagacatgcctctctgtggtcatgggagagaatgagacaaagcagctcacaatggatttagggtccctgtctctttctcaaagagtctgaaactgatcatctgggttaataggaacacacagctaaaagcaatgataaagataagtaggagagtaaaggaagagagaatgatgagatggcaagtaaacaggggaaagaataggcagttagactgggaaatatgtgtaggggaatcccacatgaatccctaaaaaataccctgtgcagttggggagtggtgcatgtgtgagtgtgtgtgtgtgtgaatgtatgatattgattttagatctatgtgtgtgtgtgttcaatctttagatttaaataaagaacagaccaaattcagagtctaactgcctccttctcagcagccacttcatcacccccatgtcacatttcccagctggagggcaataattgcatggccagatctggccccatctgggaaacaccagggtcttcctgaatcgtcatacaccatgctggctgccaaggcataaggtgacctaagcgaagctttcacacaggccatgtgcacagtcataaaatctcgagagaatgtggcaacagagacagacttgacttacctgccaaatttccaaagggaagaaggaacttgctgtgtctgtatttgcccccaggattggaaaaatgtatctcagtcactggaactgaagaggggtggcctttaccttcataggagagtcactctttatacaaatccttctgatggtctgatatatgtgtgtgtctttatataaatagagctatatactgactttgccagattgcatcagctacctgcttaacattttactctggtgctttcgaaacaacactctgaaagtcagaataatatgtggcctctgcagcatttcccagtttggcattttgtttacagagtaaaagaaagctactcacccttgagatcatcagtgattgaatgatacctactgtcatgtgttagaagccatgtcaccttgacagaactcattcacaggaagaagggcggggaggagggttacaacatggtggtggtaattcttagagaaatcaagcagtgagctggccacttgtagtgcttgctgttgccaaggcagtctttcgtgtctttactcagtaaacacatatcaggcatagggaatacaaaaacaaataatatatgtcccttcccaccaggaatccagcctttgtccccagttctctcaaggagcccactgccaaatgagaggtaagcctcttcaggaagaatgctcagggagaatgagaacacatggacccagggaggggaaaacacacactgtggcctcttggggggctgtggcgggtggaaagcatcaggaaaaatagctgatgcatgctgggcttaatatgtaggtgatgggttgatcgatgcagcaaaccaccatggcacatgtttacttacataacaaacctgcacatcctgcacatgtaccccggaacttaaaatttaaaaaaaaaagaaagaatttttagggattactggtcagtatggttgcctgagctgttgcaggaagctcctcccctgctcaaaacacattgttttttcaaaaatttaaatatgttgtagagagcaaaagcaaaaataaacatattctagtgccagaaatgaagagggagctcaaagccacagcagcaactacacagcccacagaagaaccaaaggtggtcacatatcctgggcgaagggtttgaatggcagggtgggaacgggagtggaatctgagctcctatggaaagtcagtagtggtaagtgctggcccataagtggggatgggggaaaaaacacagttcagaagtgtactggccactttgagctgagagtaggcagtcacataacccaaagtacataagactccaaggtaaaacaattcctgccaaataacagtaattacactagccaagtgcttaattatgtgccagatgctgtcctaagtgcttggcttatattatttaggttgatgcaaaagtaattgcggtttttgccgttgaaattagtggcaaaaactgcaatcattttccaccaacctaataactcatttgtagaacagccctgatttccagatactgaaactgaagaacagagagattaaataacttacctaaggtcacacaggtactaagtggcagagccagaattcaaacccaggtggtatatagcacatgaatctgtgtttgtatctatgactcaggatgaatgcatagctagaacttactaagtccgtgaggaaataaaccaccataagaccagtgcaaccaatggaagaattcataccttaagaaccacagctaataagaaaatctaaaagggattttaaaataagtatgctgaaaatgttcaaagattttttttttttttttgagacagagtattgctctatcacccaggctggagtgcaatggtgcgatctcagctcactgcaacctccgcctcctgggttcaagcgattcttctgcctcagcctcctgagtagctgggattacaggtgcctgccatcatgcccagctaatttttgtattttttagtagagataggatttcatcatgttggccaggctggtcttgaactcctgacctcgggtgatccacccgcctcagcctcccaaagtgctgggattacaggcgtgagccaccatgcctggccgaaagaggttttaaaaaggaatagaaactagaaggcaagaatagaatagtttgaaaaatacaggtgaatgcaaaaaaga

SEQ ID NO: 1564001 - DNA, 4001 bp, Homo sapiens
aaatgagtcacgcctcctccaggcaccgtataacacgggctggtctcctgcctggggtttggagcccccgtccctctgtctcagtccaggggagccacttctttctgccttctcgccttggtttttttttttttgagacgcagtttcgctcttgttgcccaggctgcagtgaaatggcgcgatctcggctcaccgcaacctccgcggtgctgggattacaggcgtgagccactgcccggacctcccttctttcctattaaactctccgctccttaaaaccactccacgtgtgtccgtgtcgcctacacacacacacacacacacacatacacacataacagaatatatacatatatacatattatatacataacatatatataacatatataatatatacatataatatatattatacatataatatatacatatataatatatatataatatatatataacatacatgtataacatatatacatatataatatagacatatataacacatacataacatatatacatatatacatcactatatatacatatataagtatatatatataatatactgttgaaaataagggaagtgaccctttccataaggacattttagacaacttgtaaattctttctctgcctctgaagtgtatataacttttttggttggtcttttttttttttttttgacacagtttccctctcgttgcccaggctggactgcaatggcgcgatcgcggctcactgcaacctccgcctcccaggttcaagcaattctcctgcctcagcctccagagtagctgggattacaggcgcccgccaccacacctgcttaatttttgtatttttggtagagacggggtttcactatcttggtcaggctagtcttgaactcctgacctcaggtgatctgcctgcctcggcctcccaaagtgctgggattactggcgtgagccacggtgcccagctgtatgtacggttttttttttgttttgttttgttttttttaaagacagggtttcactcttgttacccaggctggagtgcaatgatgcaatctcggctcactgcaacctccgcctcccaggttcaagcaattctcctgcctcagcctccagagtagctgggattacaggcgtccgccaccacgcccggcaatgtatgtaagatttttaatcatttagattaaaactgattagattaaaatcattagatctaattgatttaatcaaatcaattagaattgttgatcttgagcccagaaatcagcctgttgacagtttcacatctgaggaatgtttcctggtggacctgaggcctcctcttagaaatgagacctggaggggccgggcacggtggctcacgcctgtcatcccatcactttgggaggctgaggtgggtggatcacctgaggtcaggggttcgagaccagcctggccaacatggtgaaaccccatttctactaaaagtacaaaaagtagccggccgtggtggcgcacgcctgtaatcccagctactcaggaggctgaggcttgaacccgggaggcgggggctgtagtgagccacaatcacaccattgcactccagcctgggtgacaaagtgagactctgtctcaagaaaaaagaaatgggacagagaggaagggaagaagccccggcctcctggagaagagacaaacttcagctgcctgcaaactgcaaacccaccttgagtcccacacgcagggggagttcggaattcgaattgttggtctcgagcccagaatgaaaggcctggtctccctgggccgcaagaaaggacgagatcctctcggtctgcagctcctggcggctgcccgcgttggcttcacaaggttctgtaataatcctgctgccttctcttccacactgaggccaggcttcccaggtggctgcagattttgttcttatttacatcttcccaaaagccttcctcccagaccctaagccaacaccagctacatgaactcagatcttccctgctgcccggaaggagggagggagggagggagggagggagggtcccgggagcctgctgggcccaggaggaggagcccattctttatcagcccgggggatgtcagctcagcctctttctccaagagaagcaaccacacctgtaccgcggctccgggtccccaggagggagctggccccttctctgcagccagctggaaaaggcccaggacggcttcccctccccctgcacgccccccgctccgcctgcacggccccccctccccctgcacggcccccctccgcctgcacggccccccctccccctgcacggcctcccctccccctgcacggcctcccttccccctgcacggcccccctccccctgcacggcctcccctccccctgcacggcctcccctccccctgcacggcctcccctccccctgcacggccccccttccccctgcacggcctcccctccccctgcacggcctccgctgccccctgcacgtacccccctccgcctgcacggcctcccttccccctgcacggcctcccttccccctgcacggcctcccctccccctgcacggcctcccctccccctgcacggcctcccctccccctgcacggcctcccctccccctgcacgtcttcccctccgcctgcacggcctcccttccccctgcacggcctcccttccccctgcacggccccccttccccctgcacggcctcccctccccctgcacggcctcccttccccctgcacggcctccgctgccccctgcacgtacccccctccgcctgcacggcctcccttccccctgcacggcctcccttccccctgcacggccccccttccccctgcacggcctcccctccccctgcacggcctccgctgccccctgcacgtacccccctccgcctgcacggcctcccttccccctgcacggcctcccctcctcctgcacggcctcccctccccctgcacgtcttcccctctgcctgcacggcctcccttccccctgcacggcctcccttccccctgcacggccccccttccccctgcacggcctcccctccccctgcacggcctcccttccccctgcacggcctcccctcctcctgcacggcctcccctctgcctgcagggctgtgcagtgatctgcctggagcatcccagcagggccgctgtgagcctccggatgcccagggtcccggggccgcggggtggaggggaggttaaaatgcaggtctgggcggggcccgctggctcacgcctgtaattcgagcacttcaacactttgggaggccgaggcgggcggatcacctgaggtcaggagttcgaaaccggcctggccaacatggcaaaaccccatcactggtaaaaatacaaaaatcatttagccgtgctggcgcgcgcctgtagtcccagctactgggaggctgaggcaggagaatcgcttgaacccgggaggcggaggttgcagtgagccgagatcgcgccattgcactccagcctgggagacagagtgagactcccgttcaaaaacaaaaaaccttcgtctccacatcctcttatcttaatgcagatattcctttctactaataactctttttttcttctttttttttttttcagagacagggtctcgctctgttgcgcagactggtgtgcagtgtcatgatctcagcttactgcagcctccgcctcctggattcaagctattcgcctgcctcagcctccagcacagctgggattacaagcacttgccaccattcccagctaattttttgtatttttggtagcaacgggggtctcaccatgttggccaggctggtctcgaactcctgacttcaggtgatccgcccgccttggcttcccaaagtgctgggatgacaggcgtgagccaccgtgcccggcctaataataactctttcaaccaattgccagtcagaaaattttaaaatctaccttatgacctggaagcccgcctcaccaccagtggagcagtcccacc

SEQ ID NO: 1564002 - DNA, 4001 bp, Homo sapiens
cagaagtagtggcagtccagtaccttgttagagatgatctataattcaaagtactttagatactctgttattgaataaatgaaaactcagtggctgctccatcatatgtacctggcccaagtatcgtccacccttaggacctgggacccaatgtgcatcctcaatcgtgcccttatctgtggcactcttcctctggaggaaaccacccagcctccataacaggcaattgtccctgtggtcactttatttgttcctgcctttcctcagggatttcatcccctgaggaagtaatattcaacatccttctttactccctctctgtttttaatgcacaacctatccagtcagctcggctgacattagataggattcctgatgttacccagggcaggaattgagttcctccaacattcacctctcatctggtcacacataattggtcaaatgattctgacccaagcacgcaaagaaaacccaaccaccctggaaagaggaagagttcgcctgtatacacattattgtctaatagtaggtattatcatgatttacagttgttatagatcttgcccattttcaaaggactttgacattattgttacttgattctcacaaccctgaaagtagacaaagtagttattgctgtccccattttccagatgaggaagtggtgattcagtgacctgtccaaggtcacatagttcataagtagcagatctgggatttgaatctgatttttccgactccctgtccagtgctctccctcctgttttacctgaacacatgcttcaaagtgttctctctgtgtttcatgatgaaacaacctaaaggctgaaccagctcagtataattgcaaattgatctctgtggatgttgtctactggatgctacatttgatagggaatacatggggcaactgagtctcatttcatttaggatgtgtttaagctgctatctttgttttgccaaatgttagcaatgtctacaggactctgtggagtccaatagggacaaagacccttgtgctctgcacacattactctgagtagaaactaccaccagaacttcatagcttctgtctttgttcacggaacctagaaaagccctcaatactcagccaacttagcaagagccctaatgtcccagcatcctccttgtcacagcaaagagccttcaggaaagctgtgtctgtgatatttgctagaaatgatcaaccctatatgtgcacacacatgcacatatgcacatacacacacacactcctacccatatctgtttcccatggtcaagccattgaggactttactttcatttcctgaacctgagaatggcctcctcagccatagccaagcctgagtccagcttgcccgatccccagcttcctattaatgccaaacatggttcaaagtttgcatcaagcaagcagttattttgtacatctgagggctagacagtgctcagtggcctccagcagaaccaggagggcaagctgacccaaccgttgccagggccttggaaccaagggaaaagagaagatagagggaagtgagggggtaggaggacacatgaccacatccatccagctgggcactctctccagagatctgtgggactctccacgtgctgctggaattctttggtaataaagcatcatgcttagtacagcggagaaggagttaatctaactgaatgttaaggaatttaaaaagaaaacaagtgccaaaacacgactcatttaaaccatggaacccccgaaccccaaagttggaaattctcttgtgaattcctgtgtcctcttgaatcttcaatgctaaagtttttgaaacttacccatgtctttgggactctgactccaattgtagccggctggctagtctgctttgtggctgactttgttcagctggaaggatcctggtctctccagcctccttcttcggtcttttactttttctctctgagtatctttgtcctcttctcctgcaatgaaaagggctttctgattgacagccaacccccttaaagggacaggcctgctttcctcctcctctcctcctcccttctcctccccttttccccacctactcagggatactcccttctctaagggctccatcttctctttctgcctttcactgccaattgtttcattttctttgtttttccttttttccctaaggcttgcctggaatttcgctttgctgcagagacatctggaaatgtggattgagggtggaaataaaatgaagatgtcctggaaacttccaactgatccttgggtctaattggtgtgggatatgcagcacaagcgtgagaagccatgaagtgagagccccaacaggggctcagagtcaaaaacctagatattagctcccaaagtccttccgaatctgctccagctccccacatcactcctagctgcccttggccctctccacctttcccctcccgattccttggaaaataagcgttcctcccccacccccacccccagctctacgaacacaatagagaagaaaaaattgtcttttaagataatttcctccaaatccttctcagtttcaactgcatgaagacaaaatgcaggctgtcaattcgatgaacagattgtgattaggctgggggaggctagaattgtaataattttatagctacaataataaagacccagaagtgggcaagacctatgcaagttcacagactaggttaaagaaaaggccagcgttgaagatgtgggtgatttccaagaaggataatcgacttcgagacaagtcaagaacacgatctgggaatcaggtagtcagtattctatcctgagagtgtaatatcttcatcagagagcttaagccaggcagacaagaggcagggagtgggttagagtgaagcagcaggtggcagtgagggtggagagaagaaacgaaatatagtccttgccacagagaaagaagcggtaagacaaaaatggctaagcagcaaaaacagggaaatactatataaaacctgccttagcaataagctatttctaaagactgtgaaggtatttaaatgcccactgctagatgggatcagcctgggaaggttttctagaacaggtgaatcttaaacagtgtctgtctgggctccttgtcagtcctgtctcccttcacagctcccttgacctagaggccggtgtcctcccatggatggcctttaaaacaactggctggcatataataagaggggcacctgttggaagactccggagaaggaaggtatggtctcctggaacttttcctgtgattttgccttgggagaggagagaagaggagggagatactgagcagagactagtaccttcctggggtgggagaaaggcaagattgtgtcttacagttttctctttgggctgtgactttggacatgttactggcttgggctctgctgttaggaaatggacgagtctttggcagatgcccctgtgggcccactggggccaaatcctgcaccgtttgaggcttgcttagagtactagaactctagatcctttgctcttgtatcagccccaagaaaaaaggatctctggaaatgctgccccttgcaaaacggtataatagtagctttccagagcagacgagactaaggccatgtgactgatggaaaagggtcctagagcccctcgccctccccagccctgctcgccagccacagactatgcctgctttggaagctcaactgtaggattgagccagcaataaacttctggatggtcactgtcggaatggccctggagaagggggaggaccaagagcaagaaatcgccaaatgtgtctcctcagctcatcagatggcaggagtgagcccaaactttgggagttcagatttagaggatgaggcaaatgatccttcacagctcgaatagatgagacagctctccacacaggggacatcactcagactgagccctctcacaaagcttcccctgagttctcagcagcagctctggggacagcaactctactggaaagaaa

SEQ ID NO: 1564003 - DNA, 4001 bp, Homo sapiens
tctctgtttttaatgcacaacctatccagtcagctcggctgacattagataggattcctgatgttacccagggcaggaattgagttcctccaacattcacctctcatctggtcacacataattggtcaaatgattctgacccaagcacgcaaagaaaacccaaccaccctggaaagaggaagagttcgcctgtatacacattattgtctaatagtaggtattatcatgatttacagttgttatagatcttgcccattttcaaaggactttgacattattgttacttgattctcacaaccctgaaagtagacaaagtagttattgctgtccccattttccagatgaggaagtggtgattcagtgacctgtccaaggtcacatagttcataagtagcagatctgggatttgaatctgatttttccgactccctgtccagtgctctccctcctgttttacctgaacacatgcttcaaagtgttctctctgtgtttcatgatgaaacaacctaaaggctgaaccagctcagtataattgcaaattgatctctgtggatgttgtctactggatgctacatttgatagggaatacatggggcaactgagtctcatttcatttaggatgtgtttaagctgctatctttgttttgccaaatgttagcaatgtctacaggactctgtggagtccaatagggacaaagacccttgtgctctgcacacattactctgagtagaaactaccaccagaacttcatagcttctgtctttgttcacggaacctagaaaagccctcaatactcagccaacttagcaagagccctaatgtcccagcatcctccttgtcacagcaaagagccttcaggaaagctgtgtctgtgatatttgctagaaatgatcaaccctatatgtgcacacacatgcacatatgcacatacacacacacactcctacccatatctgtttcccatggtcaagccattgaggactttactttcatttcctgaacctgagaatggcctcctcagccatagccaagcctgagtccagcttgcccgatccccagcttcctattaatgccaaacatggttcaaagtttgcatcaagcaagcagttattttgtacatctgagggctagacagtgctcagtggcctccagcagaaccaggagggcaagctgacccaaccgttgccagggccttggaaccaagggaaaagagaagatagagggaagtgagggggtaggaggacacatgaccacatccatccagctgggcactctctccagagatctgtgggactctccacgtgctgctggaattctttggtaataaagcatcatgcttagtacagcggagaaggagttaatctaactgaatgttaaggaatttaaaaagaaaacaagtgccaaaacacgactcatttaaaccatggaacccccgaaccccaaagttggaaattctcttgtgaattcctgtgtcctcttgaatcttcaatgctaaagtttttgaaacttacccatgtctttgggactctgactccaattgtagccggctggctagtctgctttgtggctgactttgttcagctggaaggatcctggtctctccagcctccttcttcggtcttttactttttctctctgagtatctttgtcctcttctcctgcaatgaaaagggctttctgattgacagccaacccccttaaagggacaggcctgctttcctcctcctctcctcctcccttctcctccccttttccccacctactcagggatactcccttctctaagggctccatcttctctttctgcctttcactgccaattgtttcattttctttgtttttccttttttccctaaggcttgcctggaatttcgctttgctgcagagacatctggaaatgtggattgagggtggaaataaaatgaagatgtcctggaaacttccaactgatccttgggtctaattggtgtgggatatgcagcacaagcgtgagaagccatgaagtgagagccccaacaggggctcagagtcaaaaacctagatattagctcccaaagtccttccgaatctgctccagctccccacatcactcctagctgcccttggccctctccacctttcccctcccgattccttggaaaataagcgttcctcccccacccccacccccagctctacgaacacaatagagaagaaaaaattgtcttttaagataatttcctccaaatccttctcagtttcaactgcatgaagacaaaatgcaggctgtcaattcgatgaacagattgtgattaggctgggggaggctagaattgtaataattttatagctacaataataaagacccagaagtgggcaagacctatgcaagttcacagactaggttaaagaaaaggccagcgttgaagatgtgggtgatttccaagaaggataatcgacttcgagacaagtcaagaacacgatctgggaatcaggtagtcagtattctatcctgagagtgtaatatcttcatcagagagcttaagccaggcagacaagaggcagggagtgggttagagtgaagcagcaggtggcagtgagggtggagagaagaaacgaaatatagtccttgccacagagaaagaagcggtaagacaaaaatggctaagcagcaaaaacagggaaatactatataaaacctgccttagcaataagctatttctaaagactgtgaaggtatttaaatgcccactgctagatgggatcagcctgggaaggttttctagaacaggtgaatcttaaacagtgtctgtctgggctccttgtcagtcctgtctcccttcacagctcccttgacctagaggccggtgtcctcccatggatggcctttaaaacaactggctggcatataataagaggggcacctgttggaagactccggagaaggaaggtatggtctcctggaacttttcctgtgattttgccttgggagaggagagaagaggagggagatactgagcagagactagtaccttcctggggtgggagaaaggcaagattgtgtcttacagttttctctttgggctgtgactttggacatgttactggcttgggctctgctgttaggaaatggacgagtctttggcagatgcccctgtgggcccactggggccaaatcctgcaccgtttgaggcttgcttagagtactagaactctagatcctttgctcttgtatcagccccaagaaaaaaggatctctggaaatgctgccccttgcaaaacggtataatagtagctttccagagcagacgagactaaggccatgtgactgatggaaaagggtcctagagcccctcgccctccccagccctgctcgccagccacagactatgcctgctttggaagctcaactgtaggattgagccagcaataaacttctggatggtcactgtcggaatggccctggagaagggggaggaccaagagcaagaaatcgccaaatgtgtctcctcagctcatcagatggcaggagtgagcccaaactttgggagttcagatttagaggatgaggcaaatgatccttcacagctcgaatagatgagacagctctccacacaggggacatcactcagactgagccctctcacaaagcttcccctgagttctcagcagcagctctggggacagcaactctactggaaagaaaatatgtgttcccaataaacccacagataccaatttatcaaccacattcccttaacacacatttctcttctcctttcttccatctccattgccttaatattcattctatcctctccccaagtctcaatctctttgtctctgttacctgtctctgtctctgtttctctctatgtgtctgtctctgtttcctttttctctctccacattccctgtcttcgccttgttcttatgcttgttcttatgcccagggccagaaaagggacccagccaggtgaccgtgtctcactcatcccagtgccttaaggttcccaactcc

SEQ ID NO: 1564004 - DNA, 4001 bp, Homo sapiens
tcggcctcagcctcccaaagtgctgggaatacaggcatgagccactgcgcccggccccaatttctactacatttgggacaaagttcttgcagatggtagtctagtgcattgacaaaggggccgcctgtttgtacctctcaccaaggtccttgtgtctgacaagggacttcccttcacagcaaatgaagaccttgggaggcaaaaccaagtcctgggccagactttcctccatgtctgaggacaagtgtgacttgctgtgggtcacacgatttctgccagaagcaaaggcagaaatggtccctggctcctcaaacccttcgctctgtgcttcagagctgctcccatggcctttacccctgcgacgattttggagtggtttcctctctcaacaaggacaacaatggaggtgatcaggtagaggattgccgctatgagggttcggaagaaatcctgtgaggtgtagggaggagaagagggaagtcagcaaccacagttccccgacaatcctaactgcccagacccctccctggtcttgccattgtggaccccttctcacactccagggccagttgatgaatggtatcttggtgtgcaggtcacacatgtagacaacaaagaaaatagcagcaaggatcatctcaatcaccgacagggaggagtagcctggtgtggaggcactgaagcagatcaggatcaccaggcataatatctggaagggtgacatgggaaaggggacctcaatcagcaaccagggctgagaagattggtttaaattgggggtcccatactaagatgcctacgagggctggggaaatgacatacaataatagctaaacactttttatgtgctcactgtgttccaaattcaatcatcacgacaatctaatgctctgggtactattattactctttctaatttatagacgagaaaactgaggcacagagaggtttaatggcttggccagggtcacccaacaagtaaggagtagagttgggtgcctcagtttcctcttttcccttctaggttacgggcagcctgaggggagtggcgctgccaggtgttttgtgagccccgctgacgccagctttgtggccttgaccggggcggaacacgcggttcccccagcaacccctttgggaagcggtgagagtgacaccagagaggcaggactccgttaaaggcgccgcaccccttttacaagtgactcaaaggcggcgcccactttgagaagggtggaaaccccgaaaagctaaggacatcccgcccggcctctgaagggcgaggaagaactggcgaagggcggggcgctctacaccgcgggactagcgcggggcgggggggccccaccccaacaggccctgcccctgggcgcgctgccagcccgccctcctgtgcccaggccgcgccacgccctgccacaggaggcccccacttcccagcaccctgggaccccttcgatgcgtccactgatgagttcacgcaggctgtccccacgtagccctccgtatgcgttataggctccttgcttcaccccggggaccaccagatctcaacaaccttcgtcaaaccccaccgactcgccctgcgccccgggtttcgggcctccaccgtgaacccacccacctgcaccccactgccgagcgccccggccaagtgcctgcctcacccggaccatccagttccgcatggtccagccaccccatcccgcttttgcccacgcgcctgccccagaacgctcacaatctcagcaaacaggaggattccctttcgagtgcgcgagaagttggtgcaggcggcccagcagccaggagccgagaggcgctcagaatccgccatggcatgggctggagtccctggtgcctcggaggatctgctcacttgctcgtggtttcgaggacgctgtacacccagctgtcttgcccgccgtctggccgggaagggggccccggggcgaaggagggagtgaatcaccgcgcagagctgacgcgggcggggccggagccgggccaggtggctgccgccccggaagccccctcgccccgccccccaaggatactcccagcctggcgcacagcccccggggcgccccatcgcaggggtgcttggcagctccaggtaccaggagcagtaatagcgggacccttcgcctttttggaatgcaaatgcacccgagacagcttcagcttagaaccgcgggaatctggctttgggatggagtgactcagtttccttaactgaataaaacggccgaggcagagttaaatccgaaagacttggggcccagtatgttgccagaattcggaatatttttgatttcagaaagttttcccatgcatatactctcagcggggtttggagctgccgcgttacaaaaaaaaaaaaaaagggccaggcgcggtggctcacgcctgtaatcccaacactgggaggccgaggcgggtggatcacctgaggtcgggagttcgagaccagcctgaccaacatggagaaacaccgtctctactaaaaatacaaaaattagctgggcacggtgacgcatgcctgtaatcccagctactcggaaggctgaggcaggagaatcgcttgaacccgggaggcagaggttgcggtgagccaagatcatgccattgcactccagtctgggcaacaagagcgaaactacgtctcaaaaacaacaacaacaacaaaaacggtatttcttcaagaaaaggtatgaacgttcacaataactgggtaaggattgaaaagtgttcctcggctgggcgcagtggctcatgccagtaatcccaacactctgggagcctcaggtgggaggatcgcttgagcccaagagttggagatcaacctcggcaacacagtgagacctcatctctacaaataattttaaaaattagcccaggcggccggacgcggtggctcaagcctataatcccagcagtttgggaggccgaggtgggcagatcacgaggtcaggagttcgagaccagcctgtccaacatggtgaaaccccgtctctactaaaaatacacaaaaaatgaaccgggtgtggtggcgctcgcctataatcccagctagtcaggaggctgaggcaggagaatcgcttgaacctgggaggtggaggttgtagtgagccaagattgcgccactgcactccagcctgggcgacagagcaagactccgtctcaaaaaaaaaaaaaaaaaagaaaaaagaaaaaaattagcccaggcatggtggcacgtgcctgtaatcccaactactcgggaggctgaggtgggaggattgcttgagcctgggagttcaaggctgcagtgaaccatgatcagaccactgcactcctgcctgggcaacagagcaagaccctgtctccaaaaaaggaaaaacaaaaagaaaggaagaaagaaaattgttcctcgttagatcaggtcaggttttgtaaccaaatagtgcctatcttgtgggaaaaccatcagtttccagagctttttgtttttggataatggattgtggacagtggaataaacctctgagcagtgatgagaataagaccctgccagtgtaaaggctgtgtgagaataggggttggtgagcattgagttgctcagaaatagggcaagcattgtttcaagtgttagagcccaaggccaggagcagtggctcatgcctgtaatcctagcactttgggaggccgaggtaggagaatcacttcagctcaagagttcgagaccagcctgggcaacgtagtgagagcttgtctctattttaaaaaaacatattttgtagtagtgttagagcccagagagcccaaggtctgattctgtgttctgcaatcccaaggaagtcctggccctaaatgttgggcctcagtttcctggttctgaagagaggggccagtcagcacaatcgtacatgaggaataggaaagtttatttctgggggattggcaagatgaatggatggctcctggggtgcaaggctgggtgacatttgtagacactttgt

SEQ ID NO: 1564005 - DNA, 4001 bp, Homo sapiens
tcttctccctccctccttccctgtctctcttccatgaattattttaaagcaaatctcagaaatcctgtgatttcacccctacatagctattaagaaatgagttcatttttctggaaatacttctattctgtgctataattgatcattagctagattctaactgatcttttgttttgttttgttttcagtaccaatatctatgagtcacttaaaccccaaagggtgcccaatcctgtgtcatttcctggaggaatatcaaatacctccattttaggtaaaagtttcctttcctctttttatacttaataaacaaagataagatctgaaagcaatggctatttaaaaataaattaatacgtagctttttccaataatagaaatattcaattcaatttggtcagattaaagacatcatttaaacgtttctcaggcaagaattttgcagctatttaatgcaagtctcaattatagtctaaaagccctttttcctaggatgaagaatactatttcaaacccaaagacacaacaaaaagacacctctccttcccctagcttcagaaagctaaggtacattaactaacttcttagattgaaatagcccactttgcttttaaaaggtctaatgtcttccatgcctaagtaaacttttacatctacccccaaaatctgaataatttatgggaaaataaatctgctgctaatgaaattaattaattttcatacctaagaagtatttccaccagtttcctttcttatgaaaattaacatatgtttgagtgaagccaagggcaactttcagggatatgtgtgtgtggggtgtgtgtgtgtgtgtgtgtgtgagagagagagagagagagagagagggagggagagagagagagagaggctaggcaagatcagactagttaccatgcttcacttcaattcaaaataaaaatgccataaaatattgtgacctacaactcaaatcactatatacacgaagcagaaagctatcggcaagtcactgaaaatgcctcttgcagtgttatataccttgcttatatgttagcaaatacagcacttgttaattgaaaaaactggtttgttttgtttcatgcttcactttttacttcatatgcgcatattaagtacaaccagtccgagaggtgactcaactcagagtgaggattgactgtataactagctatacttccctttgccagaaatatggggaaattaaacttatatgacaaccatgtgatggaaaatcctaatgtatgtgagcaccagaaatcactattgctgccaagtaccaataacgccatcaaaatttaatcaccagtgatgtttattattttgtaaattataaacactaagacaactgtttgatttaactcacgtaggaagagtataatatcaatctaatcgtgacatgttctgtcatgacagccacctcaacctccattttacagaattttgaaaaaccatgtaactgggatcaaaagcatttgaaatcccacccccaccacaaatatagacaataatttctattatttagtgttttagatacttaacttgataaatacggctgtataattaggatttcaaaacccatttttaaaaagtataaactccctaaacattctctaaataaagaaaaatacagaatacacacagaacaggttagaatctaaacttcaaaattttctcttaacaaaaattttattctacttgaataaataatatttttaaagtgactccaaatgtttacccaaataaataacaggaatttcaagctttttgacgtaaattcctgcttaatcatttagtatttaaatttagatttagtaatctcaaagttagagcctgtcaaaataatattaaaatagttacccgctgagagcaaacttgtttctttcctttctcgcagcactgatagacagaaccttctcccacgcccagaagagcaatctggaaacccaacattcttcttacaattgcaactttagagagcaagtcacaacacttcctgctagaaaaagagaacaccctgacaaaagaatgatacaatacttacgaatccccttcctgtcagcctggcggtattttgcagagaatttaataaattctaatttaaatgcagcatttacagagaaaagttttcttttttcttcttccttttttttttttccccaaaatcatataaggactcaggggaatttaaagttagttcaggtcaaatagctacaacccatatacctatttagagtttgaacagtagccaagtaacctgcttattttagaacacatggaacagcttctccccagtgcccaagtcactcgtccatagtcaagaacattacttgcgaaggcaaattaactctcaagccactcactaacagtctctattattcatgctgatccatacacaacatttacaccccatatgctaaggtgttgtagcatttatttcaagtatatacattttgatttatgtcaaaaatgtaagctcttctgtgtaggaactatattttctgctggcatagcacacaggaactaagccaacacttgctgaaccgaaatatctcagttagaaataattttctaactgagagctgtagtaaagaggtctggagccagattgggttcaaattctggctccacactttattaactgtgcaaattgcttaaaactcttctgcctctattttctcatcccgggatgaagataagagcaactccatcatatcgcagttcactattttatacatggttgtaaggcttaaatgatttaatatgtgtcataaatttagatcatagtctggcgcatggtaagtactagatacgtgataactgctctcattattgaaatttgcctttaactggtctagcaatctaatcagtgaattcctaaatcaagcaagtggttagttgtgagtgccttttatgagagagaacaatcagttggagcactgggctaggctgaagaggccgtttctgtgctgacatagggcaagttcataatttgaaggaaatgcagcacaatgaaagcatcagggtcttaggagtctgacagacctgtaagtctgtgtgaccctgaacaaattacttagcttctctgagccctgggttcatatctataacaatggagctattccacatatttcacaaggtccacgggatgacccaatgggaagatataaatatgtaagagtgtctgggtccagcaaggtactcagtaagtggcagatattattttcttgtgtctgggataaagcatgcataatgccatctgctgctgtaatctacctcatgagaatgaaagaaagtgagacaatagatactctagtccttcataaataatacacaacaaagtattttatgatagcataccgaactctcagcataaggaggtgactcacagtgtgggcacctgtgaaaaggagccctcaccggatagtccccattatgaggcagtgttctcctgtcctcgtcactaaccaccatcagcagacactgggttacattttgtctccttcatggaagtgctttaatttatttcaccaatcacaaaaccttcgtgaaatatcaaaaggcaacacaatgcagaagagaaggaatacaatggcaggagtcataggacatgtttttccgtctgtctttgttgctgactcactatgtgaatgaaatgaagcttcttcaacttttctgagtaccaaattctccatttctaaaacaagcatagaactatctgcctgtggcctgtcagggaatagtaggtaactaccaagcattttgagctaatttgaagagtatgtgttatcatgcatttttcagacagagaaaaccagggcataggaaactgcctcaggtaagaagacagtatcagtttagaccagaaatgttggtttttccccagccttaccttttcttcagccacacctgttgcctcaaaccactgagacgggtctgtcccaaatgctacgtaaccacccttttcagatatgtagcagtatcat

SEQ ID NO: 1564006 - DNA, 4001 bp, Homo sapiens
acctttttttttttcaaacgtagaggtggtttttggaatatgggcctcaaccattacattccagctttaaagtaaaaagacgtcatgtgaccatcagagacttggggcacgtgattccaactggtatgtgtggggctccagccacttagttggaattcaccatgaactgcatctcgaggatcaagtttaggctccccagtccattgtgacatccagcaaagtggagtaagtgcttgcccctcaatggtttttacttttccctacattttctacctactgttagccaggctcccttccctcctcccaatccctcttaacaggccgggcgcccccagcatcccgtctgtctgacgctaaatggcgaggctctccaacccacttagctccaagctcaaccttctgcaaaagttcaaccttctgcaccactggggatatcgtgcagctcaggtgagaggcaaggagcatcgcataaggctagagtcagatgccattaacccccactccacctcccgggctgggatcatcttacgtcccggagcccggcggtcggaaccgccagcacactggagcagcgacggcggcagcaactttgggactggcgagaagccagggcgggggtggtcggcgtccccgggcctctcattacagcgcttaagtactgcgggtggagaaaagtaaacacaggcaagtgcagctgtgcggggaaagggcgggggggtagactattacctccctcccgtcgcccctttgcctctccctctccaagagtcgggagaggtccgggactgccgccgccccgaccgcgcgcccggggccgcaaagtcaaaggagctgaaaaaaggacagggggtgtggggccaggggagaacggaaaggtactgtcctactagcccagagatgttctcctactgaaaggaaaaaaagtgcttactcatagggagactaggtgcgttcgcgacgccctcgctaaggacaagggagggaagcaggcagaaggcaggcaacccaaacctcgtgccttccctcggccacggccccccctctccagagccccagggtcggcttaagccagccaggtcacccgaggcgggcgtgtgggggctggaggagtagcaggctgctggctccgggatttcctgagtccgggcgggagggaagaggggatggcagtagctggagaaggacgacagagggaagttgtgcgctccctttccacttcggggccgcagccgcggaggggaatcagggcaagggctggcgtctaggactccagcccaagactggcaacaagttaagagcaactagtaagaaaacaccacttaatacagtgaagtgcagaaaacgtgtctgcggcggatgctagtagggaaactccccgtcactcacacccatttcggttgcgaccgatcgcccgggcgcccgagggctccaactgaaatttctccgacctccctctcccccaacccccgccccacggtgcgccgcacgttcctgctgagcttaaccgagatgctctccccgggacccactcctgcccacgcccaggaaacccgctcccctagtgcccgccggcgcctacaaagcacttacgtaaagtcgcagagtcctgggtctggcccgactgccgccgaccaacccactcagacaacttctgcacctcggaatctttgcagctgtggctctaaagccagcgctccctcccctcctgccagccccctccgcccctcggccgccgccattggctcgggtggtgctagcagtcggcctgggaaccaggaaggggattgggccacgagcctgtcacatcaactgggtggggatccaggaaaataggcacggggatgggcacccaggagggatagggactgcaactctgctgcagggagaggagaatggtccccagcgcctgagtctccccttcctacttgggctaagaggaagttagaagtccaacgtgcctggctcggagtacacattcacacaatcttgtgggattaataaaaagatgaaaaagttgggaacaagaatttgaatgccacctatataagtctatgggggaggggtacagtttctcccagaatcgtgagaagaataacggcatgttggggaacattcctaattacatctgcaacaatcagtccaggtgccaaagggtgcagagggaaacatcagcaatcattcctttccttaagaagtcaagggagaagaatatgggcagggcagggccctcaagcctttggcctcatgccaagtaaattgttagcccacatcacctgtctggtatgtttgtccatgcggagaggggttgagaggaggtggttggaagtacattggttccactcttttgaccggaaatgggtatcaattctcatcagtctcctttcaccagagaaaatttggagacatgttactactccccagactgccatttcttctccttctctgcccaggagatggcttccacgtcatagctgacctctttcattaatacacgtggaggttatctgcattccaaacctatggttcatcgtatatccaaaatcaactcagagagccagagtttgagggattttgcagggtcaggtcaagagactgacttgtgggatagctgtagaagaaaaagtctaagccctttcctgttccagtcgtaaccattttgttgaggaaatgtgtgcttggaaagttctgtcaacatttaaaattagttcaattaagtcgcattttacatgtaccaggaaaaaatgctgagaggctttaaaatggaatgttcttgaaaaggaacccctatttcatctgccattatgaatttccttagagaaattaatccgtagtgagtgccaaggcttcttaaaagggaagaacttggggagttcatatattgcctaaaggctagactagcagaggacttggcacgaggaaaaagccttgttaaatattaattaatgattaaccaactggaagaacttatgaaaggcacaggaaggtgaaaaagaaatgggagggcaatcatgctttcacaaacattgaatttctgttatgggagattttctactggttcaggtttgggccagcacaaaaatactgatttcaacatgttggcgttggattgaacatggagccagtgcattgccacacacatttacagtaagctcccaaatgagatttctagcattcagtaattggccaaaggtttggtgtgacttctggaattctttacaaaaaatttttagatacaggaaataggctttttcagttttctaccttttatggtgtctgtcggtcaccgctgaagagcttccacctgctcttaaacttaaaattacagactgagcaatagcatgaagggactctgtaagctaaattttccagtgcagatatatttgtctcaattacgttgtattcaattttagtttatttttcaaattctagaatttaaagtaaaaatattaagaatcctacgtatatgctatttacagttcctgtttttaattcaaaaaagcttacattggtccgagtagggtagctcacgcctgtaatccagcactttgggaggctgtgcagtgggaggattgcatgaggccaggagttcaagaccagcctggacaacatagcaagacctcatctctacaaaaaaaattaataaaattttttaaaagcttaatagaatctatactttgataaaagtcttcattcaccactatcactgaggatgtcagaattcagtcaagaaatgtcattttaattgaaatgcaatagtccatagtttcaaagctgcagtgtacctagctgatggcattagttctcattgcctcagtaactttccaacagataaaacacaccctaaacacagaagcacctatttggatgctagctgagattcctgtttaacaagctccactatataatccaggtagaactccattttaatgaatactattaagatacccagccagtttgatgtaactaagctacctttgtgttgcccagaatctaaaggatct

SEQ ID NO: 1564007 - DNA, 4001 bp, Homo sapiens
agcgtggtgtctgtcaccacgaaggcacggaagggcctgttgcccagggccccccccacggcaaggaagagcagcaggaggaggcagacagagggcatggccggcagccgcgcctggggacaggcctagggagagacggtgtgtgggagtcagaggcctcgagccacagagggctgggccattcacccaccaccccgccaaagccccagatggccaccgtgacagggagagaggaggggcctccgccagggcgcatgagtgagcagccagcgagggcaggcttgggggccatcaatcgtccctcagcccccatgctggaaaggagccaggaggcctcgcctcagctgggccacacccaagggggtagcagagcagatgctggaactgggaccccagatgccacatctcagagcccggggcaaccaacagcaaagaacagcaagccccaggcctctgggctgcccccaacgcctgagctgaggggagagggaggcaggcacagaataatcgcaagctgggggagaggggcagggccaggaacaccacctggagtggcactgccaccaggagccctgggacagaggtctggggaatggaggcctgatgcaggatccagcaccaccatgtcccctgcaggggccccagctgcctccccgacaagggcctcagctggccatccaggagcccgctgtctggcctccccgatgcaacacaaagccaagtcgcgcctgcccctcagccacgcacccagacacacatcagtcaagctctgctcagccacagcctgcatggctccccctccagacccaggggttcactggagaagggaatgtacagggggccctacctgccctttggagtcccaggagccttacaagaggaggagcaatgtccccaaatacagtcaaggccttggagagacagggcaggagccacagggacagtgctgggactggcacttagtccccaggccacacccagtcagccccaggctgctaagacagcagagcagtgtcgtggcagccaacagggcagggctcagcgctaccctctcagtgccagagctcccgggggagataggaggtacccagcttgagggcgggaggcggggggggagcggggggtggtgcagggaaccaaaccaaggaggcacaggagagagaaaggaaaaataaggcatttgccaggaacaagcagcgggcccagcttgaaactgcaaagtttcagctcagattgatcacctctccagggctcttttgtcagctggacccctcatgcaacagccggagaagaaaggaaggccaaagaaaagagaggccacatcctgtcttcacctcctctacaccccgggaacacaagcctaggaacaggctggggacaggtcgggagggagacctggggaggcagtttcaggcccagcccccacctgtaagtggcaacctcgggcatcacaggtacagctgggccagcagagagcctgaggaaggggcagccccacgcagagacgggggtccagcggccgccccccacaccccccaccgtgctgctggtccggtttgcccgggccccatcagggcacccctcggcggactcgcggagcccttagcgggagggaagtacagcgttgatcctccgaggggccgctcccctgcgacaaagggtcctctttgggcagggtgttggtcttgggttggcgtccccaccatgcggggcacaaggagtcgggcaggccggcgccgacgggcagggatagggcctgacccccacaggccgagccggacccccgggctgccggagccccgggccccgagctgtttggccccgcacggacggcgacgatgacggccacctacctgtccctccgctggctccgggtggccgccctctggccacgtggacgcgcccccgagccccaccgcggccccgctcgcacgtccccacggcctcgccccgcgccccgggccccaagcgcgcagccgccgccgccgccgcccacacactgggctggcccgggggccgccggagccttttaaacccggaccgtaccaccgcgcggggcgggggcgtccggggacgcccggccgagggggacgcggcggcaggggacgcaggcggggccgctgctccccggggccagggacctcgcgcgcagccctgacccccgcgacctgaagggggacccgcccggccagccgacccccttcgctcgatggccgcgtccgcggcgcgcgcctcccccgcgccccggctccccgcccgccgcctcgggcgaccccggaacccgcgcgcgcccgcgccacaccccctcgggcctggggcgcgcgtccgcctcgccccaccctggcgctcggagacgcgcccggggtcacctgccaccggggcgcggcctcgctggtcccggcctctcaggtgcacccccgccgaggagtcgcgtccccagctcaagacacgcccccgacggtctctaacccggagggcctgcgggacagccgtccaaaccagccccttccccggcgaccctgaaccgagggctttcttccttcccttgctttctttttccttttctttttttgttttcttttgacacagggtctcgctctgtcacccgggctggagtgcagtggtgagatcatagctcactgcagcctcgaccgccccaggctcaaacgatgctcccgcctcagcctcccaaagtgctgggactacaggtgtgagccaccgcgccccgttaaggttttctttttcatttccctgatgactaatggtgttcagcatcttttcatgtgcttgctggccttttgtatatgatctctgaagaaatgtctattcaagtcatttgcccatttttattaaacacatatatggagagatagatagatagacagatttttccccccaagttgaggtcgcgctctatcacccaggctgcagtgtagcggcattggatcatggctcactgcagcctcgacttcctgggctcaagggatcctcctgcctcagcctcccaggtagctgggaccacaggcaagtgccaccacgcctggctaacttttcctattcttgtagagagagacagggtcttgctacactgcccaggctagtcttgaactcctgggcttaagtaatcctcctgcctcagccttccaaagtactggcatatgctgggtgcagtgactcaagcctgtaatcccagcattttggaaggctgaagtgagcggatcacctgaggtcaggagttcgagaccagcctggccaacatggcaaaaccccatctctacaaaaaatacaaaaattagccggacatggtgtcatatgcctgtagtcccagctactcaggaggctgaagcaggagaattttttttttttttttttttttttttagacaaagtcttgctctgtcgccaaggctggagtgcagtggtgtgacctcggctcactgcaagctccgcctcccgggttcacgccattctcctgtctcagcctcccaagtagctgggactacaggcactcgccaccacgcccggctaatttttttgtatttttggtagagacgaggtttcaccgtgttagccaggatggtctcgatctcctgaccttgtgatccgcccatctcggcctcccaaagtgctgggattacaggcgtgagccaccgcgcccggccgagaatctcttgaacctgggagggggaggttgcagtgagccaagatcgtgccattgcactccagcctgggagatagagcaagactctgtctaaaaaaaaaaaagcactgagattataggcatgagccaccatgcctggccctcaactgactttaagtaaaagagatcacccttgataatgtgtgtgggcctcatccatttagttggatggctttaagagcaaaacccgaggtttcctggagaagcagaaattctgcctcaagactgtaacacaggccaggcgcggtggctcatgtctgtcatcccagcactttgggaggccaaggcaggcggatcgcctg

SEQ ID NO: 1564008 - DNA, 4001 bp, Homo sapiens
ccagggcgaggaagcactggggcaaggcagcgggggtgctgggagaagccaggggtgtcaagagacaacacaggcttcaggggtgcggggaggcctgctcctgccccatgggccccagcagtttgggtctctcagggcctggcacagggggcctcagtgtaggagtgtcccaggagaagagcagaccaggagagctggctgggggaggggtcagggaaggggcagggaggggtgccagactggagatggttcctgggtgtgcctggtgggaccccggggtgagcccccgagggtgagaggtgggagcagccccttctctggcccctcctgccctccacagagagatgctgccctgggtgtgtggtcacatgccgaccaggagtggggccgctgcgactcagggcagagcagcgcctggaggaaggcccaggagccgcttatctcaggaacacaggcaggaagagcacggacacttcctgcggaccccgggctatctggggcagtgtctgccatgagggaggctgcagcctgtatgtcctgggcctggccacagccatcctgccctaccctgcccctcccaggaacatttctggggacaccgggcctgggcacttaccatgaagtggtgcagcagaggggtctcctgggcggcgtggcacatacgctcagttcagctgccccagggcagtggcgatgggcatgagatggctgcgggggggcattgtcctgagtgggagggagacagtcgaggctcagccccattcgagctggcctggggaaggaggggcggcggtgggggtggcgcccagggcctagcgaccgggctccctcacagctggcagctttgtcaatagtggccaggccaaggcagccctgcctccaccacaacaatgttccctctgtccagaggccaggccagggccccactcgctagtgctgtcacccccactgggctgttctggacagggggctccttgccacttcccaccctcagggagccacccccgggatccggggacaaagggccggggtttcctccagccagccctccccctctggccctgcaacccctgtgtcactaagcatgcccctccctggctccccgggtccctgtgaagggcacggggtggaccttggagcccctgcaaatgccggctggtagccttggggcctgggtgaagtgccagtcctggccctcaatgcctgcctttgtccaaaagatcttcctccacacccccagcccagccctgcccctggggactggtgaagtggtgccaggtacagcatggtggcagcgagcaggaccacgggaggaggctgcttgagatgggctgaggcagagggtccacaggccggggctgtccaccccaccctctgaagcaccgtcctgctggcctagatgccatccatgcaggggatggggaagggaggggcacctagcagctagaccccctgtcaccctcacaggccaccctggccagtggcacaggagcaggtgcactggggatggggtctctgcctcccccacagcacggcagcagtaggctccagggcaaggtggcagtgggctgctgtcacctggctgggccagttgggtggctgtgggggtggggagccaggcgggcagcctctctaccctgtaccctgcccgaggctggcgttggctttcccatttcggggaagaaacatggttccccacctcctaaccccagggctaccacttgggggacaccgtgctcccagacacctagtgccgtcgtcaggctgggccgacacccgagcgctcttgcctgaccccagccagttggccctgagaccctgatgccttgccctgaggctggtagcccctgcaccccaagcccaagcccaagcctgccccagctcttgcctacctggtgggccaccggcgagggccaagtagcagctggcggtgccaggagcacgtctcacagagccccagcctccctccccacaatgcaatcgtgcccagtccgactcatcccaacaagcccggccaggcagcccagcctctctccgcccgcccctttgcccaatggcacagggcaggatgttgctgccctctgctggccgcagcgggcatgatggagtactgaccgtgggcacctggcaggtgagagacggcagcgccctcctattgggtgggcattccataacctggcacgaagcacctactggatgccaggcttgggcttggcactggcaccatccagaaacaaacacaggttgggaaactgaggcacaggaggttaggaaacttgaataaagtcacacagctagtatgtggcaaggctgagtcaatcacagggccccttcacttaaccgtcaggctacatgaccttgaaccatgaaccttggcaggcgttgggcaggagatggagctgaggcctaccccaggccaggcctggacgtgacatgcccacgtggcgttgaggaaaaaccagtgtttcccaccgactggaacacaaggttggtcaagggccgtctcccagggtgtggcggaggtcagcaaatcaggtggggtctttgtggccaggcttgagaacttgaacttgtctcgccatgggcaactgcaagctggtggcactggggcagagaatgtggggaggcctggtccagtggtggtcatgggcatggagagaggcgggcgcgttctagaggcgctctggggaggcagcattctgaagactgtgcgttggacccagggcaggaggcgaaggcaggagaatccaggcgaccctggggcttttctgctggggcactgttccccctgtggcagggccatccacagaggggctggcggaagtgggaggacggtaagactgaggggcccatgagggaggaggaaatggtgatggggctggggaggcctgggggtgagaagcttggctcaggtggctggagccctgggggcggccagggtatagggccaggtgttggccctggagctcaaaggcccagcagactcggggtatgggtgcttccctgagcagctgtgtcattctttccaacctgcatggagagaaatggggcacagaggtgggtaacttgcccagggccatgacctgacgtcgtttcttcagagtgcattccacagagatgggatttgaacctgggcattctggcacgggccacgctctggaccactgggccccagatccacagcttctcacctgcagccgctgaggatgtggaggcagaccaggcaggcccgtgggaaggaccaccaaaaagcgagtgagcagccggcgaggggtctctccccaacaggaaggccaggcagccttgaaggagccagggagggatttagaagctccaggaggggaggcttgggggagccagctggcctctctccctctccctgtccttccccccatgcctaccccaacacacacacacatgtccttgctggccccggatgagacagacgcctgcaatctggcatggggaatgggtttctccttcctttccacagaagaaaataaatcaggctgggcgtcgtggctcccgcctgtaatcccagcactttgggagcctaaggcagcaggatcacttgggcccaggagttctagaccagcatgggcaacatagtgagacccccatctctataaaaaaatttaaaaattagccaggcatggtggtgcgagcctgtagtcccagctacttgggaggctgaagtgggaggatcgcctgagcctgggagttggtgcctgcagtgagccgtgatggtgccattgcactctagcctgggtgacagtgcaagactctgtctttaaaaaaaaaagaaaagaaagaaagaaaaaagaaaataaatccatccacaggcagcaccattttcataaatatgtgtgtatatggcctgcatatgcaccttctacgctttctgagcagataagaggcgtggctatggcagcccctggtctgaagctggtgtaaccagaaaggatctaggctggtttggggaaccggaacatcttatgtca

SEQ ID NO: 1564009 - DNA, 4001 bp, Homo sapiens
gagccccggccttccttctaaagcccatttgaaaagcacagatcaatatcaactcactccctttgccacagggatgtgcaggcccagagagagcactgccccaggcctcccaaaggttggtggccaggcctggactagagccaaggactgcttgcacccccccatcgacctatgccccgtcccagggccccgcgaggtgcgcacctacggagcactgcgatctcgttctccaccagggcctccttgccccggagggccttcttggggatgcacttgagggccacgaggtgtgcggagccccgctcctgggccagcaccacctcggagaaggcacccctgccgcagacggggcggtgggaggtgggaaggaagtgggaagagaggagaggcaggagggagagagagtggagcggggagggccccctgtgaaggagatggggaggccctacctggccctgtgccaccccccaccaccactcacacatgccatctcacagactcactcacattcacacacccctacatattcacacacacacacatcatctcacacccactcgcgtagtcacacacacatgccatctcacacaggtacacacacacacacacacacacacacacgatcacacacgcgcgcgcacactcacgagccgagcctctcgcggatctcgtagacgctgctgatgtcctccgtgtgtttcttcagcagcagcatgtctgcaggggcaggggagaggtgatgggggtctctccccgccccgccgggggcaagggcagcttcctcctccaccccctgccaggcaggcctcagccattgccgctgcgcgctcgaccctcccctcccccgtccaggtccacacccccagacggacgcctcccagcgaggccaccgcatacacgcctccacatcccaggcctacagctgctatcccacgcaccctcccccgcaccccgaaggcgaccagcgcctggatgctgcctctctgcctccacacatccggccgctttccagaaggctccatgctcacccacgccgtccctcccccatccacacatctacagcgcccaagcccccacccccgcctagacccgccacccatggcacagcgcccacaggcacccgctgcccaagccaccaagccgcccgggatgcacctgcgacccccgcgcgcagccacctgccaagaccgcggccacccacgcggccgcagacgcagcccagccctcggcgccgcggagcagggggacctggcagcctgggccgcccgcgtcccgagctgcgtggaccgagcgcgtgcgggcagggggcgcgccaggcgtgacaggtgtgctgcggacgcgcaaggctgcggcggccgcgggccggatccggtgcgcccccgccccgcgcgtccccgcgccccggagcaggtgcagacctggagcgggtgccgcagcgtcgtgccgcgcagtggccgcagcgccaagccccccgcccgcgccccgccggccccgccccctccgcgcacgcccccgccagccgcccaagcacgcagtggcccagcgcggccgcggcgccgcagggcaccttgtaaggcaatcgccgggatccggctcgggtgccggccgccaccgcccagcccactgctcgctcgcgccgcctcccggagctgcggcccggctgggccggccccagggcctttgcaccaccggtggctgtctcccggagagctcttcggccacaggtcggcaaggctctctgccttccagtctctgccttcaccgcctctccgaggacaggctgacccggccacttgcccgaaagcagcctccatgcctagctccaggaccctgcaaccctgcaccacagctctgccaccctgggctcccggcactcactgggctccctctggctccaccattaatccctcaccctcgctttcttctctacccagcagccagagcattccttttattgagatcatgtcaccctcctgcagctctctatgtcaatccaagtcaaagcatgagtccttagggggcggcctaacgactgccctggcccctcctcctccacctcttccccggccacactggcctcctgacggccctagcctttgctcccctgcctggaatgttcttcgatcagatatctgcctggcttggctcctcgttccatcagatctcggctcaaatgtcccctcctcaaaccggcctcccccgccctgcccctgccaattctctccgcataaccctgccctgtctttagaacgtccaaccgcaaaaatcaccttcttcgcctggtcttcctcaccaaagcgtccgctcccagagagtgtatctccgcgaacccaaccaagacgagcccaggaaataagtgcgggtgaccgaattcaatcctgcatccaacagttactggacccccctcgctgctcgccatccagtcccatgaggttgtggccagcatcacaagggttccgtcaagtgaccgtgggccctggcatgacacgacgtcttcaagagagtccacggggcaggaagagtttttaaaaaatcatttttccagacctcaactcccatatatactctgtgtaaaaactgggaaatctgagaaggcccctagcagctcttgccccctggcctttcccagtcacccctcccaggacactgcagaaggctccagggaccccagcactcagaaactccagtcccacctgctcctctatgtgaaaatggtttcctgggaccgacatctaaaacagaaaaaaataggaatggaactgatggtgagccccttctcatgacagcaggaagtgcaatttgtttacagatacctacagatagttccccagaatgtctaatacgccaatggtgctttgcccaagcagagttctacaacatggtcctgggttataaaaagaaatagaaatacacatatttctgtgccccagaaaagtaataaaaaactgcccgcgtggaaagagatggcacaaagagacctatctgaggggcagcagatggaaactggaggccagaaggaaagcacccacctccaaagtgggcctgggaaagacgagccagcgggcaggtattggtccacgaggtgactcaggtggccctggcctcatgtaaaagctgatggcacagtttttgtttgaatcattgtatcatggggttttttttggtttgttattgttgttgttgtttgagacagggtctcactgtcgcccaggctggagtgcagtagtgccatctcagctcactgcagcctctgcctcctgggttcaagcaattctcccgcctcagcctcgagtagctgggactacaggtgcatgccaccacaccaagctaatttttgtatttttagtagaggcagggttttaccatgttggccaggctggtctcgaactcctgacctcaggtgatctgcctgcctcagcatcccaaagtgctgggattacaggcgtgagccaccgcaccaggcctatattgtgtgtttacaagagaaattacaccctccggcctggcaaggtggcttatgcctgtaatcccagcacttcaggaggctgaggctggaggatcacttgagcccaggagttccagcctagcctgggcaacatagcttttcttttcttttttttcttttctttttttttttttttttttgagatggagtgtagaaagtaaaaagttcctcttcaaagtttcccttcttattaaaaaataaatcataagtttagaaataatagtttcttttaaagactaacttccttcaagcctccttgctttgtgctaataactctttgttaagccctatcctatgtagctgttaaacatgcttacaggcacgtagtacattctatgtccttgtactttaaccaagatatctgtgctggacgtgctcacaggcatgtcccagctcgcagcctatctccctttcctattggggaatattattacttttctaagccgtttcgtaagcaacttcctcttttcctttatccttccattacttttatcta

SEQ ID NO: 1564010 - DNA, 4001 bp, Homo sapiens
tgtaggagatgacgcccagggcccacacatctacggccttcccgtagggtttctgctccaagagctctggggctgggggccagagacagacagacgcacgcacaggcacacacgcagccatgccgctcagtgtcactggctcggcctactcaagcccaggaatggcccacacaaaggcaacgggcacaacagccttcccggctgtctagggtcccccaggccaccccactcccagcaagcctcagggtgtcgtccctcacccacatatccaggggtcccacaggcggtgcctagcatgttcccagcctggattttggagagtccaaagtcagagaccatgatcttcgagtcctcaaagggcgtggcatacaggaggttttcgggctgtgacacacggacaccgggaaaagggccagtcagtcctgacgcggtgccggtgctgggacaggatggggactaggcactctcaggttccccagagccttggtggagcaggagatcaagaaaggccccagccgtgctcccgggaaaacaaaggcagggccaggtgggcaggtgggagggtggggtgcagaggccccagccaggcaccttgaggtcccggtgcacgatccccaggctgtgcaggtaggagacggcgccaaggacctgacccaccagatggctggcatccttctctgtgtaggagccgcgctccatgatgcggtcaaacagctcgccacccgtcaccctgggggtgccaggggtttggctgacccaggcactcagcctggccttcagccccactcactgctcagtccctccccggctcccacagcctgcccaggccctcctcacagttccatggccaggtagaggtgggaagggctctcgtggacatcctccagagcgacgatgttggggtgactgatcctgcaatggcaaggaagcgcctgtgggccaacagagtcaaggggtgctctgtcctgaggccctggggaaagcctcctccctcttctcttcctcccacctctgctccccattccctaccacatgccacccctgcccggtccaggaaggcagagctccagcctgagccccggccttccttctaaagcccatttgaaaagcacagatcaatatcaactcactccctttgccacagggatgtgcaggcccagagagagcactgccccaggcctcccaaaggttggtggccaggcctggactagagccaaggactgcttgcacccccccatcgacctatgccccgtcccagggccccgcgaggtgcgcacctacggagcactgcgatctcgttctccaccagggcctccttgccccggagggccttcttggggatgcacttgagggccacgaggtgtgcggagccccgctcctgggccagcaccacctcggagaaggcacccctgccgcagacggggcggtgggaggtgggaaggaagtgggaagagaggagaggcaggagggagagagagtggagcggggagggccccctgtgaaggagatggggaggccctacctggccctgtgccaccccccaccaccactcacacatgccatctcacagactcactcacattcacacacccctacatattcacacacacacacatcatctcacacccactcgcgtagtcacacacacatgccatctcacacaggtacacacacacacacacacacacacacacgatcacacacgcgcgcgcacactcacgagccgagcctctcgcggatctcgtagacgctgctgatgtcctccgtgtgtttcttcagcagcagcatgtctgcaggggcaggggagaggtgatgggggtctctccccgccccgccgggggcaagggcagcttcctcctccaccccctgccaggcaggcctcagccattgccgctgcgcgctcgaccctcccctcccccgtccaggtccacacccccagacggacgcctcccagcgaggccaccgcatacacgcctccacatcccaggcctacagctgctatcccacgcaccctcccccgcaccccgaaggcgaccagcgcctggatgctgcctctctgcctccacacatccggccgctttccagaaggctccatgctcacccacgccgtccctcccccatccacacatctacagcgcccaagcccccacccccgcctagacccgccacccatggcacagcgcccacaggcacccgctgcccaagccaccaagccgcccgggatgcacctgcgacccccgcgcgcagccacctgccaagaccgcggccacccacgcggccgcagacgcagcccagccctcggcgccgcggagcagggggacctggcagcctgggccgcccgcgtcccgagctgcgtggaccgagcgcgtgcgggcagggggcgcgccaggcgtgacaggtgtgctgcggacgcgcaaggctgcggcggccgcgggccggatccggtgcgcccccgccccgcgcgtccccgcgccccggagcaggtgcagacctggagcgggtgccgcagcgtcgtgccgcgcagtggccgcagcgccaagccccccgcccgcgccccgccggccccgccccctccgcgcacgcccccgccagccgcccaagcacgcagtggcccagcgcggccgcggcgccgcagggcaccttgtaaggcaatcgccgggatccggctcgggtgccggccgccaccgcccagcccactgctcgctcgcgccgcctcccggagctgcggcccggctgggccggccccagggcctttgcaccaccggtggctgtctcccggagagctcttcggccacaggtcggcaaggctctctgccttccagtctctgccttcaccgcctctccgaggacaggctgacccggccacttgcccgaaagcagcctccatgcctagctccaggaccctgcaaccctgcaccacagctctgccaccctgggctcccggcactcactgggctccctctggctccaccattaatccctcaccctcgctttcttctctacccagcagccagagcattccttttattgagatcatgtcaccctcctgcagctctctatgtcaatccaagtcaaagcatgagtccttagggggcggcctaacgactgccctggcccctcctcctccacctcttccccggccacactggcctcctgacggccctagcctttgctcccctgcctggaatgttcttcgatcagatatctgcctggcttggctcctcgttccatcagatctcggctcaaatgtcccctcctcaaaccggcctcccccgccctgcccctgccaattctctccgcataaccctgccctgtctttagaacgtccaaccgcaaaaatcaccttcttcgcctggtcttcctcaccaaagcgtccgctcccagagagtgtatctccgcgaacccaaccaagacgagcccaggaaataagtgcgggtgaccgaattcaatcctgcatccaacagttactggacccccctcgctgctcgccatccagtcccatgaggttgtggccagcatcacaagggttccgtcaagtgaccgtgggccctggcatgacacgacgtcttcaagagagtccacggggcaggaagagtttttaaaaaatcatttttccagacctcaactcccatatatactctgtgtaaaaactgggaaatctgagaaggcccctagcagctcttgccccctggcctttcccagtcacccctcccaggacactgcagaaggctccagggaccccagcactcagaaactccagtcccacctgctcctctatgtgaaaatggtttcctgggaccgacatctaaaacagaaaaaaataggaatggaactgatggtgagccccttctcatgacagcaggaagtgcaatttgtttacagatacctacagatagttccccagaatgtctaatacgccaatggtgctttgcccaagcagagttctacaacatggtcctgggttataaaaagaaatagaaatacacatatttctgtgcccc

SEQ ID NO: 1564011 - DNA, 4001 bp, Homo sapiens
cccagttcccgtttcccgactcaactgcagcctgtttcttctgctttaccaagagcaggttggaggggttgatgcactgtaccctgatgtggccgtcttccccacagctatagcagaatgtgtggcgtttccgttttcttgagcctcgagagccagcccttgccacaccaccccttcggtgttggcctctgcccctccggcgccggtagccctgggaaggcctcgcatcaaaactgttgccagaggcagggagaggtactgccccaaccccagtgatcctggcaggtggccttggggctacttccagcccctccagactctccctatctggacctaaagtggcctcccattcctcctcctcacgcaggagcttcaccagggccaggaaaccaggaggcttccttcgctgtttcatcagcttaagcttatctcggagtttgtcaggaagggtggccccacttaagactcgtttcaggcgagtctgattcacgtttctacgtgataccacattgttttctacagctctttggagcaggggttccaaacgtaacacaaagctagatactttctctcctgcctcctgataggctttacacaacttcacctgggcaattttatggctctccacaggtccgaacacctgctgcaaggcagccaggcactcctccacagttatggaagcattgctggcccggagcccactgaccacctggagagcagggccccgtaagcattccatcagcctccgcctcttttccccctcgggcacctgccacatctgtagcatctcagtggtgtgctcaagccaggcatcaaaggccagtgcacctgggatggatatggtgttcccagaaaacactcttagttctcggtacaacatttgttctagcagaggctgcactgctgcccccagagtctgggcccaggtccagaactctggtgatatagtcactcttggagccgaacaattggtgtccgacccgaggactcggttcatatctgacacggtccgcctctcctcctctaagaagcggttcagtctgttgagaaattccccatctgagttacggggttttacaatcacttcccagggccccccctttcctggtatttcccttgggagcaaagcatagtcgatatcttgtgccagctccagtagaatcgcctgggcgttctcctccctcctaaacatcctgccaatcaccctgtatctgcccaggtgcctgcaagcctcctggagtgtctcctcaaactcatcctcgccacagtcctcggggatccccaggatgagcatgcacctccgggtgttcaggtgttccccccgacaccagtcctgtaacaaggtcaacggcatgtcctcgaatctctgcggatactaatttggggggagtgatcagggcgtgaggcacatatctggatcaactcctagggtgatcgcagaaggcccaggtctccacagcctgtgaatgcgagcagggcgagagcgaggttaatgcccacctctccgcacgcccacatccacgcccacccccacccccacccccagccgccctcctccccgggcggcgcctctgcagccaggccccgcccctgcccagccccccacccccaccccccgtggggtctctgcgggcctcagccccctccccgcgctgccccaggaccctggacccctgccctgcaggctgcttcagttctgatagggcggacaggcgaggggcggcggagtctcccggggcccagcgtctccctccccaggtgggtctgttaccttctcccagggcaaggtcccttctggtcggggtccccagagggctctccgggggctatgcgcggcggcggcggcggcggcggacgggggtcgggcacccctggctcccagcgcggacgttcgctcagactgtggctctccctcgctcgcgcagcacgtgggccagtgcgccggcgcctgctcgccgcggctctctgcagtgcggacacggggcgggggcgcggcggcggtgcagcgcggacccctccgcgtcgtccgggagaccgcagggccattggcgcggacgggtcacgaggtcgggctctcgccgccgcccctgggggccccaggtccccgggtgacgtcacctgctcctctcccctagcccccccgccacgggggcccccgggcccccgggcacacaagcgcccgcccacccccatccccactgcggtggccaaaggtctgtggcggccagtccccgtgcctttggctctcaccacagcggttcctggtcccggctcctgcccctcccgcacgtgccacggaggtgccagcggggcgaggggtctgcaccccggcgtgcccaccagagggccagggagtggtctgaggtgcgccaggcagctctgcattatggccagggtcagggagccgggttctggggcctgttcacctgctcttgtcctccccctccccgtccaggactggtcctctggctggcgaggccaggggcacctggtgcgggtgccattccgtgcaggagatgccccaggcactcatgcaggtcacgcacaccaccccaaggagggtcagccatctccccgctgtccatcccgctgctgggacctgaggccctccggccaaagcgcttcgctgcccaggtgccagtggacaggtttaccgggacctttccggttttgtgcgctgcaaatctagtgacttgggaaaccacttccaggacttggagcccaatcccttgggcctgcccttccttggcagccgtgcgccgtgggttctattgtatccgtttgatcccagggcagcagccaaatgaagaagggagtgactgtccctcaggcagtgggcccaggtgttctgtgggtcctgcctgctctgccagccgcatgctcaactcctattcacacagcttcagctcctctccaaacacaacgaaaaggggcttgtggttgattttcaggccaggttcacccatccagccaagtctgggaggccaccttgcagtgagtggggcacaaaactgtccactgacttcctgccccaccctgagttctgctcgtcagcctggcacttgtcagggaccaagaagaaatggccccaagggctttttcctggtcagacagaattcctgaaacatctttacaggagttatttcatttgctcctcaccagaactctgaagcaggtattaacattatcctgatttgactcatgaggctcagagagattaagagacattttcaaggtcacacaccgtattgaaggtagaattgagactggattctaaattagtgcccatcagtctttgggtagaattgggactatttctcccctggttgcttcatgcctattagaatttatttctctcatttttgtccattcacagtcccttgctttgtcactccaagggctcaaccagcttcaaactgaaccttcatctgcccaacttgcaggggtggaaacagaggttcagagaagggacactactggcccaaggtcacacagtgagtaaatgacaaagcttgagatgtcaaggggagatgccaagtattcatgccaaggcagaggggcgtgtctggaatgtctccggaaagaagcctgtgaagttcccagacagacgcagtgatctgtggatgttctgggcattgggaaaaaaggatttggaaacactggtatcaagacaatagatgtgaatatgtccaatttgaaaagttttagaactcctttatattggagttaacctttgcccttgaaaccagtggaaatgtcttaattacttttgcttccccatctccttgcatggtagataacacagcagcaccaaagttggggaactgatggataaacattattacttgtaaagtgaaaaacataatacagcatgaaggaagcaacctccaccggggtggccttgccctggcttagaccagtagtgactatcggggtcacaaaaggggcagattcatgggccccacctctgcaatctgatctgctgagtctgaaacaggcct

SEQ ID NO: 1564012 - DNA, 4001 bp, Homo sapiens
ctgccaggggaaggagtgcttcggtcttctgagcctatgtttcccagggcttgggatggctcatggccccagcccctgcctcgtttcccaactcctctcctgcagcctgtggcccctccctgcctggagtctggttttcagccttgggatacgtggcctggccatggtcttctcccctagtgctttcactgcctaacagccgcctgcgtttcactaatgggggtaagcctccctgtatggtctgggggctgctgtcgctaaaagaccttgcctgcacggtggcctgaggtgcagagacactggcttctgctcttgcctgtctaccggaggccccccggcctctccctgatggcttctccttattcttcatcactgcctcagtgttctcccactcttcttcatctcgaatgagcttcattaactccagaaaattgggaggacaccctcgctgatccaagagctccagcttgcccctgagggcgggggtcatggcgacccgagctaagagatgtttcagacgaatcatgtctgtgctgcgcactgacaaggggctcttgtgcacggctttctgcagcaggggctctaagcgcagcaggaaagtggagactttctctccaatcttcggagaggtctgcagaaacctaaactgagaggctctaaagtcctctttatccccaaagatctgctttagggcgtcaaggcactgctccacagttatggagtcattgttggcctggagcacccgcatgattgacagagcaggcccacgtaagctctccagcaaacgccgcctcttctccacctcagacacttgccatatgggcattatctcagtgacctgctctagccagtcttcaaaggtctcttcgcctgggctaggggaagcagttcccgaaaacactttcagtttcctgtaccacatactttctttcggaggctctaaaggtggggatctaacttggggcatgacctctgcatccaggctctcggcagggaggctgcaacatcccagggctctggccacatctgtcatacttcggccctcatctttcaggaagtagttcagtctactgagaaactcatcatctgggttacggggttttaccaccacttcccaggagccaccctttcctggtatgtgactgggcagagtagtgtaattgacagtgtcagccagttcaatgaagactgccttggcattgtcttccctcctgaacattctccctaggaccctgtatgcgcacaggggctgtaagcctgccttcacagtgtcctgaatttccacctcactacactccatggggatgcctacaatcagcagggcctttctggggtccatgtccatccccttgcaccaatcctctagcagtgtcagtgccattgctcccactttctatggactgatctaatactagggcagcaatcagctcagtttgacagcactcaaataactctgagccactgccacgtaggaaggcagaagtggtcccaggtttcacacagcctgcaaagcaaatgggatgagagcattgttaatgcccaccccaacctacgcccccaagcacccctcctctgcccccacccccaagcagggatggagtcctttcttcccagggttccccaagtcattttggggagggtagagtgtggaggttctccccaggcaaagatctccccatctcaccactccctgctgacttcctcctgctgtgggttcttcctcaaagtccagaggactctgctgtgtgtgcttcgggtgcctgtagtgaaaaggccaacgtcaggaggcagggcctgacacctggggacactgacgagccctccaggcagaagagggcaggagacagcctcactgctcactcggggctatgtgggctcaggtcacccagcaccctccttgctggagtgaaggctggcagcaagagaggtagagtggccctctttctcaggaatgcctgacggatgagaaagatggctgagctctgcgcaatgcaatgagagtggtgggtgtggagattgtgtgacaagctgcagtgttgccatggatacagagaataccatggaccatgggttgctattgcaggggagtgtcatgtggtaaggccaaggtccttgaaaagcaacaggtgatgtcattggcctccaaccaataaagcgtactagcaaaaaggagggtgggagagggaaggcgagatgggcatgaggagtgagtgctgaaaggacaggagctcatggtttcaattgtgtggaagctgaaatcaggcagaaaagggacccagataaggtccccactgccagactgcaggaaaccaacaactcttgccctagagatggccctaccctgcagagtctgtgaaccctggcaggcagtcccctctccccactctttgccagggttccagagcccctcccaacagggcccaactcacagctgctcaccttgctgggttggccctgctggcagcgcggatgctgcaataacacagccacttcagactcgctctgcttttcaactctatccagttaggcagttcctgactcaggcgtgatgggtcctgcttcactggatctgtccaaggcaaagcagaggtattttgctgtgattctgtcccacacacatgtccctgcccaggccatgccaattcagactctgcataggtgttcactaggaccctggtgcagggatagaagaaactgctcaactgacagagggagcggagcggggggaggagtcgggggacgaatggtgagaggggtgggaggtgaggagggaggtagggggtgggggcaggggggctgctggtagggcagaagggatcctaaggtaaggttgctgccctacccccactgcaaactccattccctcccaagctccgcccctacagccatgttgcaacccttcctaagccccacctcaaaacctgcacccctgctgccaaactctgcctataactaagttgcacctctaccccaagcttagccccccaccaagtctaaccccttccaccacccaagtctaactcgtgcctcaagccctgcccccacccacagtccaactcctaccccaagccctgccccctcaccaagtccaactcctaccccgaggcaagtctaactgatatccccaaatcccctacctccattcccctgctccccccaatccccacccggttatctacatacacccacaccaccgacatcagtggaagcaggcagaatctaggaggggaaggttcgaagccactttccctcaagggcaagggccaagagctactatcctgactgcagtgtctccgggcaggtcaagggtggaataggtctccctgaagtttgtttgtttttctctgaaacggagtctggctttgtcacccaggctggagtgcagtagcgtatctcggctcactgcaacctccgccccctgggttcaagtgattctccggcctcagcctcctgagtagctgggattacaggcgtacaccaccacgcccggctactttttgtatttttagtagaaacggggtttccccatgttggccaggctggtctccaactcctgacctcaggtgatccacccgcctcggcctcccaaagtgctgggattacaggtgtgagccaccgcgcccggccaggtctccctgaagttctgcctggaaatggcagggattccttggcgtgctgggtgtgatctagtgggatcccgcctccagggaaacctatggccaccagcccctagaccccgtggaaaatagcaagagttactggggggttcccccgtaatctgggttgctgtccgagcccggggtccagctccgtacctgccggaggtgcctccaagccggagttcccgcgcagcgcgaccaccacacgtctatggcggctgccgcctccgtgctgactgcgccacgaggctgtggcgggaagaggttgtctggtgacgaccgcccccctaccccatgagcggaactgcacacggcccgctcacggttgcgcactggtgacat

SEQ ID NO: 1564013 - DNA, 4001 bp, Homo sapiens
ggctggcagcaagagaggtagagtggccctctttctcaggaatgcctgacggatgagaaagatggctgagctctgcgcaatgcaatgagagtggtgggtgtggagattgtgtgacaagctgcagtgttgccatggatacagagaataccatggaccatgggttgctattgcaggggagtgtcatgtggtaaggccaaggtccttgaaaagcaacaggtgatgtcattggcctccaaccaataaagcgtactagcaaaaaggagggtgggagagggaaggcgagatgggcatgaggagtgagtgctgaaaggacaggagctcatggtttcaattgtgtggaagctgaaatcaggcagaaaagggacccagataaggtccccactgccagactgcaggaaaccaacaactcttgccctagagatggccctaccctgcagagtctgtgaaccctggcaggcagtcccctctccccactctttgccagggttccagagcccctcccaacagggcccaactcacagctgctcaccttgctgggttggccctgctggcagcgcggatgctgcaataacacagccacttcagactcgctctgcttttcaactctatccagttaggcagttcctgactcaggcgtgatgggtcctgcttcactggatctgtccaaggcaaagcagaggtattttgctgtgattctgtcccacacacatgtccctgcccaggccatgccaattcagactctgcataggtgttcactaggaccctggtgcagggatagaagaaactgctcaactgacagagggagcggagcggggggaggagtcgggggacgaatggtgagaggggtgggaggtgaggagggaggtagggggtgggggcaggggggctgctggtagggcagaagggatcctaaggtaaggttgctgccctacccccactgcaaactccattccctcccaagctccgcccctacagccatgttgcaacccttcctaagccccacctcaaaacctgcacccctgctgccaaactctgcctataactaagttgcacctctaccccaagcttagccccccaccaagtctaaccccttccaccacccaagtctaactcgtgcctcaagccctgcccccacccacagtccaactcctaccccaagccctgccccctcaccaagtccaactcctaccccgaggcaagtctaactgatatccccaaatcccctacctccattcccctgctccccccaatccccacccggttatctacatacacccacaccaccgacatcagtggaagcaggcagaatctaggaggggaaggttcgaagccactttccctcaagggcaagggccaagagctactatcctgactgcagtgtctccgggcaggtcaagggtggaataggtctccctgaagtttgtttgtttttctctgaaacggagtctggctttgtcacccaggctggagtgcagtagcgtatctcggctcactgcaacctccgccccctgggttcaagtgattctccggcctcagcctcctgagtagctgggattacaggcgtacaccaccacgcccggctactttttgtatttttagtagaaacggggtttccccatgttggccaggctggtctccaactcctgacctcaggtgatccacccgcctcggcctcccaaagtgctgggattacaggtgtgagccaccgcgcccggccaggtctccctgaagttctgcctggaaatggcagggattccttggcgtgctgggtgtgatctagtgggatcccgcctccagggaaacctatggccaccagcccctagaccccgtggaaaatagcaagagttactggggggttcccccgtaatctgggttgctgtccgagcccggggtccagctccgtacctgccggaggtgcctccaagccggagttcccgcgcagcgcgaccaccacacgtctatggcggctgccgcctccgtgctgactgcgccacgaggctgtggcgggaagaggttgtctggtgacgaccgcccccctaccccatgagcggaactgcacacggcccgctcacggttgcgcactggtgacataaaccctcctacttcctgcaaggtggttcctcaccccacccacccccgtgccgacgacggtggcagccaggctcgccacgtgccatttggcccagcagccactgtggctcttcctcattggaggggagctgtggcgtcccaagcccatgggtgaagggccgggtgcaaatcacccagtgcaacgtataggccacgtgagcgcccttataaacgagtcatagccctcgtttattttttattggactgttctaggggaggagggcaaaaaatacagctactgcctgcatttcacaagggcattagttttttttcgctgctcactgagagccagatgactgaaaatattccattctcccattattctcctgatttcacgaccaaacattacgcacctagtacccaaactgcttcctgtcgtttcccaaagcaggtttcttccacagagggaaggtcctgcggcttgcagcggcccgaaagtactgttccagaaaagggtgtgggtgcggcacaggtagcacacttcaaggtgcacacaaatcccctggtaatcttaaaaaaatgcgtgaagagatctgaggcagggatggttccactgaaagctaggttacttgctgcatatccctgcccaggctgtgtggagcaagggtctgaagcctatgattacatttcagggccagaagttgtggacctttagtgacagaatatatttgtttttctttctctgtgattaaaaaagaaaaggctttttctggtactgttttaataaatatgttaaaagcggacaacattttaaatttatggtcactgagaaagatatttgcagatatcaccttcttcagccaggtgtggtggctcacacctgtaatcccagcactttgggaggccaaggtgggcagatcacttgagatcagcctggccaacatggcgaaaccccgtctctactaaaaatcccaaaatcagctgggtgtgtaatctgagtagctgagtagctgtaatcccagctactcaggaggctgaggcacgagaatcgcttgtacctgggaagcagaggtggcagtgaacccagatcacaccactgcactccagcttgggcaacaaagtgagagcctgtctttttttttttttttttttgagaaggagtctcactctgtcacccaggctggagtgcagtggcgcgatctcggctcactgcaagctccacctcctgggttcacaccattctcctgcctcagcctcccgagtagctgggactacaggcgcccgccaccacgcccggctaattttttgtattttttagtagagacagggtttcactgtgttagccaggatggtctcgatctcctgacctcgtgatccacccacctcgacctcccaaagtgctgggattagaggtgtgagccaccgtgcctggccgagatcctgtctggaaaaaaaaaaagacaattcagagcccattaaatcaatctccttcatgtgacaaggagaaaatagtgctgaaagccattgcttagctgcctggtatcacaacatcacagaaggtgatgttttggaaagaggttctgcctcagtcacctctgggctactgggtgctcccctggccagacgtatacttcaattcattctatttctcactagaagactagcttcctctctctctctcttttttctgtctcagtctgttttgtgcttctataatcaaatacctgagactgggtaacatataatgaacaggaatttatttagctcatgtttctgaaggctgagaactctaagatcaaggggctgcacctgctgagggcctggcatgcaggcatcaagacgtgaaagcatgtgtaagagtgagcaaaagaaagagaagaaaggggcctaaactcattttttaaaaaaaaaatcaggaactcactcccaca

SEQ ID NO: 1564014 - DNA, 4001 bp, Homo sapiens
ccgatcccgatgtggggtgagggaccggccctggccccgcctccgcctgtctccagggccctgctgcctgagaggaggagaggaggccccggggccctcggagcctatttgcccggggaggactcgcgctgggctgcctccccagccccaacctagttatcacattcctccaggacgggcttgagcccctcctggaggagctcctcagcctcctggcctcctgcctggaggaggccctctggctcccgaccaggacctcctgggaccgcctctactttagtgctggctctggcaacagcctgggcaccagcccgggcaccggccccttcctgtgtctgggctctcacgctcctggctagactggcctcccatgcctcagactcccgaacgagccccagcatctccaagaaacttggagacctcccggccattctcagcttcctcagtgcttcatccagaggctcagtaaggtgggccctggtgagcatctgcctcaggcgcacgcggtcggcggatgctctggccagggcctccttctccatggccttctgcagcagcacttccagccgcaacacgaaagctgagagacgctcgcctgactgctgctgagcggtcagacacttcacccggatggtcgcctgggactcgttgtctccaaacacctgggccagggccgccagacagtcctgcgccgtcctggcggggttctccgccaggagcgcgtgcacgagctgcagggcggtcccacgcaagccttccagcagcctcctcctcctctccctttccgagaccccctgccacacatgcagcatttcggtggtgtggtctagccagacctcaaaggactcctcccctggggctggctggtccctcccggaaaacacgcccaggctctggcacctcacggcctccacccagggctggaccgcctgaccgatggatcgcagccagcacaccctgcgcagccccacacccagggcgccggccacgctctccaccatctgcccctcttgctccgggaagtggaacacgcgaccgagaccgagaaactcctcgcctgagcaacggggcacaaagaccacgttccacgggcccccagtgccggggatttccctggggaccaaagcatagttgacttcccggtcgagctcgaccagggccgcggtggcattatcctcctctcgaaacgctttgcctagcactgtaaagtgtcccataggcctcagggcagcctcgagggactcttggaattcggcatcatcacagtcctccgggatgcccaggatgagcaggcccctgcgagcgttgacccccatccaccggcaccagtcctgcagcatggtcaccgccatgcccgcgattctggccagtgccgggctgacacgaggggcaggatagggttcccagcgcggaccagggtggcacggggcggcgggggtgtggggggatgaactggggtcggagcccaggtctccacagcctgtgaatgcgagcgggcgagagcgaggttaatgcccacccctccccacgcccacgtccacgtccacgtccactcccacccccagccgccctcctcccctggccgcgcctctgcagccaggccccgcccctgtcccgccccgcccccccgggggggtggtccctgcgggtcttggcctcatccccgcgccgcccccggaccccggaccccggaccccggaccccggaccgctgccccgcaggctgcttcagttctgttagggcggacaggcgaggggcggcggagtctcccgggacccagcgtccccctccccgggtgggtctgataccttttcccggggcagggtccctcctggtccgggtccccacagggcgcgtcgggggctgcgcgccgctgcggcggcggcggggtcgggcgcccctggctccccgcgcgggcgttccctctgactgtgcctctccctcgctcgctcggcgtttgggccggtgcgcaggcgcctgctcgcagccgctctctgcagtgcggtcacgcggccggggtgcggcggcggtgcagcgcggacccctccgcgtcgccggcccgggagagcgcagggccgttgccgcgggcgggtcacgtggcctggctctcgccgccttcccgagcgccccaggaccccgggtgacgtcacctgctcctatcccctagccccacccccactcccctcgcgccgcgggtcccgggaacacaggcgccagcccacccccacccccaccggggtgtccaaaggtctgtgggccgcaggtcccagcgcctttggctctcaccacagcggttcctggtccaggcctctgcccctcccgcacgtgccccggaggcaggcgccagcggggcgacgggtgtgcaccccggcgtgcccaccagagggccagggagtggtctgaggtgcgtccggcagctctgcgttctggccagggtcagggagccgggttctggggcctgtgcacctgctcttgtcctccccctccccgtccaggactggtcctctggctggcaaggccaggcgaggccaggggcacctggtgcgggtgccattccgtggaggagatgccccaggcgctcacgcagctcacgcacaccatcctacggagggtctgccatctccccgctgcccatccggcttcagggacccgcagccctccggccgaagcactttgctgccctggtgccaggagccagcacctaggagggtgacccagcacccaagtatgcccgggcctcgtccgttttgcagccgcaagtcccgagtctgggtctctgcctgagtgtgtgcctggaaaggtagtccgcgcggagtgggctactcaatttgtcccctgccccctgtgccctcaccagcctgatgggctctgggacattgctctcttggccctgagggcagcatgggtgtcgtacctccctggagacctccgtctgtcagggcctgagtcagccttccataggtccttccccagtcctctgttgccggggctagacactgcgccagggcagagcagcctccgctcaaaacagagattctgcgcccgtggatctgaccaccctgcacctgacccatcatgggaggctggggccatgtgaacagcatctccaccaggcaggtggcaaacaggttcccacggggtcacacctctgggtgtcgttccctcatccccttctctttccttgcctgacctcctgtttggcaacttgctggccaaggtttcccccaagcgtccagctcgcccaagctccttgctgaatcacagccccagagtatttgtctatgaccctggggatggacattccggtccttcccactgtttggctgttgcagacactgctgccagtggcatcccgcatgcctgtctgagccaccaccgtcagccagaaagactctggggtgcacagcaggcagtggctctgctgggacttgggctgtgcctatcaacgccacaaccaagcattgctcatctgtgacctccggtgcgtggctgaacccatgttccctcgcactggcagcgtgggagcggtcctgggttcctacagcccgagcagcctttggtcctgtccagcctcgcctgcttgcccatcccacggggagagacaccacctcatcgctgtgtgccttgcgtttccccgagcggtggcgaggtcgtgcatcctctcactggccgttcctggttcctcttctgtgaatctcctttgctcctttcctcctcatctcgcagatgacaggcgtcatcggcccgtttccaggagaaagttcctagcgtcaagatcgaagcctttctccttttgtgatataagccatggccagtctatcacgttgcccagaagcaggtcgcattggagtgggcctcacaattagactttggcttgcccgtatggttgtgaaaggtttcagaatcaagatggagtcacttgttgttcaagcaaacaaaaatccaaaaacctgacaaatagagctgtggagggccacctaggcagggttcccatgcacgaa

SEQ ID NO: 1564015 - DNA, 4001 bp, Homo sapiens
ctatcacccaaaataatcttttccacaaccagagcacagatccctaataattacatcttaagagaaaagtcctaatcctttctgtttccaagcaaacgattatttctctgcagtgttaacttagtagagtcaatgctggtgtttgcctttgggtcttaatttcttgatgaggaacacagcctaagttactacttaattacctctattttttctggtgctgttagcagaacagaagcaaccaacgatcccgcagacgccccagcgaaggctttgacatccttcacaagttttttgccatgtctgcaaagtgcagatgctgcccccaagtggtaaatgcccagaaatccacacgctgcaaatgataggttgatgtgcttcattctagctgtagcactggcaatacaaaaaacaaaaatgctgtaagttggaatagtttatcccacatactgtgtagtcttatgttgatcatcgttccaaggctttcttctaacatcattctctgttttaagcacagtggtttcaattaattctaattaaacacaagaatctttcaaggaaaccctttctttccctcctcaccttgacccaagtcttatacattaaaacaaaacaaaacaaaaacattccacatttattcggtacatagattatgaatctacgatttaattacttggcaggaaacagacgtataaattccagttgacaagggcatttggtcttttctcttgaccctttgaaacgttttgcgggtgggggcggcactaccattatgaaacagaaaattattagagaccgtatcaaattccaaatgaacaatacatttgttcttggtaagtgtatcagaagatttcaaatacagttccctactccccttcccaatttctattgtgagcacccatgcttttatgaacgccaatacaattactcagtaacgcaataagcaatcactcaacaatgcaatacatttctttgccaagtatctcaacacaaactgaggtcatgcctggtgaaggcaatttaaggctctatgaaatgtcagccacgccactttatacttggaacacatctaaatacaaaattacatgttttcctatgcctcagtgcgcacaatttgcccaagtgaatgaaattgtgcctccacaaggctgtccattctgaaggtctcagggtttccttgggggcccaagggccccattcagggaccccaagatgaggcacattacagggcctcgaatttagggacctaagaccgcctgttcctgatgcacccggccaggccctgtgagggcaggtggctcggccgccgcaggctgcgctggcgtccgcgtaggctgagtcccagtcatcgatccggggtcaagccccagttttgattccacttctgcaaatggggacgggaagggggttgggtgtgtagcaaccaggcggccaggcccagccagcacaggctcagtgccctcccgcggcttggaggccggcagggccggggtggtccccgcatcagtcccgcaggagcacacccttgctgggccccagggctccgtaccaatgcagccccgggacacttccgtgttgaacgagtccctttaaccagatggcggggccgggccgtcactcaacgccattccgccaccaaggccgcgctacgctctccgcgagccggcccaggaaagtcctgcggcaggggttggtaccgcctcccgcgcaggtatgtgacgtcatcgcgccgacgaaggcgcccgctaggccccgcctgctctatttaaacttctggactcaacctggccgctagaccggagcgtcctccagcgcaggcaaggattcctcgtttagagtcatgttatcttcgagtacctagagagacattttaacccacaccctagagaggcgttgtaatccttacgtgtcttttaacgctacttggcccttacctgcgagcaactgacctttaataatcctcattttctgtgccccggaagtgccttaccctcttcgcgtctgtttcccggaagtggttcttctccctctccaccctttcgcccgcctgggcggtccagctgcccctaggggccaactccagcggctattttggggctggacatcccgcagcttttcaaggcgtgcctttggtttttttaagaagtgctatctaaaggaaaagctggactatgactctggggaactttcatatcctcagttgaccttaggctgtgtgaccttgagcaggtagcataacctctctgagtttcccgcgtgccttatgtgcagattgagatgctaaaatgagagagctaaattggaaagctttttccacatagggggccgtgagcaggtggctgttttgtcctctggcacctttggctcagacttaagcagcttcaacgaccgccaagatgcctgccatgcccaccaagatttaaaggactctgataattctttctctccccaaacggtgttttccttatctaatcctaataaccaagcctggaggaatccctgacttcgtgattgaaggctctccaggtcccctagtttaagggcagagatttactttctctgaggctacaaaggagcgtctgcgagaatgtctctaccttagacaaaacagggaggaggggtggagctctccaaattgcctctggtttgggctttttctttctgttttggtgtatcgtctctggccaacaacacctgtgagtccttgatgtgacgattagggaagatgtttttaattcacataactattctttagagaaaattgatcctgaaacaccttattgccttatcgtagaatgactgcattactcagaattctttacctctaccggaatttagtgaagggaaggcacaacgtacattaggaaaatacaggacacactccagtccttaaaccttccacaatcttctagctctttaaggtcgagtgtgatcctccccagaactgcatcttccaggaagctcatgagaaaggaaggatcccaggtcccatctctgatctgagtcggcatctgcgttttaacagaatcctgaagcagtggtctaactcctttggtggtgttattgtttgcatgtatacctccaaaattcacatattgaaatactaacccccaaggtgatagtattaggaggtggggcctttgggaggtaattaagtcatgagggtgaagccctcatgaatgggattagtactcttagaaaagggaccccagagaggtctctttccaccatgtaaggataaaagtacacggagaagatggcaatctgcaaactggaaaagggccctcctcagaacctgaccatcttggcaccttgatctcagacttccatcttccagaactgtgagaaataaatttcttttataaacactcagtcaatgctactttattatagcagcctgaatggattaagacaggtggtctggtttaaagtgatgtggtggcatcagaagtttaaggagagactggatttacagaaccagaatctgggatgctgtttacagagcaagttatttcctgcatttggacactgtcagcaggtcgattcaggagacaggtgaaaactttatcaccgggcagcctggatgaacaccacaactttgatatctttcacttaaaggaaagataagggcatccactatttctacacctggctggcagagtgagagctcaccaaaggtaagtctctttggagcagcaaaatgctccataatttaactcttaaaattttaaatttatttcctccttactcccttcaatcccgtatcatatctccatgtaactagttaaaagttcagctctcagctgggtgaggtggcatgtgcctgtagtctcagccactcaggaagctgaggtgggaggattgcttgaacctaggagttcatcttcagccagagcaatgtagtgagacctcatctctaaagaaaaaacaaaaaacaaaaaaagttcagctttctaatgtaaggaaggatatattcattcacatttgtctttgtcatctcatcg

SEQ ID NO: 1564016 - DNA, 4001 bp, Homo sapiens
acttctggataaattgcttggaactcagagcttcctcttactgtgagaattaaaaaagaattaaattcctataccattccacttaatagaaactgcatgcccacattttaatttatgtatctatttctaagtagcagtgaggtaagacttgttgcccacatgttcaaggccttgaaaacaggccccatgctcttctcatgatcatagaaagaagaaatatcctttgcttgaaaggaacagagctggaatcttaaggataaataaaaactcaagagtaatataagtcattttatttccttatttcactatcacccaaaataatcttttccacaaccagagcacagatccctaataattacatcttaagagaaaagtcctaatcctttctgtttccaagcaaacgattatttctctgcagtgttaacttagtagagtcaatgctggtgtttgcctttgggtcttaatttcttgatgaggaacacagcctaagttactacttaattacctctattttttctggtgctgttagcagaacagaagcaaccaacgatcccgcagacgccccagcgaaggctttgacatccttcacaagttttttgccatgtctgcaaagtgcagatgctgcccccaagtggtaaatgcccagaaatccacacgctgcaaatgataggttgatgtgcttcattctagctgtagcactggcaatacaaaaaacaaaaatgctgtaagttggaatagtttatcccacatactgtgtagtcttatgttgatcatcgttccaaggctttcttctaacatcattctctgttttaagcacagtggtttcaattaattctaattaaacacaagaatctttcaaggaaaccctttctttccctcctcaccttgacccaagtcttatacattaaaacaaaacaaaacaaaaacattccacatttattcggtacatagattatgaatctacgatttaattacttggcaggaaacagacgtataaattccagttgacaagggcatttggtcttttctcttgaccctttgaaacgttttgcgggtgggggcggcactaccattatgaaacagaaaattattagagaccgtatcaaattccaaatgaacaatacatttgttcttggtaagtgtatcagaagatttcaaatacagttccctactccccttcccaatttctattgtgagcacccatgcttttatgaacgccaatacaattactcagtaacgcaataagcaatcactcaacaatgcaatacatttctttgccaagtatctcaacacaaactgaggtcatgcctggtgaaggcaatttaaggctctatgaaatgtcagccacgccactttatacttggaacacatctaaatacaaaattacatgttttcctatgcctcagtgcgcacaatttgcccaagtgaatgaaattgtgcctccacaaggctgtccattctgaaggtctcagggtttccttgggggcccaagggccccattcagggaccccaagatgaggcacattacagggcctcgaatttagggacctaagaccgcctgttcctgatgcacccggccaggccctgtgagggcaggtggctcggccgccgcaggctgcgctggcgtccgcgtaggctgagtcccagtcatcgatccggggtcaagccccagttttgattccacttctgcaaatggggacgggaagggggttgggtgtgtagcaaccaggcggccaggcccagccagcacaggctcagtgccctcccgcggcttggaggccggcagggccggggtggtccccgcatcagtcccgcaggagcacacccttgctgggccccagggctccgtaccaatgcagccccgggacacttccgtgttgaacgagtccctttaaccagatggcggggccgggccgtcactcaacgccattccgccaccaaggccgcgctacgctctccgcgagccggcccaggaaagtcctgcggcaggggttggtaccgcctcccgcgcaggtatgtgacgtcatcgcgccgacgaaggcgcccgctaggccccgcctgctctatttaaacttctggactcaacctggccgctagaccggagcgtcctccagcgcaggcaaggattcctcgtttagagtcatgttatcttcgagtacctagagagacattttaacccacaccctagagaggcgttgtaatccttacgtgtcttttaacgctacttggcccttacctgcgagcaactgacctttaataatcctcattttctgtgccccggaagtgccttaccctcttcgcgtctgtttcccggaagtggttcttctccctctccaccctttcgcccgcctgggcggtccagctgcccctaggggccaactccagcggctattttggggctggacatcccgcagcttttcaaggcgtgcctttggtttttttaagaagtgctatctaaaggaaaagctggactatgactctggggaactttcatatcctcagttgaccttaggctgtgtgaccttgagcaggtagcataacctctctgagtttcccgcgtgccttatgtgcagattgagatgctaaaatgagagagctaaattggaaagctttttccacatagggggccgtgagcaggtggctgttttgtcctctggcacctttggctcagacttaagcagcttcaacgaccgccaagatgcctgccatgcccaccaagatttaaaggactctgataattctttctctccccaaacggtgttttccttatctaatcctaataaccaagcctggaggaatccctgacttcgtgattgaaggctctccaggtcccctagtttaagggcagagatttactttctctgaggctacaaaggagcgtctgcgagaatgtctctaccttagacaaaacagggaggaggggtggagctctccaaattgcctctggtttgggctttttctttctgttttggtgtatcgtctctggccaacaacacctgtgagtccttgatgtgacgattagggaagatgtttttaattcacataactattctttagagaaaattgatcctgaaacaccttattgccttatcgtagaatgactgcattactcagaattctttacctctaccggaatttagtgaagggaaggcacaacgtacattaggaaaatacaggacacactccagtccttaaaccttccacaatcttctagctctttaaggtcgagtgtgatcctccccagaactgcatcttccaggaagctcatgagaaaggaaggatcccaggtcccatctctgatctgagtcggcatctgcgttttaacagaatcctgaagcagtggtctaactcctttggtggtgttattgtttgcatgtatacctccaaaattcacatattgaaatactaacccccaaggtgatagtattaggaggtggggcctttgggaggtaattaagtcatgagggtgaagccctcatgaatgggattagtactcttagaaaagggaccccagagaggtctctttccaccatgtaaggataaaagtacacggagaagatggcaatctgcaaactggaaaagggccctcctcagaacctgaccatcttggcaccttgatctcagacttccatcttccagaactgtgagaaataaatttcttttataaacactcagtcaatgctactttattatagcagcctgaatggattaagacaggtggtctggtttaaagtgatgtggtggcatcagaagtttaaggagagactggatttacagaaccagaatctgggatgctgtttacagagcaagttatttcctgcatttggacactgtcagcaggtcgattcaggagacaggtgaaaactttatcaccgggcagcctggatgaacaccacaactttgatatctttcacttaaaggaaagataagggcatccactatttctacacctggctggcagagtgagagctcaccaaaggtaagtctctttggagcagcaa

SEQ ID NO: 1564017 - DNA, 4001 bp, Homo sapiens
gatcctgagttattgaaaggggaagctgaaccaaggagtaaataataaaacatactcctaaaaattgtccggtagccaatatttataatttgtcaaatttcagcttttaaatatctatttatgtttcttttactagcaagttgacaaaaaaggggtctaaatatgtttaaatagctatggcagataggatgattttaggattcctaagataatagtaattgtttttaatctgcacatcattgtttttgagctacaataaaacaaaggtggcattcattttgttctgcattagcatctcaatatgaatattggagtgcacatttgcattatttttatcactaatgcaaactggtatttatgacctttatatttttcttctccttgacctcagtataagtggagtttttctcaaccagttgagaaatgttactttatattctactcaaatttgtgggttttggaaaaataatatgtattactcctgattggtaataataatgtaacatagcatcatatcccaatgactgctttttgagatttttgtatcttaaaaacataatttcagtttggacagaattttccagaaagcttaaaacatgcaaatttaatgtaaaaggagtcagaggataaaatacacataaagctgttaattttatacagtcttgcagggttaccttgtatttattgggaaggttattaacacaggtattggtgctaagaataactcttaagaaacaaacgtatttcattttatgggatgtcttagagttccatcttttgtagctttcatgtaacaattgcttacatcttgccttcctcaatcctatatcaactcttccagtactctttctacaagtattccataaattattcacctaggctgtacgataaaaagtgtgtcattcttggaagatgaaacacatatgacaattcagacatctgcacctctcacttatcctggagcagctatactatttgctgagcacaaataattgcttatcactcagacatgccacagtacctgtatcaccatatttgataccaaaaaaaacctgtttgcttctgatatgaaattaatcagtaggaacttgttctaataaaaatctactgtactcaagttgagaactgctttgcagtaggggcaaagggattccttggatcagatctttcagtcagatcaaacagaaaatgagccttcctatactatggttagattatgaaaatcagtgaaacccggaaacaaacaaccacagacactagtaagtgaaataacagccaagagatgaatttgggtgactatccaaggcatatataactgcaatccaccaaaagatatcctgtggaatagaggcaaagaagcagaaaggaagagaaatcaggttgaagattgcctttctccactagtctggcatagctttctttgttgtacctgagaatggtcgctccaaaccaaattttggtaggaggaggtggttttgagaggggagagcacttcccgtgagttgaaggggtccaaggcctgcaccaccttgttcatgggcccactgtaggtcctcactcgctcatacactacatttttttctggaggctgctgggcttggcttgactgatggtagcagtggtaatgctggggctggcactgcagcacctctgggagctgctgggttccacagctgctgctgctcgtctcactccaatagctcgagctcatcttcttccagtggtcagcaagggacctcccagatgttctacctaaggaacaaacagagaaatataatggaaaaaaaagacaggcaagcaggcagtcaggcaggcagacagacacacgacacacgtgtggaaaccgcttatcaaaacctctgccaatagtggtgccgggaagagaagaaagctacctgagcagcagcaagagcaggtctggcagctacagaggaagcagcaaaatatttgagctcaaatggaaaatggagccaccctgtgacattgctccaggaaatggtactgacacgcccttaggggcggattcacttagcaggtttacatgccaggagaggccctgccttgccacggagatagctacaaggctgcccagcaggtaaaggagtctgtgaagagcagaaatgtagaatgtcagggatgaagccagagtttccaagcacatgggcttaaaaattcacaaagacatgaaaatgcaaaaaacttgctagagaaaaaaagtcacacatgttatatgaaagtgtctttttatggttcttaagtttagcaaaggtagttaccagcataagtattattattccagattcccagactaaaataatgagtattagtctaggaatacaccaattttcacagataaatttgcattctttgcaaaacccatctgataattgcagttaaggaagattactaaggggtctctttctagtgactctgtctaatatatggacttgtttatcttactcaaagcctcgtattcttttctatcatttgttgaaggaaatttgtctaaatgattgaattgctgtatagaaaggtggatggtcaagaaaaacctaaagattccacaaatgctttgcattttggcattcacatttgttgtttttcatttatgcaagggaatttctcctgcccttatatgtgccctaggaaacactgagtttgattgactttttaatatctagttattaagggagctgcaagtcctgaaagatgccttaactgacataatgagatttaaatgtgtttacaacttacatttattactacttgaaattttgatcataatgcctacttaccctcagattttgctatgcaatatacttcagcaccacttaaatccagaatactctcattcaaagtgactttagtaaaaagtatcttcctaatgtgtatatgtgcaataggacctagtatactaccaccattctagagaggaagagaatgttatccagggggctagcagcattttttttctgcccagtgaacaaagtgttatgatttactattcactctgtgtcaggtactgttcaaggggttttatgtggattataattatttcatcattgaagtgactttatgaggtttataggtgagaaactgaggcacagacatggagagtttgaaaaactttccaaagttaaataacctgtaaatggtgggcctggcattttaacatatggagattcatattagagtctaagctcttatctggtatattatacagctagataaattctcaaattgttccattttacagctacataaattctcatattgttctgtatcctgccatctaataaatcttctagatgtcaacatcaaaaaacacttcagaaatgctagccatgagagactttaaaggaatctttagattttcttttatggctgaggagtgtgcaaaaagctgaaaattacccttaaaaacttttaagttagttattacatatttacatttatatttgtgtgttgagtgcagacctgtcaaatctgatccttgctcattttaatgatattcctcaagaatcaattaaaattttattagaaatatgtgacatgttaaacagcctggtaaaatatcagatcaataacttactaatatcattagcagtatcactttgaataaactttatgtgtgaacagagaataggggttaagtgggatcatccagtcagctttgattcatgataaaaatataaattaaacacacacacacacacacacaaacacacattcatgtgagcacacagaatactgtaaatatctgctgcagccaagaagtgacctattaaataaagcaagagattgagatgaagaaaaaaatttcctttatccataaactggtgaccatacctgcccttcacatatcttggatatatagtgttttgagccaacttccttgatacagtttggctacaatttgtgtgtaaagctgataccttcacccaatatctgagcctcattcatcactgttctccatctctgggtatgagggacagagagct

SEQ ID NO: 1564018 - DNA, 4001 bp, Homo sapiens
agatgtttaccatctgtacttcatgaagacaaaccatgtccagcctacccaccatcataatgccagagcctggcagaaggcttatacctagtaggtatataataaatatttgctgaatgaaccaatgaatgaaccactgtacctgcttttttgatcattaaactttccctggccgggcgcagtggctcatgcctgtaatctcatcactttgggaggaagagacaggtggatcacctgacatcaggagttcaagaccagcctggccaacatggtgaaaccctgtctctactgaaaatacaaaaaattagccggtgtggtggtgggcacctgtaatcccagcaactcgggaggctgaggcagaactgcttgaacccaggaggcagaggttgcagccagctgagatcacgtcactgcactccagtctgggcaacaagagggaagctttgtctcaaaaataaataaataaataaaaattccctgatcttttttcatatatagtaacagctagttacagacctttcaacttttcactgccattatcaaggtgccctgcctgctaatactgaagaaaaaaaaaagcctacattttgttttttggagtatgtctccaatgcttcacgtaggtaacttagcaaaaaaagaataagcatgaaaaaaatccagctacaaaggtttaaatatttgtttcaaaattaccatctggagtatctctatcctccccaaaagcagacagacactagcttacagcagtctttcaggtaacaatccttcagtctgctctaaaggaaaaattccagtcacaagtccccagcaactacttaatgaacaccatgacctaagaggagtctcaagattgcacagtatcctccaaagtgatttcctgatgttcatagatgacgtagtttttaggatgaagaaagggcttagtggcaaatcactgatagaggcctgcaaagactgttcgttcacatacttacacccaacatcctatctgtaatccaggcaggtcgactctccaaaatagtcttaaaaaacgaacggctagaacaaattgaaatctgtgactcacaactaggtgaatgcaaaggaagctgattaggaagcgagttctcattaatggtgatgtatctgaatgacaggagaggtgacgcttgagctaacaaagtgaagcatctgattttaagttagaagttaactgaagtcacgctttagttgaacacttaaaaaatcagacaaatctatttgcatttttgtattctatttttggaaataaaagacacccctgacaaacggagtgatatacaggggatccgaaatgccctaaattgatgccatttttttgaaacttcaccaggaatgactagattgtgaacaggatttctacgcagcacttgaagaactttccaaagaatctgaaagaaaaattgttaatgcataaagtagaaacccattacctaaaaatacaaaacgcgttattccccgatgacagcacttagagctttctttcctgcttagttacaatgtataaaattttcctggaagttcctacaaaaagggacacagatctgttctgttcaagccttcaagtggatacttagggagatcgcagtgaaatactttcggccccacggggccagtctcaataaagttatacccagcacgtgggtgcaactcaccaaaagaaatagaaacgcaatcgactgtggagactctcagtggcagaggtgagacagcctcccaaacaaaaatccctccaggctctggtcctccaagagcaaaccgcgcctaaaggaagcccggtccgacgccagaagggcccccgccggggacgaccaaggtctgcgcccaaacaaacccgggtgtgcgcctccctcagaacccccaccaccggcaatcatgccactgtcccaacccggagccccgcgcgcggaattgtccctcaccactcgcccctatctcacagtcgtcgccgtgcacaggtgccatggtcccgaatctcccgattccgcgccaaccagcccaaaactggcgcgggggccgagacaggcgccagcctgaaagccaatcagcggctcgggaggctgcggacttccggccggaaggccactgacgtgccgcgccgcgccgcgctccgcccccggccttcccgcggacgcgcgtttggcgccctgtgatgaccccttagggaaaagctagagctgaggggaagccggaggagagcaggagaaagaagcggtcgggcgctggaaaggagccgcctggagactgcgcaagcgcacgcatgctgatgggaaaagatttgggcgcgtgggagaaagggcgctctggttctcagagcccattttcccggaaaggaggcgcgggcgggcaggagagtgggcgtggttggatcgttttccccagagccgggaaagcgactgcctcctgctgcgcgccctgaattttgcctgatagtttgcttctcagcagtctggatacagtggctgtgtgattaacaacttaaagatatatgctccgtcttaaccaaataaccagaagtagcattaccaataaatggccatctgatctcatatgcctcctgatgtaatgcgtatgaaaaaggaaaaacttcgcctatatggtcttcttgcaaaaaatgtctaacctgaatctaaccatgaagaaacaatcagatgtattcaaaatgtaggacaatctacaaaacacctgacgtgaactccaaaatttcaatgttatgaaaaacaaaaagggtattcaatttttgtgtatgatacaatggctgtaatgtgtacatctcatgttatctctttccaaaaaggtataacatttttattaaataatgcctgccacacatttgtattttttcctacattattgcccacatgcttattgatcccttcttcatgtgacaacaattttgtaatattttctccaaagaggatataaagataattcaatctgtcttctagcatggttgatcaatacttgtttcttaatttctgattgtttagaaaatgtctttcagcttcataatcatttaatatcatgttatgtgatccatatgttgtgatacataacatgtagtaatttacacttagacataacttcctatttaaagtactacgacagatttattcctacacttcccttttaaaaactgatggaagttttatagttttattatcaagctttttccaaccaggagagaaccatgttggctagtcattaataagaaccaaatccttaccttaacaatttcacagctgattacttcccacatgcccgggtataactctaggcatttcaaacctcttttctctttcactactgctgtggtctgaatgtttctctccacataaaatgtatgcgttgaaacctaatcaccagtgtggtggtgttaggaggtagggcctctgggaggtgattaggtcatcagcaggaaccctccctcatgaataggattagtgccctcggaaaagaggctccagagagctgccttgccccttcttccatgtgagaacagagcaataaggcaccatctatggaccaaaaagtgggcctaccccaaacactgaatctgccggcaccttgatcttggaattcccagcctacagcactgtgaaaaataaattcctgttgtttattagccacccagtttgtggtattttgttatagcagcctgaacagactgagacaatgacccacatactttgtgggaaaagacctgtaggacactttctctttttgagatggagtctcgctctgtcatccaggctggaatgcagtggcaccatctcggctcactgcaacctccacctcccaggttcaagcgactctactgcctcagcctcccgagtagctgggattacaggcgcccgccaccacacctggctaatttttgtatttttagtagagatggggtttcaccatgttgtccaggctggtcttgaactcctgacctcaggtgatccactcatctcagcctcccaaagtgctgggat

SEQ ID NO: 1564019 - DNA, 4001 bp, Homo sapiens
attgtatccagattcaatgtcttgtggggtgatggtggaggatgtggttgtgggagatgatgtccttgttctcaggggccacacactgaaggatgtggggtacagtgtcatgatgtcagcaggttattcaggcaattcaggaagatgatagatagatagatggatagatagatagatagatagatggatagatatacagatagatagatagatagacagatagagccagctaacgtggcaagatgttgacagagaatctggtgatgcatacgtgggtgctcactgtactattttttcaacatttcagtagctttgaaaaatttcaaaataataaacctgggaaaaaatagaacatccatttaaaattaaaaaagaaagaaagaaaaaagaaagtgtagaaccttcggatctcagatttccagaaatctccgcctcctataggaatcttggggacttggaatctttcattaagatacaggcctgctatgactgtggaaacatttcagaatcctagaatccagaaatcgcatcatgccctgattatagaaatccacaatgccaacattttagaagtctagaatgtgagaatttcaaattgtcagaatctccaaacgctgtaatcatggtactttgggattccataaccctgtgacatcagcatgccaatgtcttataaccttgggatgtagacatttcagaatcccaagatccaagaatctcagctttctggaatcccagaactcaggaatactgaagggcatggcttggcatggcaggatgtggctcggtgtggcatggcatggggtggctggcatagtaggatgtggtatggtggaatggggtttggcctggtgggatgtggtggggctgaacatgttggggtccagcttggacatgctagggcctggcaggatgtgacagggtaaggtgtggctcgatatggatgaatgtgggaggtctgatatggcctggcatggtggcacacggtatggcaggcacttaccgagcctccagaggaggcggcaggcgaggcagatggcaaggagcagccagatctggtcaaggccctgctgggcagtaggcaggagacagccttgcagtagctgctggaaaaattcctggcggctaaaggtggccattgcagacccccacggatggatggccagatggatagatctgtcaaagcagggacacagagggagcgggtgtccgtggggcagacctcgcttaaaggatgcactctggcactcacatttcagtttggggctgcccagcccatgtagaggcacggtactggaggactgggggaaggcgtgagaagtcaggtacatcagactgagccaccaactgtgtgcatgtgggtgttcggcatgcacacgcacagcctgtgacctggagtgaatgaaggacctctgtctctccagtgctgtgaacagtccagtccgatggtgatgggatggcatacatttcaggcccatatatcaaatggggcgggcgacgggaaggggaatccctggtttccaaggtagagtcgctctgagtggagggcagagagggggattctgtgacacttgggggccgtgtgcatctctccttgtatggatgcggcggcacggggagggggggtgtcctgtatcctccgcgccccccatctcatccccacccggcgagaggccgccaacaaagtcctgcccaggtccgggggctgcaaggaggtggtggtaggagacatagcctgagggagagtcggaaaggtgatggggagggggtcctagcactcgcgctacagatccgcctggggaggccggcccagggatgggagctggggagccgcgtgcgcactactggcgacctacctggcaggaaagaagccgtggtcctggggaccgaggacgcgctgccgccgccgctgcctcctccgggcagcctcccccgcaggccgcaaggccgggaccagcagcggctcccagagcggcgcggcgagcgggccctttaaatcccggggcggcccggccgccggctcggccaatgggagagcaggaggggggcggggacggggacgcggaggaggggagcaggaggattgaggggagaccggcgcggggggacgtcggcgcgcaggacgttcacgcccgcacctttccggcctgtggcggtttcagccccagaccgtctgcctccggaggatttctggccatccaagaacaaacttccgaatctccaaatttccaagccttggaagtgagaagggaaagatgggggagggaggagggaagccgctgcacccccaaatagtcacccgcgcacgtcctctaaataccgtggtgtccccgtttcacagatgggaaaacaaaccgagatctctccttccccaacctttgagagaaccgaagtaactcccaaccctcccacctcctgggaccggccaggaacatttataagtaatgactgtgtcacctaggaacacaaattaggcgcctgtgcttcccctggggacgagctgtgagcacttggcgtgtcgtcgttgagaagtgatttgcatgcttaattccccagcagactctttgcttcgaaggtgaccccagcgactagtaaatgttctctgtgaactagagggaggctagtaccgagcacttaaaaggggggcatttataaagctcttaagggccaggctcggtggctcacgcctataaacccagcacttcgggaggccaagggtaggaggatagcttgaggtcaggagttcgagaccagcctggccaacatggcgaaaccccgtctctactaaaaatacaaaaattagccaggcgtggtggcgcacgcttgtaatcccagctactcgggaggttaaagcaggagaatcaggaggcagaggttgcagtgagccaagatcgcgtcattgtgggctacaagagcgaaactccgtctcaaaataaataaataaagactgggcgtggtggctcacacctgtaacccagcactttggaaggccgaggcggatggatcacctgaggtcatgagtttgagaccaggctggccaatatggcgaaaccctgtctctactaaaaatacaaaaaatttagctgggcgcctgtaatcccagctactccggaggctgaggcaggagaatcacttgagcccaggagacggaggttgcagtgagccgagatcacgccattgcactccagcctgggtgacaagagcaaaactccttctccaaaataaataaataaataaacaagagcgaaactccttctctaaataaataaataaataaaataaaaaagaaagcgcttacactggccccatccgcacctctatctgcaccaacactaaagatttatgtagcacccgccttctacctaccctactgctgcagtttctaggcattcccctttgtacctaggctgatgaagggcctatttttccaaaagagcacttactgggcgcttactgcactacatgcttagctgtgacgtggaagggagaaggaagcccaggtcaaactggacgccaccctgacctgggcagccaactgaaacagattttaatcagattaacaatggcctgtatggagctgggcaagtcatgttcactcacccgtctccattgtccttttctgttaaacaaaagagtgggcttggcaggtttttgctgggaaacaccaatggtaattgaagagaaatgtatattttctctctattttaacatgaagttaaatggagttctagctcataaattagtattcatgtattacaaacaaaaaacatttaatacggtaagaatatgtatatataaggaataatagcttagaccagatgcacaaatatcaattcttttccttaacagcagaatacaggacatacattttatgaattaaatttcattttaatttttttctcagttgtcaaacccactcaagttgagtcaacaatgacccacagcacctaccagaaatacttccctcaattgcaagacttggcatttaaaactggaagatt

SEQ ID NO: 1564020 - DNA, 4001 bp, Homo sapiens
tcctacaacagtctcatggtggaaaaattctcccaggctccctcctccagggggagcccatgcccaacctgtcccttacagtcctgtgaaaggacaaatctcccagattcccttctccagggacactccacgtcctacctgttctgtgtctcctcataggcaaatgattctcccagactcccttctttctccggggaatctcaccaccctccctgtcttggacaacttcatatggggcctggggacccacccatgcacttcagccaacagtgtgaggataaggatgcatactcataccccatgagtaggtagatgaggatggtgacggataggaagacgcctcgatgggaggaatgtcggcagaggaacagcacgaggtagcacaggaggctgagcagcacgacccaaaccatgtgcagctggaagaagtggtagaggctgaagaacccgcctgccacggtgcttgcatgcttcaggtaggatggcaaccctttgggtgaaagggagaaagaaagggagagagagaacgagaaagagagagaaagagagggagtgggaggaagggagggagggagggagagagagagggagaacaagaaagagaaggttggtgggctagtaggaaggggaggatgacctgggtagagggcgtagccagggcaaaggccttcaggctggaatgtagtgggattggaggggcccaaagcaggtgttggggagctggagagggtggcagggcctgggtttaaagaaaagaaacatctataaagggcatttgggggaccttggaagaaattcaaatatcaatttatataggataacattattgtatccagattcaatgtcttgtggggtgatggtggaggatgtggttgtgggagatgatgtccttgttctcaggggccacacactgaaggatgtggggtacagtgtcatgatgtcagcaggttattcaggcaattcaggaagatgatagatagatagatggatagatagatagatagatagatggatagatatacagatagatagatagatagacagatagagccagctaacgtggcaagatgttgacagagaatctggtgatgcatacgtgggtgctcactgtactattttttcaacatttcagtagctttgaaaaatttcaaaataataaacctgggaaaaaatagaacatccatttaaaattaaaaaagaaagaaagaaaaaagaaagtgtagaaccttcggatctcagatttccagaaatctccgcctcctataggaatcttggggacttggaatctttcattaagatacaggcctgctatgactgtggaaacatttcagaatcctagaatccagaaatcgcatcatgccctgattatagaaatccacaatgccaacattttagaagtctagaatgtgagaatttcaaattgtcagaatctccaaacgctgtaatcatggtactttgggattccataaccctgtgacatcagcatgccaatgtcttataaccttgggatgtagacatttcagaatcccaagatccaagaatctcagctttctggaatcccagaactcaggaatactgaagggcatggcttggcatggcaggatgtggctcggtgtggcatggcatggggtggctggcatagtaggatgtggtatggtggaatggggtttggcctggtgggatgtggtggggctgaacatgttggggtccagcttggacatgctagggcctggcaggatgtgacagggtaaggtgtggctcgatatggatgaatgtgggaggtctgatatggcctggcatggtggcacacggtatggcaggcacttaccgagcctccagaggaggcggcaggcgaggcagatggcaaggagcagccagatctggtcaaggccctgctgggcagtaggcaggagacagccttgcagtagctgctggaaaaattcctggcggctaaaggtggccattgcagacccccacggatggatggccagatggatagatctgtcaaagcagggacacagagggagcgggtgtccgtggggcagacctcgcttaaaggatgcactctggcactcacatttcagtttggggctgcccagcccatgtagaggcacggtactggaggactgggggaaggcgtgagaagtcaggtacatcagactgagccaccaactgtgtgcatgtgggtgttcggcatgcacacgcacagcctgtgacctggagtgaatgaaggacctctgtctctccagtgctgtgaacagtccagtccgatggtgatgggatggcatacatttcaggcccatatatcaaatggggcgggcgacgggaaggggaatccctggtttccaaggtagagtcgctctgagtggagggcagagagggggattctgtgacacttgggggccgtgtgcatctctccttgtatggatgcggcggcacggggagggggggtgtcctgtatcctccgcgccccccatctcatccccacccggcgagaggccgccaacaaagtcctgcccaggtccgggggctgcaaggaggtggtggtaggagacatagcctgagggagagtcggaaaggtgatggggagggggtcctagcactcgcgctacagatccgcctggggaggccggcccagggatgggagctggggagccgcgtgcgcactactggcgacctacctggcaggaaagaagccgtggtcctggggaccgaggacgcgctgccgccgccgctgcctcctccgggcagcctcccccgcaggccgcaaggccgggaccagcagcggctcccagagcggcgcggcgagcgggccctttaaatcccggggcggcccggccgccggctcggccaatgggagagcaggaggggggcggggacggggacgcggaggaggggagcaggaggattgaggggagaccggcgcggggggacgtcggcgcgcaggacgttcacgcccgcacctttccggcctgtggcggtttcagccccagaccgtctgcctccggaggatttctggccatccaagaacaaacttccgaatctccaaatttccaagccttggaagtgagaagggaaagatgggggagggaggagggaagccgctgcacccccaaatagtcacccgcgcacgtcctctaaataccgtggtgtccccgtttcacagatgggaaaacaaaccgagatctctccttccccaacctttgagagaaccgaagtaactcccaaccctcccacctcctgggaccggccaggaacatttataagtaatgactgtgtcacctaggaacacaaattaggcgcctgtgcttcccctggggacgagctgtgagcacttggcgtgtcgtcgttgagaagtgatttgcatgcttaattccccagcagactctttgcttcgaaggtgaccccagcgactagtaaatgttctctgtgaactagagggaggctagtaccgagcacttaaaaggggggcatttataaagctcttaagggccaggctcggtggctcacgcctataaacccagcacttcgggaggccaagggtaggaggatagcttgaggtcaggagttcgagaccagcctggccaacatggcgaaaccccgtctctactaaaaatacaaaaattagccaggcgtggtggcgcacgcttgtaatcccagctactcgggaggttaaagcaggagaatcaggaggcagaggttgcagtgagccaagatcgcgtcattgtgggctacaagagcgaaactccgtctcaaaataaataaataaagactgggcgtggtggctcacacctgtaacccagcactttggaaggccgaggcggatggatcacctgaggtcatgagtttgagaccaggctggccaatatggcgaaaccctgtctctactaaaaatacaaaaaatttagctgggcgcctgtaatcccagctactccggaggctgaggcaggagaatcacttgagcccaggagacggaggttgcagtgagccgagatcacgcc

SEQ ID NO: 1564021 - DNA, 4001 bp, Homo sapiens
ctattcccattcatctcctcccttttctaagcaattaaaaagccatcagctcaacgaagtagtaataataatagcaataataacatggagtggtcgattagatacaaattatctcacaaatattgtgtacagattgtagtaaaacaccgcagacatttagaaacgctatagaagtttttaaaaatgcaaaactagtctattgtaaaacaaatttcacctgaaatacagctgctataaccaaggcgctgaaaggttattcagaggcacacatctgtcttcccaatccctcccccgccccaccccgcccccacgttatcccactccttgttcttcctagagaggagcgaccaaacaaaccttactctgagtaaacaatatgtattgatcagcagaaaaggctaaagggaactgttgcccggggagccaggaatatgagatcccagcttggactgcttaatgtaactgtgtatcagcattgagaagcctgaatgagagagtatgtgtttcctttgtcaacagaagttagaacctcttatgaaaaggaaagaaaagggaaaaaaaggaaaggaaagcaaaagaaaagaaaggaaaggaaaggaagagatggaagggaagggaagggaaggggaaaggaaagaaaatgaaaggaaaggaaagggaaaaagaagggaaagaaaaaggggaaaggaaagaaaaaggaaaggagggaaaagagagagagtacgagagagcgagcgaacgagagagagagaaaaataataaagaatactagaatgaaaggaagagagtgagagagaaagagaaatccgcgctgctcccagtgcggccggccgcctcctcgcttcctccagtcagagatcatggcaagatgtgtctgttttcacggtgtgcgaataaacctcatgcggctgctgatcccctggcggagtcattcttttctctttttgtcttcgattacagaaccagacacgcaccacttccttctccaactggaggctgtctgccagcgaggagatctcctgcgcggcaggcttgggacacttgaggaaatgcgtctccagtacgcccttgacactcacctcgatggaggtccgcttcttgcgcttgcggccctgtgcagcgatcttgtcaatgctggtcgggctccctgtggacgaatccgcctcctccagccacttgttcagcaggggcttcagcttgcacatatttttgaagctcagctgcaaggcctcgaacctgcagatggtggtctgcgagaacacgttaccatacagtgtgcccagcgccaaccccacgtcggcctgcgtgaagcccaacttgattcttctttgtttgaattgtttggcgaactgttccaactcatcagaggttggcgtctcctcgtcggagtgatcctggcaatggtgcgagcccagttcgccgtgatccgggggctctcggagcaccgggtgcaggctctgtgcagaggcggcagctggaggtggggtgagtcccccgtgttccagcatgccgctcacggtgaagccaggctgcgagtacacgttgaggggttggccgcttgacgtgatagacgggttcggtgccgggctggccccccaggcgttggggtggttagtgtgcggtgagtggtgggctacgtgtggcgagcggtgatggatgatcgcacccagttgcaggtcttcgcgcccgggcttcacgtcctgctggtccagggggctggtggccagtgtggaggaccatgggcccccgtcgctcagactggtcacccagtgatgcccgaggggatgcccattgctgggaactccctgcaagtaatcactttggagaagtttctgagggttgcggaaaggactcccctgctgcatgcccgcagagtccgcatggactagggaggtggaactgagaatgctgtagggattcgaggcagctgtggccatggtcggtgaggatcccctactagttataatgtggcaaagggagcagcttcagcctttgacatctacggtgcggggagccaaagacgctagcacgggttaccggcacccaccacggccaatcgcagcgcgtctccgcctggccaggagtaagcccggccaatagcggtgcgggaggtcgggctcgctttccaaattaggctggtgaagctccggagtttcaatgagacccaagcaggaagtgaatcaatctttcagctccattggctgcctagcgcagagtggcggccgtacatttgattactaccccccccaccgcggggtttatgttgatggggaaaagatgtgagggatgtgttgttggggggcagtcagggagtgaggtggaaaattaaggttgtagaactcctttttgattatttagattaatctaaataaagaaaaagtaaagcaagtttaaatgtcattttgatctcagtgaatagggatttttcagactcactcggctgtctgggcgggctagttgtgtgcctaggactgcaaaacaaaacgtcgctacaaactttgagcaaagtaacgtcttcgattggaccctaaaccaataaagttgaaaccaatgattccaataagaacatttcagtttatttcattgtattaagaacctcgatatcaaggtctgaaagcttctaagagatatcctgttctttcaatttttctgaaaaattttttaggtcacgaagaactgaattattctgggaaagtaaaatctaatgtgatactgacaatattcagttatttcgaagtttgcttcccaatctagctggtcaattggaaaccttgctttctcactgctccatatcagttcccatcacagatcccacaacttctgtcaaaggttctgcttgctgaagcgggcagccctcacactcacccaaaacactctgcagacccactacgaataggtatacaggaaaacgttcgtgaccccgcgccccgatgccatcccctaggaaaattgtttttaaccttcaccgctcccccaccctcctcacccgccctgcatttaatgtgcccaggaaattcagagagagagaaatggcgggatgtttggcatcaagtaccgcccccacttccccagtccccatcaagcttgaatttgctttcagcttgaaaagataggactgcttttacattttggatagaataaaagaggtgaaacacttgtgctccttctaagcttttataagttaggaaaggacaagtccgtgtgctccacagcccggcgcaaaggcagtgcttggaagcagagtggggagaaaggcaaagatttgatttgttctagctgagaaaaggcaacaccagatacccaacatggtctttgaagttaaaaaaatgacctttcgttgaataattttggaggtaacctagctgcctaattatatttgcacttacagaagacggcatcagagttcccttattggtttgaaattccattaaatatattgcaagagcgcctaggttaagcttgatttaaatttgcatacattttcatatatttagcagaaataaaagaaggcttgctgctaccagaaagtcattaaggcattagtttctctaagaagacagatctgaagaatgtgcaagaaaatgagaaaaaaataaaaacaaggtgagcttattctgccattcctttatatagctaaagagcatctatttcctgtgaaatgagtaatttcttatgagagcacagagcaataggagctgatattggtaagtgtaaacgtgtttattaggcatgaaaacctggcatctgattcagatctatttctttttttcactctttttttttaaggtaaacacttagtaattattggcagagaggatcatttgccatctcaccccctcttcctgctctctcattgaaactgtagcttcatttgcccacgtcttattgtagaggcttatctgcttttagaaattgagttttcctttctctctctctctttctctctctcccgccccccccaactccccaccttttctgctaaggaactcattctttactgc

SEQ ID NO: 1564022 - DNA, 4001 bp, Homo sapiens
tatgtcactgtccatttcaagacacatcccaatatcagagctgctaaaatgtgaaaaaaaaatgcatcttagaatcaacaaaatacagtcattctcattttctcaaaatgccgtacagactgcgtggattccgcttaaagctgccagattgcaaactctgtttaagtcaaggggagcctgagggtaagctgattagattcaagctgcaagatcactctggggatcagatggtgatgaatggggaaaagcaggtaacaggaagaccaatgaggaggctcctgcaataatccaggagatagatggtaagggctgaattaaagtcatggcagcggggatgaaggggaagaaggagccaaatgtaaaagggttttatgtaacaaaccccacaggtctcagactgggcatggagagtgagggagacagagacatcgaggaggattccagggtttttagtttggaagaataaatagattcatcattcacttgacaatatttactgggtgtctaccatgtgccaggcactatgctaggtgctgtggttacaaggggtggacaagatagacatggtttctgccttcttataatttacagtctaagagatgatgatattcattgcaatagggtattaaagggtacaagagtcggacatgaagggggacaagcgagtttatggtggagaaaaatcgtgagttcagtcagcagtgtgctaaatttcagtacttgtgagacctcactgttgaaatatcccacaggcaggagaagcctgggtttggagctcaggaaataaatcaggaccagagagtcagattaaataggtcatcaggttgctgacaatagctgaagtgattagagaagataaaatagccagggagagcttatagagtaaagctatagaggcaaaagcagaacactggggaatagagacattaaagagaatgaaaagaggaaggagccaacagggaggctaacaaagaagcaatctggaaagtaagaggccaaggagtgagggctatctgtaaagcaatggagacttgattaccgtatagtccatctaaacctgcacctagaattactgcctggaagcaatttacctttgccatgtacaattcagactgtcagagttatggatgttttgcatgaattccaaataggcttatcagaactgcttctaatttagaaagctaggatatttttaaatattgccacaatctgtttctttatcttgtatgtgcttacgttttacatgtatctcagattgacatctagcatgagtcaatgtagagcaatgctaattccttatttcttcttcttttccttctacaggagctacaatctgccattccaagaacaaaagtaaaacaaagactacacactgatgcaactccctctcatgttaaagcactgggaattgggcaaaactgatctagacagagaatggagtcaccttgcaagaccatcatgaggttctctgcccagagctctgtaacaggtgaggctgaaatgtggtaagatactctgatccttcggacttgtctagaaaggtcctcagacatcttcattttataggagaggaaaccacgcccagagaagttaggtggcctccccaaagtcacagtcctgtgactcagtgaccagcacatcaaggtgacccagtttcaccctatacatatatattaaagcttttaacaaacttcatacataaaacataaagaccacaagagttgggctaaacaactaaacagacagaggccacaggttaactttcgatcattgtcccatgcctacccggatcatactccattcacctggtccactaagtgctcttctcttacctttccctcgaggtttgatcaggtccacacaggttcaaggggaacagactcctagatcttcactttgctggttgttgactctttcagcctgacctgcgggctcaggacacaatctatcatcacacaggtcttattgaagagggtttcccagtctcatttgtaatcttcaagaggtagattctagaatgattaataggttgccttggtgacctcacaatgtaggatgcagatatgacaatacctgccaatggaatgtggacgacatgacctggatgagaggactatttcttgcttattgaaaggcagattccagctttctttttgtcaccattgcctccttatcaactatttttgtgttcatgaacatggtaaacaaagaaaagtttgtttcttggaggaatgttgataaaacaaggcctgggccaggcacgatggctcatgcctgtaatcccagcactttgggaggccaaggcgggtagatcacctgaggtcagaagttcaagaccagcctggccaacatggtgaaaccctgtctctactaaaaacaaaaattagctgggcatggtggcgggcacctgtaatcccagctactcaggaggctgaggcaggaaaatcacttgaactcgggaggtggaggttgcagtgagctgagacagtgccactgcactccagcctgggtgacagagtaagactctgttccacgcctgccccccgccaaaaaaaaaaaaaaaaaaaacaagtcctagaaaatatccagggctttcttttcaaaaccctcactattactgcctcaaatgcctaaaagttcacggagaagcctttggaaaacattttcagagcattttcttttgtgcacttattcctggcttggtttcattcatatattcattaaataaatatttgttgagcatctattatgtgccgggtactgttctacaccctggggatataccagttagcaaaactggtaaggtctcttccctcctaaagcttataggctagtaggagaagtaaacatgaatcaaataatcataaatgtgaaattgcaaaggacaagtattcattttatgagagtgaggtggggggtcgagcaaagccttctctgaggaagtcatctttgacctgacagtggaaggttgaatgtggattaattaggtgaaggtgttgatgggggatggagtcaagcatacagttgagctaaggctcgtgacccggagtagctaactggagactaggattgggagactttcaaaggagaatccaggattcaatataggtctaatttactaaagccgaagctcttattttcaccaaaatttaaagggtgcacaatctgtcagtcttacaactcatttgcgtaaaactctaaaacagcacttctcaaactttaatgcacttacaagtcacctagggatcttgtcaaaacacagattcccgggcccaatcactgctgaatcccaatctgatttagtaggtctggggtggggctgtgaagctgcatttctaataagctcccaggtgacagtgaagcatactttgaggggcactgctctataacacagtactctttttatttatttatttttatttgtttgagacagggtctcactctgtcgagagtgagctatgatcgcgcccaggctggagtgcagtggcgcgatcatagctcactgtagcctccacctcccgggctcaagtcatcctcctcactcaacctcccaagtagctgggactacaggtgcccgccaccacactcggctaattttttattttttacagagatggcgtttcaccatcttgcccaggctggtctcaaattcttgggctcccaaagcactggaattacaggcgtgagccaccacacctggcctcattcatagcttttggagtgtaaaccaaaagaaaaattttaatccccgcccaaccattggaatggacttcttcctaggccagggcactttaaaatttaacctgaaagactgcttcaggccatgacgagaagcagaggtccaacatgcctcattatacctctccggtattaatataaacacagaccttaggacggataagaaacatttacaatctgtcctctctgaagcctgctacctgaaggcttcatctatctgcacaataagaactttggtctccacagtcccttaacccagacat

SEQ ID NO: 1564023 - DNA, 4001 bp, Homo sapiens
ggtgtggcaaaaaaacaagggacaaaaacttcaagtccagtacccatctggttctgtctctctgctagagccactgctttcttgtgagagcatgggctcagcccctcgcctccacaggactcaaaagtagattacagcgttaacagtagagtgcacaggcttcaaggtcaggcatgggtgaactggaagagccaggtgccatcactgcctcaaccagtttctccacctctggaatcctggtttcctgctctgtcagaaagagaatctgctctaccccccactggcaaagcccttggtccacactatgtcattgcagttctctccactccagcacactgctgatcattcacaccaagctcatttccaccccaggacctttgcacttgctgtttcctctacctagaacacccttgttccatatatgcacataactgttattcatcatccaggacttagtttaaatgaaacctcctcagaaaagtcctccctgttccttttcctacaaactctcccccacctccccaccgtatctgcataactcttctttatcatcattcgggactcacctcctcaaaggccctccctttaacagcatgtctgacacagtcattccctcccaatctatccccttactcccttcagcagctaactttgtccctatttatcctatctgcttgcttgcttgttttttcaaactgtctcccataggagcctgtatgaatccttgagggtagggtagatgtctgtcttgttcagggctttacagtggaactcaataaatggaggaataaaaccccagttaaaacagtgcctagcacgtgtttgacctccatcactctttgactgactgactcaatgcaccctcctccctgtcctggagagcaggcctgaggggttcctgggccggaatgcttgtcctccatcccagacacagccctgcgttggcggaggtggcgctggctgacattacctgcgcctcaccggcttcatgcagctcttcagctgcctggcctcagcctccacgggaccctggcactcgggctgtggctccagctgcggcagctgctgctgctggggcagcccttcggcatcagtgggtgtgggagcgggtgcgatccggagcaggactgtgtagttgcggccgtggttgttggcccagaaagtgccctcaggggtctcatagcgcaccacgaagtcgaggcgcgccccatcgcccgcgccctcagcaaagggcagctggaaggcaaagcggtcggtgcggccgccgtcgtcgggcgaggaggcggatgcctggccgggacccaggccgagccccggatccaggatgggatctcctgctcctgttcctcccgctcctgcccacggcgggctgcgcgggacgtagcgcgctgggtggtcgcaaaaggaagcccagccgtcgtgtgaggcccgcacgtgcaccgccttctcgaaggagcggttcagcacgcgtaccaacccgcgcagcaccggcgggcggcccccaggcacccacaccccggcacccccggggaccgctccgggaggcggcagcagcgcctccagctccaccatgacgcgccccaagcgctccagacggcccggcgcgggcggcagcgaaaatgtggggaccaggtaaaaccccccgccagcggggacggggcacagcggtgagggctcggggcaagcctcctcttcctcctccccttcatccccatcctcgccatcgtcgtcctcgtcggccccgccgccgccgccgccatcttgcccggccgccgccgccatcttgcccgccccgggcccgccccacggccggtagcggcgcaactgcgccagcggcagccccaaggcctcgtcggcgaacagcaccctccgcggggccaccgccgcctcgaccgaggtgcggggctcacccgcggccggcgaggggggcgcggaatgccgcagcgggggctccacaggggccgtacgcgccatatcggcggcggcggcggcaccgacggcaccggcggcgggaccggcgggggcagggcctgaaggggcgggcagccaatgggaaggccagcgcggaggggtacggctcacgggggcataggcggtgagatgaagacaagtattgcagagggccaatgggcagccatgcacggatgacgtacagcgaattgagagccggagaagcacgcagccaatggggatgcccgggagtgggcggtgtagggggcgggatgatcgaggaatcaatggagaggccggaatgggggtggtgcgaaatccatgatgaagaaaacagaagcagacagctaatgcggaagtctgagcgagagaggcatgtgggcggtgggaaaagtggaatggctacaggcgatgagggcagccgggaacgaacgcagaggcccaaaaagtgggagatcccgcgggttgcgtaggcggtggaacggtagctagagagagagaacagccaatggagagccacgcgtgggatgacgacaatggctgcagcgagccaatggggaggcttgtgagcgtgcactgcggcttcgaaggggtggtgccaaggtggagctagccaatacgaaggctaaaaggagaccaagaggcgggtgtgtagggagccgagccaatggaggtggaggctgaaggcgggagcgaggacgagagctggcggatagccaatgagggagccagggtgaaggcgtagagacctcaaaggacagtactagtatgggatgagccaatgccgaggctagatagtgcagcgggacggagggaggacttggaggcaagatggggaaaaaagcagagccgacgggggcagtgtaggtggtgtgaagggaggcatgagtagccaataaggaggctggagaggaggacgctgtgtagacagagtctgaggtattgggtggccggacagcagaaccatagaacgcaggcagccattaggaaaaatgtgcttctcagggatggggttaccctctccctaaccctccgtgactccccattgccccaggaatacccagagcccctgaaggcctagaccacaccttggtgtgtgaactaggaaagtgaaaatgactgtcctgttgcagttagttacttactgggtcctccctgcccaactacaaccttttcttgagcagtgccacaagccaagaatgcccctgattgttagccgcaagcactctccaggacttgatactattgttgaatgaatggccgaataggaaatttaactttctgaaggattcacttttttaaatttcagctcagcaaacactgacctgactgtgtgctaccagaagttgattgggcatatgggtagcttctgactaatggaatcacaatcaaagccctgtccttcttgcccaacctgacactccacaccccacaggggcctcacctcccttctttctgtccccccatctctgcttctactgttccctctcccaagagtgctgttccttctgctgcttccatctagtaaactcctttcgctctccctttggggtctcaccttctgtgggaactcaactgcagcttttgtccgctgaacacatccattcatacattccttctccatcctgggaagatttactgaacacctactgagtgccaggttctgagcatgctgttatctcattagaacctcacagcatcctaggagggaggtgatccttccagcagcccctctccccaggtctccatgttcaggatgtccatgagttagaaatgaatatgttcagctgcaagtaacagaaaaatcataaaataatgggggcttaagcaagacagaactttatttttttctcacctaaaagttcaagctggcaaatagtccagggactccttcctgcccacctggtttgggcattgtctgtcccgatctggctccaagactctcagtcttcaacaaatccttttggctgtctattaaaaatatttaccaaatccatcctcttctcaccacctccactgccagcactatcaccagtcacctagactactgc

SEQ ID NO: 1564024 - DNA, 4001 bp, Homo sapiens
gcctgggtgagagtgagaatctgtctcaaaaaaaaaaaaaaaaaaaaaaaactgattgcaatcactttatcctggtaactactcaccacggactggttctggccggttgacagaggctgcagagttgcttcaccttttgacctagggggcctaaccataatgcatttaaatgttaagtctccgctccaaggtgaactcgggagtaggtaacatgcatgtttgttcaatacccatgcgtcaggacacccttggtgaatatccatagctcttcctataacttcttgaatatatacacttggccaacccactcagcataaattcccgtctcatcttttcttccctccaagtgcttgtttttagttttcttttttttttttttttttttttttttgagatggagtcttgctctggtgcccaggctggagtgcagcctctgcctcctgggttccagtgattctcctgcctcagcctcccgggtagctgagattacaggtacattagccagaggctgcgcttctcacctgcggtgtataatcaccttctatgaaataaatggcgtttcttctaagaaatacagtgggattttgggaggccgaagcgggaggattgcttggacccaggaattccagagcactctaggtaacatagcaagacctcgtctctgcaaaaataaataaataaataaataaacaaaaattagcctggcgtgatggtgcacgcctgtaatcccagctactggggaggctgaggcaggaagtccaactgtgtttgcgccactgcactccagcctaggagacagagcaagaccctgtctccaaagaattgtaaaataaataaaaaacggaccaggcgcagtgactcacgtctgaaatcccagcactttgggaggccaaggcgggaggatcacttgaggtcaggagttcgagaccagcctggcccacatgggggaaacccagtctctactaaaaatacaacatcagccaggcgtggtggcacgtgcctgtaagtcccagctcctcgggagcctgaggcaggagaatcgcttgaacctgggaggcagaggttgcagtgagccaagatcgcgccatcgtactccagcctgggcaacagagcaaaactctgtctcaaaattaaaacaaattaaaataataaaataaaataaaataggaagcctttctacctttataaattgtgtgatttttaggttaacaactgtcaatgacggaatgttcagtacgtgggactttcttgtctgtatgtgtgtggtggggggggtcggggcggggaacagactcaatatgaaaccgttttggggtctgacgctcgcccaccagcctccatcgcgcagccacacgcccactatgcgaccagagccacctgcgcagttgttagcagaaggaagagtaacttactactctcgtccctgcggatctacgggtgcctcgaacgtggggcgcgttcctggggctggaggcggcgcccaggggcagcgcagggcccggcccgggggttcccgggggttcgagcccgctgggccggggggcggcgagcggggctgtgggccaggccccgggctgctccccgtcccccggggtcggctggtcccgcccgggcgccttgatccggcgcaggcagtcctgcagcatccgctgcgtgctggcctcgctgagccagtacaggaacagctcgtccaccttcatcttcaggaccggctgcagcactttgccgggcggcatggcgggggctgggcccgcggcgcccccggacgcccgcgccccgccccgccccgggggcttcggtccgccccggaccgacctcggtgatgcgagcacggcccgctgagggggcgcggcgcagggaacagggcccgcgcctcgggaactgcgcggactcgcggggcgcggggaccgaggagggggcgcggtccggcccgcgctgctcagggcagcttcaaaacgggcgcgccggccgcgctcccaaacaagggcgcccgcgttcacgtcactgcgtcgcgtcatcgcgacgatgtcatcacgaggcgacgccgccgctagccacgcgcgccccgcggccctcggagcttttgcaggaggctttggtggggccgagcggctgcggtgaggacgagggaggggctgtggcggccgtaccgcccgagctctttctgcgtttaggatttttagaggcgcggcccatggcggcgtggcagtcctagagctgcggaaatgcgagcatgcgcaatgcgtgcctgccagagcgaggagagggtggaacctccgcatggagcatgcgccgtgcatagcggtggaggagcggagttcgggaggccggtcgggtgagcgtgcgcaatggctgcccgcggggcgcaagccagaggctgggaggtgtgtgagcgggtggggctggaggacgggagtgcgcctgcgcagtgggaggcaccgggaacgagcgagcatgcggggtgcgcgcccgccgagctcgggagcgagcgtgcgtcctacgggagcgcgcgaggaaaagatcaaacttttcaataacagcgggctacctgggacccaaagggccccgtttactttagctttgcttatcaaacagtagagacaggttggaggagttggacccctttaaacgttggtgttcagggatgagcgtgaagtgcgttgaaaattgcaaaaatcatccacgtccagggaggtgacattagttaaataactttacccaatggtcgtttttgtttctgcttttaacagtatccataaaaacactgcattatcatctgtctggcacacatgcacctgtttcctttacatcttgccccgctttttattcattttttatcaaaatagggtttcacctggtgttgcaccctgttagagagtaatttcaaggtcttttatgagccaggttctcctacttctgagctgcataaatcgagccagactcaataagtaacccttggccgggcgcggtggctcaagtctgtaatcccggcactttgggaggctgaagcgggcagatcacgaagtcaggagttcgagaccagcctggccagcatagtgaaaccgcccccaccatctctactaaaaatagaaaaattagccgggcatagtagcgtgtgcctgtagtcccagctactcgggaggctgtggcgggagaattgcttgaacccaggaggtggaggttgcagtgagctgagatcacaccattgcactccagcctgggcgacagagccagactttgtctcaaaaaaaaaaaaaataactctttttttagttttattttttttttgagttggagtctcgctctgtcgcccaggctggagtgcgatggcaagatctcagctcactgtaacctccgcctcccgggttcaagggatcctcctgcctcagcctcccgagtagctgggattacaggcgcccgccaccacgcctggctaatttttgtatttttggtagagacagggtttcaccgtattagccaggatggtctcgaactcctgacctcaagtgatccacccgcctcggcctcccaaagtgctgggattacaggcgtgagctaccacgcccggcctaaataactctttttgttcgtatgagacagggttttgctccgtcacccaggctgcgatcttagctgagtgcagccttgatctcctggctcaagcgatcctcccacctcagccttccaagcagctgggacaacaggcatgcgccaccatgcctggctcatttttaattttattgtttatagagacgaggtgttgctggtctcacactcctggcctcaagcaatcttcctgcctttgcctctgtctctgcctcccaaagcgttgggattacaggcgtgagccaccgcacccgatttaaatcactcataaacgatagttttgtgttgtgtacataatgatttgaatttcagtttgtgtttcgtgattggatataaaaatccgagtgtacttggtcagaagagcgccatcacgcaggaattctgtgaagttattt

SEQ ID NO: 1564025 - DNA, 4001 bp, Homo sapiens
tgtaatagatgtcagttatcaataaggagaagatatattttccagtgcctggcacactatagccccaaatagatgccagtttttagtattactgataataaggtgtgatttgcagccagagcacagtaggcctaaatgatagatcctcactgcaactacgcttggcacacaggagacagcagtagaggttagcagtacttcctattagatactatgtcatcacccccatagagtaatccatgggatttaacttggcatacagtaggccccaaataggcattaggtggtcagtattattttgttgttttttttggatttttttcagacagggtctccatgtgtcggccaggctggagtgcagtggcacaatctcggctcactgcacccttgacatcctaggctcaagagatcctctcacctcagcctcccaagtagctgggactacaggcatgcaccacaacacacgattaatttttgtattttttgtaaagacggggttttgccatgttgctcaggctaatctcttaatccctaaactcaagcaatctacccgcctcagcctcctaaagtgctgggaatgccagcttgagccgccacgcccagccagtcagtattgttaagaatgaaatatctgccgggcacagtggcttatgcctgtaatcccaaccctttggaaagccaagggtggggggtggatcacctgaggtcaggagttagaggccagcctagccaacatggtgaaacccgtctctactaaaaatgcaaaaatcagccgggtgtggtatcacgtgcctgtaatcccagctacttgggaggctgagacaggaaaatcgcttgagcccgggaggcggaggttgcagtgagacgagatcacgccacagcactccagcctgggcgacagaccgagactctgtctcaaaaaaaaaaaaaaaaaaattgccaggtgtggtggggcggggcgtgcctgtagtcccaactactcgggaagttaaggcaggagaatcgcttgaacctggaaggcggaggttttagtgagccgagatcgcgccactgcactccagcctgggtgcacaataagactctgcctcaaaaaaaaaaaaaaaaaaaaaaaaaaaaaaaaaaaaaaagaatgaaatatctattcccccaaccccctccacttgacacgcggtagggatggatgtcaggaatccacattgttaacaacgaaaaatgcctgccaccccattgcttggtgcacagttggcccatgctaggtatcaagcgtcagtatcaacaacaaaagtgcctgtcgaggctggcacgtgttaggaccatctgcttttagctgtctcaccaggctccagatgtttgaggatgcctctcttggccaagcgggtctgcagcgcaacgggcagcggcatagctgatagcagacagacctagggacagacgaacaaactgacaagcagctcagataaagattcctatctggatcccgtaaccaagcgcctcccgtaaacatgtactcatctgactccgatctactcaaatgaaccagtagctgggtggacagaacatacgcactaaaagatgtaagaggtaggtggcaatatcatcgcaactcccaccaaccctactgtccccgaaaccaggtgctccagggccctgttcctctcccaggcccaggctccgcccacagcctaagaagcccggcccctccgcacttcagaaatgggctcatccagcgtccccatgactgccgggtgggagaaaccaaagcgctgggatgggggagcagagggcagcacttcctccagctccaaaagagtgcacccaccccaacgttaccaatacactcgtgcaggtagtggaaggctgtcacaccgcccgtctctctcgtgtcgccgctacgatacctgggcccacacgactctcttcccaaaacaccgaatgagaccttctctcaacgaggccttcactccccgagcctgaaagtaactggactacgctcaggaggcaatgaacaaatggcagaaactcgattggccaatgagagtgcgtccttggcgtgacatgcggtatagcgacccaatcgctgcccggtaataggcggaaagctccgacgccggtgtgcgtctacgctgggggcgtggcctgactgcgcggccagacgccagcgccatggaggagtacgctcgggagccctggtacggcaatgggcacaggcatccggaatattgctgcgacgccaaggccagccgtgggggtcgggcgggggaggcatcggccgcacagagccatgtaccagactcgggggactcttaacgtatctcccgctacccccactcggttcctgtcattcgggctccgttatgaggggccacaaccagagaaggtgcggcgaaggccgaaccacgccatgtttctcctgacttcgtaatctcctagccctgttaacgaaaaaagacacgctggacgatccatcccggctaggggtggtacggtgttgaccggaaatccccagagttgccgccagtggtttttcccaggtcgcctttgtcagtggggggcggggcacggatgaacctgttgagggccggcggggacggtggatgcttcccgcggtcgctcttggtttttcccagttgtgccggattgaaaaggggcggggcatggttggacgggctcaccgtcggagaaggggtgcgacgcggtcctgctttgctgacagtctgtcttggctagttaacacgcctatgtcgcttattgaaacgtcaactctgcgtgtgccaattcatttaatctttgatcacagtaaaaccgttggctgattccttggttggtagacagggcgaagactaatatttctccccctttgccccatttctcgctttaatgggggggtgtgtggaaaaagcgtgacagaactagctcattattatctgaagtgtttgttcctacttaggaacttcccattctggtgacttggtttctcccagttagaaaagagttcgtgtgacaggacctgggggagggctcacattaaccccgtccttcccttcctgcttgcagcccatggcgaattgtggatgattgcggtggagccttcactatgggtgtcatcggtggcggagtcttccaggccatcaagggtttccgcaatgcccctgttgtgagtccaggccttccctgggttggtgtggggttagctatcttgcccacaagggaggctgctctgaaaactgcttggagctgccagtcacgtgcacttattcattctggtgcccactcacctactatgtgccgagcctggctcctgtatctgggattttgtagggattgcaaacatggcctctgtcttccaccctccaccccacccaactggagctcctctgtggaaatgctgtgtcgttcaaagagtcatcaccaaattttaaatgtatgtgcaaagccagacagttttttttttttttgagacagtcttgctctgttgcccaggctagagtgcagtggcacgctcttggctcactgcaacctctgcctcctgggttcaggcaattctcctgtctcagcctcccaagtagctgggactacaggcatgtgccaccagacctgacgaatttttgtaattttagtagaaatggggtttcactatgttggccaggctggccttgaactctggacctcaggtgatccacctacctcggcctcccaaagtgctgggattacaggcgtgtgccactgtgcctggccatgtttttttttttttttttttttttgagacagcatcttgccctgttgcccaggctggcgtgcagtggcctgatcatgggtcactacagcctccgcctcccaggctcaagtgatcctcccacctcagcctcccaagtagctgggaccacaggactgcgccaccatgcccggctaattatttatgtatgtatttatttatttgtagagacggggtttcaacgtgttgcttaggctggtctctaattcctgaactcaagtgatccacc

SEQ ID NO: 1564026 - DNA, 4001 bp, Homo sapiens
ttttttgagatggagtctttctctgttgcccaggctggagtgcagtggcatgatctcggctcactgcaagctccgccttccgggttcacaccattctcctgcctcagcctcccgagtagctgggactacaggcatctggcaccacgcccggctaagttttttgtatttttattagagatggggtttcaccctgttagccagaatggtctcgatctcctgacctcgtgatccgtccacctccgcctcccaaagcgctgagattacaggcatgaggcaccctgcccggcctgggatcattgacaattttattaaccacaaggtctataccttgcacacagtaggcttgtaatagatgtcagttatcaataaggagaagatatattttccagtgcctggcacactatagccccaaatagatgccagtttttagtattactgataataaggtgtgatttgcagccagagcacagtaggcctaaatgatagatcctcactgcaactacgcttggcacacaggagacagcagtagaggttagcagtacttcctattagatactatgtcatcacccccatagagtaatccatgggatttaacttggcatacagtaggccccaaataggcattaggtggtcagtattattttgttgttttttttggatttttttcagacagggtctccatgtgtcggccaggctggagtgcagtggcacaatctcggctcactgcacccttgacatcctaggctcaagagatcctctcacctcagcctcccaagtagctgggactacaggcatgcaccacaacacacgattaatttttgtattttttgtaaagacggggttttgccatgttgctcaggctaatctcttaatccctaaactcaagcaatctacccgcctcagcctcctaaagtgctgggaatgccagcttgagccgccacgcccagccagtcagtattgttaagaatgaaatatctgccgggcacagtggcttatgcctgtaatcccaaccctttggaaagccaagggtggggggtggatcacctgaggtcaggagttagaggccagcctagccaacatggtgaaacccgtctctactaaaaatgcaaaaatcagccgggtgtggtatcacgtgcctgtaatcccagctacttgggaggctgagacaggaaaatcgcttgagcccgggaggcggaggttgcagtgagacgagatcacgccacagcactccagcctgggcgacagaccgagactctgtctcaaaaaaaaaaaaaaaaaaattgccaggtgtggtggggcggggcgtgcctgtagtcccaactactcgggaagttaaggcaggagaatcgcttgaacctggaaggcggaggttttagtgagccgagatcgcgccactgcactccagcctgggtgcacaataagactctgcctcaaaaaaaaaaaaaaaaaaaaaaaaaaaaaaaaaaaaaaagaatgaaatatctattcccccaaccccctccacttgacacgcggtagggatggatgtcaggaatccacattgttaacaacgaaaaatgcctgccaccccattgcttggtgcacagttggcccatgctaggtatcaagcgtcagtatcaacaacaaaagtgcctgtcgaggctggcacgtgttaggaccatctgcttttagctgtctcaccaggctccagatgtttgaggatgcctctcttggccaagcgggtctgcagcgcaacgggcagcggcatagctgatagcagacagacctagggacagacgaacaaactgacaagcagctcagataaagattcctatctggatcccgtaaccaagcgcctcccgtaaacatgtactcatctgactccgatctactcaaatgaaccagtagctgggtggacagaacatacgcactaaaagatgtaagaggtaggtggcaatatcatcgcaactcccaccaaccctactgtccccgaaaccaggtgctccagggccctgttcctctcccaggcccaggctccgcccacagcctaagaagcccggcccctccgcacttcagaaatgggctcatccagcgtccccatgactgccgggtgggagaaaccaaagcgctgggatgggggagcagagggcagcacttcctccagctccaaaagagtgcacccaccccaacgttaccaatacactcgtgcaggtagtggaaggctgtcacaccgcccgtctctctcgtgtcgccgctacgatacctgggcccacacgactctcttcccaaaacaccgaatgagaccttctctcaacgaggccttcactccccgagcctgaaagtaactggactacgctcaggaggcaatgaacaaatggcagaaactcgattggccaatgagagtgcgtccttggcgtgacatgcggtatagcgacccaatcgctgcccggtaataggcggaaagctccgacgccggtgtgcgtctacgctgggggcgtggcctgactgcgcggccagacgccagcgccatggaggagtacgctcgggagccctggtacggcaatgggcacaggcatccggaatattgctgcgacgccaaggccagccgtgggggtcgggcgggggaggcatcggccgcacagagccatgtaccagactcgggggactcttaacgtatctcccgctacccccactcggttcctgtcattcgggctccgttatgaggggccacaaccagagaaggtgcggcgaaggccgaaccacgccatgtttctcctgacttcgtaatctcctagccctgttaacgaaaaaagacacgctggacgatccatcccggctaggggtggtacggtgttgaccggaaatccccagagttgccgccagtggtttttcccaggtcgcctttgtcagtggggggcggggcacggatgaacctgttgagggccggcggggacggtggatgcttcccgcggtcgctcttggtttttcccagttgtgccggattgaaaaggggcggggcatggttggacgggctcaccgtcggagaaggggtgcgacgcggtcctgctttgctgacagtctgtcttggctagttaacacgcctatgtcgcttattgaaacgtcaactctgcgtgtgccaattcatttaatctttgatcacagtaaaaccgttggctgattccttggttggtagacagggcgaagactaatatttctccccctttgccccatttctcgctttaatgggggggtgtgtggaaaaagcgtgacagaactagctcattattatctgaagtgtttgttcctacttaggaacttcccattctggtgacttggtttctcccagttagaaaagagttcgtgtgacaggacctgggggagggctcacattaaccccgtccttcccttcctgcttgcagcccatggcgaattgtggatgattgcggtggagccttcactatgggtgtcatcggtggcggagtcttccaggccatcaagggtttccgcaatgcccctgttgtgagtccaggccttccctgggttggtgtggggttagctatcttgcccacaagggaggctgctctgaaaactgcttggagctgccagtcacgtgcacttattcattctggtgcccactcacctactatgtgccgagcctggctcctgtatctgggattttgtagggattgcaaacatggcctctgtcttccaccctccaccccacccaactggagctcctctgtggaaatgctgtgtcgttcaaagagtcatcaccaaattttaaatgtatgtgcaaagccagacagttttttttttttttgagacagtcttgctctgttgcccaggctagagtgcagtggcacgctcttggctcactgcaacctctgcctcctgggttcaggcaattctcctgtctcagcctcccaagtagctgggactacaggcatgtgccaccagacctgacgaatttttgtaattttagtagaaatggggtttcactatgttggccaggctggccttga

SEQ ID NO: 1564027 - DNA, 4001 bp, Homo sapiens
ccttgcacacagtaggcttgtaatagatgtcagttatcaataaggagaagatatattttccagtgcctggcacactatagccccaaatagatgccagtttttagtattactgataataaggtgtgatttgcagccagagcacagtaggcctaaatgatagatcctcactgcaactacgcttggcacacaggagacagcagtagaggttagcagtacttcctattagatactatgtcatcacccccatagagtaatccatgggatttaacttggcatacagtaggccccaaataggcattaggtggtcagtattattttgttgttttttttggatttttttcagacagggtctccatgtgtcggccaggctggagtgcagtggcacaatctcggctcactgcacccttgacatcctaggctcaagagatcctctcacctcagcctcccaagtagctgggactacaggcatgcaccacaacacacgattaatttttgtattttttgtaaagacggggttttgccatgttgctcaggctaatctcttaatccctaaactcaagcaatctacccgcctcagcctcctaaagtgctgggaatgccagcttgagccgccacgcccagccagtcagtattgttaagaatgaaatatctgccgggcacagtggcttatgcctgtaatcccaaccctttggaaagccaagggtggggggtggatcacctgaggtcaggagttagaggccagcctagccaacatggtgaaacccgtctctactaaaaatgcaaaaatcagccgggtgtggtatcacgtgcctgtaatcccagctacttgggaggctgagacaggaaaatcgcttgagcccgggaggcggaggttgcagtgagacgagatcacgccacagcactccagcctgggcgacagaccgagactctgtctcaaaaaaaaaaaaaaaaaaattgccaggtgtggtggggcggggcgtgcctgtagtcccaactactcgggaagttaaggcaggagaatcgcttgaacctggaaggcggaggttttagtgagccgagatcgcgccactgcactccagcctgggtgcacaataagactctgcctcaaaaaaaaaaaaaaaaaaaaaaaaaaaaaaaaaaaaaaagaatgaaatatctattcccccaaccccctccacttgacacgcggtagggatggatgtcaggaatccacattgttaacaacgaaaaatgcctgccaccccattgcttggtgcacagttggcccatgctaggtatcaagcgtcagtatcaacaacaaaagtgcctgtcgaggctggcacgtgttaggaccatctgcttttagctgtctcaccaggctccagatgtttgaggatgcctctcttggccaagcgggtctgcagcgcaacgggcagcggcatagctgatagcagacagacctagggacagacgaacaaactgacaagcagctcagataaagattcctatctggatcccgtaaccaagcgcctcccgtaaacatgtactcatctgactccgatctactcaaatgaaccagtagctgggtggacagaacatacgcactaaaagatgtaagaggtaggtggcaatatcatcgcaactcccaccaaccctactgtccccgaaaccaggtgctccagggccctgttcctctcccaggcccaggctccgcccacagcctaagaagcccggcccctccgcacttcagaaatgggctcatccagcgtccccatgactgccgggtgggagaaaccaaagcgctgggatgggggagcagagggcagcacttcctccagctccaaaagagtgcacccaccccaacgttaccaatacactcgtgcaggtagtggaaggctgtcacaccgcccgtctctctcgtgtcgccgctacgatacctgggcccacacgactctcttcccaaaacaccgaatgagaccttctctcaacgaggccttcactccccgagcctgaaagtaactggactacgctcaggaggcaatgaacaaatggcagaaactcgattggccaatgagagtgcgtccttggcgtgacatgcggtatagcgacccaatcgctgcccggtaataggcggaaagctccgacgccggtgtgcgtctacgctgggggcgtggcctgactgcgcggccagacgccagcgccatggaggagtacgctcgggagccctggtacggcaatgggcacaggcatccggaatattgctgcgacgccaaggccagccgtgggggtcgggcgggggaggcatcggccgcacagagccatgtaccagactcgggggactcttaacgtatctcccgctacccccactcggttcctgtcattcgggctccgttatgaggggccacaaccagagaaggtgcggcgaaggccgaaccacgccatgtttctcctgacttcgtaatctcctagccctgttaacgaaaaaagacacgctggacgatccatcccggctaggggtggtacggtgttgaccggaaatccccagagttgccgccagtggtttttcccaggtcgcctttgtcagtggggggcggggcacggatgaacctgttgagggccggcggggacggtggatgcttcccgcggtcgctcttggtttttcccagttgtgccggattgaaaaggggcggggcatggttggacgggctcaccgtcggagaaggggtgcgacgcggtcctgctttgctgacagtctgtcttggctagttaacacgcctatgtcgcttattgaaacgtcaactctgcgtgtgccaattcatttaatctttgatcacagtaaaaccgttggctgattccttggttggtagacagggcgaagactaatatttctccccctttgccccatttctcgctttaatgggggggtgtgtggaaaaagcgtgacagaactagctcattattatctgaagtgtttgttcctacttaggaacttcccattctggtgacttggtttctcccagttagaaaagagttcgtgtgacaggacctgggggagggctcacattaaccccgtccttcccttcctgcttgcagcccatggcgaattgtggatgattgcggtggagccttcactatgggtgtcatcggtggcggagtcttccaggccatcaagggtttccgcaatgcccctgttgtgagtccaggccttccctgggttggtgtggggttagctatcttgcccacaagggaggctgctctgaaaactgcttggagctgccagtcacgtgcacttattcattctggtgcccactcacctactatgtgccgagcctggctcctgtatctgggattttgtagggattgcaaacatggcctctgtcttccaccctccaccccacccaactggagctcctctgtggaaatgctgtgtcgttcaaagagtcatcaccaaattttaaatgtatgtgcaaagccagacagttttttttttttttgagacagtcttgctctgttgcccaggctagagtgcagtggcacgctcttggctcactgcaacctctgcctcctgggttcaggcaattctcctgtctcagcctcccaagtagctgggactacaggcatgtgccaccagacctgacgaatttttgtaattttagtagaaatggggtttcactatgttggccaggctggccttgaactctggacctcaggtgatccacctacctcggcctcccaaagtgctgggattacaggcgtgtgccactgtgcctggccatgtttttttttttttttttttttttgagacagcatcttgccctgttgcccaggctggcgtgcagtggcctgatcatgggtcactacagcctccgcctcccaggctcaagtgatcctcccacctcagcctcccaagtagctgggaccacaggactgcgccaccatgcccggctaattatttatgtatgtatttatttatttgtagagacggggtttcaacgtgttgcttaggctggtctctaattcct

SEQ ID NO: 1564028 - DNA, 4001 bp, Homo sapiens
tgaaaccccatctctactaaaaaatacaaaaattagccaggcacagtggagcacgcctgtggtcctagctactcgggaggctgaggcaggagaatcgcttgaacccgggaggcagaggttgcagtgggccaagactgcaccactgcactccagcctaggtgacagagcgagactctctcaaaaaaaaaaaaaaaaaaaaaaaaaaaaagtaaatcaatgatcattgccagttttatttttttgagatggagtctttctctgttgcccaggctggagtgcagtggcatgatctcggctcactgcaagctccgccttccgggttcacaccattctcctgcctcagcctcccgagtagctgggactacaggcatctggcaccacgcccggctaagttttttgtatttttattagagatggggtttcaccctgttagccagaatggtctcgatctcctgacctcgtgatccgtccacctccgcctcccaaagcgctgagattacaggcatgaggcaccctgcccggcctgggatcattgacaattttattaaccacaaggtctataccttgcacacagtaggcttgtaatagatgtcagttatcaataaggagaagatatattttccagtgcctggcacactatagccccaaatagatgccagtttttagtattactgataataaggtgtgatttgcagccagagcacagtaggcctaaatgatagatcctcactgcaactacgcttggcacacaggagacagcagtagaggttagcagtacttcctattagatactatgtcatcacccccatagagtaatccatgggatttaacttggcatacagtaggccccaaataggcattaggtggtcagtattattttgttgttttttttggatttttttcagacagggtctccatgtgtcggccaggctggagtgcagtggcacaatctcggctcactgcacccttgacatcctaggctcaagagatcctctcacctcagcctcccaagtagctgggactacaggcatgcaccacaacacacgattaatttttgtattttttgtaaagacggggttttgccatgttgctcaggctaatctcttaatccctaaactcaagcaatctacccgcctcagcctcctaaagtgctgggaatgccagcttgagccgccacgcccagccagtcagtattgttaagaatgaaatatctgccgggcacagtggcttatgcctgtaatcccaaccctttggaaagccaagggtggggggtggatcacctgaggtcaggagttagaggccagcctagccaacatggtgaaacccgtctctactaaaaatgcaaaaatcagccgggtgtggtatcacgtgcctgtaatcccagctacttgggaggctgagacaggaaaatcgcttgagcccgggaggcggaggttgcagtgagacgagatcacgccacagcactccagcctgggcgacagaccgagactctgtctcaaaaaaaaaaaaaaaaaaattgccaggtgtggtggggcggggcgtgcctgtagtcccaactactcgggaagttaaggcaggagaatcgcttgaacctggaaggcggaggttttagtgagccgagatcgcgccactgcactccagcctgggtgcacaataagactctgcctcaaaaaaaaaaaaaaaaaaaaaaaaaaaaaaaaaaaaaaagaatgaaatatctattcccccaaccccctccacttgacacgcggtagggatggatgtcaggaatccacattgttaacaacgaaaaatgcctgccaccccattgcttggtgcacagttggcccatgctaggtatcaagcgtcagtatcaacaacaaaagtgcctgtcgaggctggcacgtgttaggaccatctgcttttagctgtctcaccaggctccagatgtttgaggatgcctctcttggccaagcgggtctgcagcgcaacgggcagcggcatagctgatagcagacagacctagggacagacgaacaaactgacaagcagctcagataaagattcctatctggatcccgtaaccaagcgcctcccgtaaacatgtactcatctgactccgatctactcaaatgaaccagtagctgggtggacagaacatacgcactaaaagatgtaagaggtaggtggcaatatcatcgcaactcccaccaaccctactgtccccgaaaccaggtgctccagggccctgttcctctcccaggcccaggctccgcccacagcctaagaagcccggcccctccgcacttcagaaatgggctcatccagcgtccccatgactgccgggtgggagaaaccaaagcgctgggatgggggagcagagggcagcacttcctccagctccaaaagagtgcacccaccccaacgttaccaatacactcgtgcaggtagtggaaggctgtcacaccgcccgtctctctcgtgtcgccgctacgatacctgggcccacacgactctcttcccaaaacaccgaatgagaccttctctcaacgaggccttcactccccgagcctgaaagtaactggactacgctcaggaggcaatgaacaaatggcagaaactcgattggccaatgagagtgcgtccttggcgtgacatgcggtatagcgacccaatcgctgcccggtaataggcggaaagctccgacgccggtgtgcgtctacgctgggggcgtggcctgactgcgcggccagacgccagcgccatggaggagtacgctcgggagccctggtacggcaatgggcacaggcatccggaatattgctgcgacgccaaggccagccgtgggggtcgggcgggggaggcatcggccgcacagagccatgtaccagactcgggggactcttaacgtatctcccgctacccccactcggttcctgtcattcgggctccgttatgaggggccacaaccagagaaggtgcggcgaaggccgaaccacgccatgtttctcctgacttcgtaatctcctagccctgttaacgaaaaaagacacgctggacgatccatcccggctaggggtggtacggtgttgaccggaaatccccagagttgccgccagtggtttttcccaggtcgcctttgtcagtggggggcggggcacggatgaacctgttgagggccggcggggacggtggatgcttcccgcggtcgctcttggtttttcccagttgtgccggattgaaaaggggcggggcatggttggacgggctcaccgtcggagaaggggtgcgacgcggtcctgctttgctgacagtctgtcttggctagttaacacgcctatgtcgcttattgaaacgtcaactctgcgtgtgccaattcatttaatctttgatcacagtaaaaccgttggctgattccttggttggtagacagggcgaagactaatatttctccccctttgccccatttctcgctttaatgggggggtgtgtggaaaaagcgtgacagaactagctcattattatctgaagtgtttgttcctacttaggaacttcccattctggtgacttggtttctcccagttagaaaagagttcgtgtgacaggacctgggggagggctcacattaaccccgtccttcccttcctgcttgcagcccatggcgaattgtggatgattgcggtggagccttcactatgggtgtcatcggtggcggagtcttccaggccatcaagggtttccgcaatgcccctgttgtgagtccaggccttccctgggttggtgtggggttagctatcttgcccacaagggaggctgctctgaaaactgcttggagctgccagtcacgtgcacttattcattctggtgcccactcacctactatgtgccgagcctggctcctgtatctgggattttgtagggattgcaaacatggcctctgtcttccaccctccaccccacccaactggagctcctctgtggaaatgctgtgtcgttcaaagagtcatcaccaaattttaaat

SEQ ID NO: 1564029 - DNA, 4001 bp, Homo sapiens
acctcagcctgcagccaaccggggcccaccgaagggaattggcgcgcaggcaggccaatggagtggtgagcagccaggacgcctcagatactgaaagcgtggccgagtaattggcttggcaacgtgggcatggccagggaagacgcccggtaacggggacgtggccagtggaaggcacttaacaccaagagtgagataggaaaggcgataataaaaggggtgttcccagaagggggaacgaagcccgggaaggcgcttttagcgggggcgtggcgaggccctcgggtttcccagccccctctcaacccggggaccggcagggctggcctggtgccttaagcatgctctggctgctttcctggctatctcggggtagtggagactcacgaagcaccggcccggcgatgctgaacaggaaggtgcaagcgccgcccgcgacccagagcaccaggaggccgacggcaagcactgcggccaggcaggctgcagggtggctgcggcggcagcggcgcacagctgcgcgggtctcagctgcccacaccagcacgccgagggccaccgccactaccagcgcgctcaggagcgtatgaagtggccgcacgtacctgcgggtacaagggaaccaagctagccggccgggcggagagacggcctccggaccaccacccaccctgggccccaagagccagggtctcccgtctccggacactccagcctggcacatcctcccaccagccctatctccagcaggcccatctgccagggctcccgactcacccttgtagacccctcctttcctccttgtcaattccactgtcctgtcttcctcaggtccccgcttcaggccctcccatcctgctagacactccccacacccccgggctcccaacacttccctggactttccttccgactctgcccccgtagggcccctcatcagcctgcccgcaagctccccctttaacaccagcccctgcaaatccctctttcaggccttctgtcttcacacgttcccctctccccaggcctagggtccttatagaaccgccctccaggctcccatttccctatagattcctccctccatcattgctaggacctcttccaggtcgtcagccccactctgaactttcagcactgctcaagtccttcctccagattctccatccctctctggtctcaggctttccaaccatggatcctcctcctgggcccaagttccccaacaggtacctgcccctggcgccttccaatcatagccaggctcccctccaagaccggatccccaataaatacatcttccaaaccctccaactttaccgtctatttcccggtctctgccctaagtactccagggtcggcctcaatctggccccatcattcacatcacaccccccctacgcccctcaagtactctcatgtccccctttcgggccctcctttttttccggttcaccttccagcccactttccccttcagtcccacacttgtctccatcctccccatatcttccttgcagacccccatcccccgcaggccctcctcatcagccaggctccatctccctgaggccctccttataactaggctccacctccttcaaggccccccttccaagcccctcaggccgtccatctctactgacttcgcccttcccggccttgcacccccctcaggttccccgtcctggtcctcaaagacctgtgggtctacccccacgctctgcagacgtccctggccaaccggcgcctccctccctcacccggcgagagcgaggccgatgccgaagcagagaaggtagttggtttggtagtagaggaggttgttgatgacgcggtggcaccatcgctgcgggtcgcatggatccggagccgccagacgcgccgaccccagaacaaagtcgtccagggcgcgtagcggtggcagccgcacctccgacatcctgccggttaatgtggctggaccagccaggagggggccggactacaacaaccgttacgcccctcgccaccgcggggcacaccgggaaatggagtctgggctgggcagctttttcctaacctcctaggtggattgcgcaggggcggcgatgcacgtgaccggaaaagcaactaacacgccgctcaggaaagcagcaaaggctgccgggaaatcaagcctttgccacgaagcgagatgctcccaacccttaaaactgccatccacccccgcgcggggcgccgcaggggctgctccgggcggtgccagcggctcaagcacaaagtagccagacagataagaaaggagggactgtcacaaggatccgagttggattccacctccttcctgtcagcgcccaagagggtcacatttctccaggaaactccatgccccgcccctgaggtcaagccgtaaatgccattaagggccttttattcgtattcatcacatcggagatcatctcttcctaggaagcttttaaaaaatccccaggttggattagggcactccctctgggtccctggcaatttcctccaggttagggatcccaaggggtcgctgccttcctgggtctctggcctggcccttggggcacacagtcatcaagaagtgctggggggaagtgagctctttatttagacatagctctgctgagtggaaagtgggcaccagccccattaatgcttgctggctggtggcttccaagcacgccccactgccaaggctcagctctgcagttctgccactgcaggtccctagcacagcccccagggtccttaaaagtcatcatcatcacagatgtcaaggtacacgtcgaaagcctctctgttgcagtttccatcaggagtgaagacatatttgtggaaggtcccatctacgcagatggctgggggagggggggtggtaaaaggtcagaggctgccacagccacaggctccagtcctctcaggcatctcaggacctagggtctgcctccaggcctttgcccagtgctgtcccccttactgatgatgaagctgagcctcacatggccctaaaatcctttcaggtccaacctgcaggcctttgccccatgcagtacccccaaccaaggggctgttcccactcaccaatgacagagttgacgttcttggaagtattgcgaccgaaggcgcagatgcaagctgactcagcaggcacagtgaagctcgccaggctccactgagagtccacgtactgcccaatcataggccccaccttgcccacgcgagccagcctgcaggcagcactggctaagcccaggtatggtaaatgggcagggggacagggacacggtagggtggggagggggtactcacgcggagcggcggttgaggcgggtatccttgagagcaaagatatggacagtacccttatcactggaagcgcagaggaaggaggagtcgtggctgaagttaatgctagaagacagatcagcagtgatgcccacatgtcatgtggtatggggtcaccagcccaccatgcataccctgtgctcaccagtagagggtggcagggtcagtgcctcggcgcagctccaccagtttctccttggattgtgtgtcaaagaggcgaataagggtacccttctgggaggctgaggccactacagtgcctggctggtttagagacacacaggctatgtcactctgatgtgcattgatcgtgaatggagcagacgaggtgccaggctttgtgctcgccaggtcctggggtaggagggaggagtctgaggttggggtggtatggagggaaggggccaagagtccacaaggaagccagtccaccaacctacccacccttgtccactggacggctcaccacaagttgcagactcccacacttgtgtcccgggaacactagcagttgcttctccaggctggggcagaggtcacagagccctagggtgtgaagatggggggtggggtgggcggctgaagaggaggcagcatctcagaatggacagagctggatgaggaccagacttcaaccctccacgata

SEQ ID NO: 1564030 - DNA, 4001 bp, Homo sapiens
aaattatttgaaaatatggccttaatggctccataatagtctttactaacaaaagtctttgtatctttaattatagataagcctacatgtgacagagaaatgtagtaaacaactaaaatgttaagttttgctggtaaagggaaagctttgaagtagatttgtttcctatggaaaatatatgtaatgtaagtaaacacttaactggctgacatatttaaaatactttcccaggcaagtaaaaccagtgggacttggaaatactgattttaaaatttaagactggttttgttaaaaatctcaaagtaggctgggcaccgtggctcacgcctgtaatctcagcactttgggaggccaaggcaggcggatcatgaggtcaggagttccagaccagcctggccaatatagtgaaaccccgtctctactaaaaatacaaaaaatagccgggtgtggtggtgcgcgcctgtagtcccagctacctgggaggctgaggcagaagaatcgcttgaacccgggcggcggaggttgcagtgagccgagatcgcgcgaccgcactccagcctgggtgcctgggtgacagagcaagacttcatctcaaataaaaaaaaaaaaaaagtcccaaagtggttaactgaaagtacttactttcagcaagtaagaactgtaaatgtttaagaggacaaaacagtttttctcatttatcactcccaaccaacccatcctaagtcataacaacattccatttaactctagggattcagaatttgaagcattacttttttcactgaatactggcatggaacatgctgtaactgaaccataaaaaccaactacacacctacagaatgtcaaatgatctgcaggaaaagcaggttactgaatagcaagcaagagacagcctttatctatagccactgttcacttttggttaattttaacatccagatgtagcaggctacaactttcacagtatctacttcgtctgacgtgtcattcctgaaagtggccattagctttgtacactggacagaaatgcaaataatcaaaaaccaaattggcaggacacaaatttgccacgaggtttatcatcaacccaaatgcatacttctaaccttttcccccatttccctcaaaagtacactctgtaataggttcttcatgtctgagaaacataaggaatatccattaactacacaggctttggggaaggtggctttcagtaataatctttgtaagatgcaaacaaaaaggaagaaagaaaaatgaaatgtttgacctcccgagcactgtgtttagcaacttttctgtttaatcaaactttttgtgaatcattattcaacctatcaatgtcttccttcgctgaaatagtacctgaaaaagacaggatgtgctgaaggcactttgagatgtttcaggaactgtttcagtttgcccaacatcctcgatgcaaactcgggactagggccacccactttccctcagctgcggcttttggggtaaccactacctcttctaaaatctgatcagtggaaaccatacctttcttcacagctagaactcccctttattcccctccccgccctcctaggtgagaaccaggcccgcccagggcccggaggcagcccagggggtgccgcccaagcccagattccgggggtgtaaccggggtacacgtgtctccggaatctcccctcccaccctttggcgggacaccacctactcttcgctttgcttaggtgcagggagtggtcggcgaccgatacccgggatgcctctcccgggtacacttgtccacccgcgtagaagtggcactcctcttcgcgagtccggggcctctcctctgtctcccagccctgcacagctccagccggcagcaggaacagcagtagcggcagcagaagcagccttcggtggcggccgtggtccggagttgtcgcggctagcagcggcagcgcctccatgaccacgcgagcgcagaaacacgtcccttggcgcgagcgccgcttctgccgccgccgggcagctacaaccgcgtgcacgacgcccgcgcgaaccggggcgcggcctcgcgagaccagctcctccccctaccccccctatctgctccccgccccgccacgtgggcgccggccgcacctcccccatcccaagcctgcatttgcgcctgcgtcccgcggctgaccaggaccgggagcgttgcccaactctgtgaaggcagcgacaaggtctcctgacctccgcgctgttttagacatctttccacgtccatctcttccacaaagcctcaccactgcacacaagcccctcacaagcggaatctaacctatatgcttgtgaatggcttgcattttatacttctaataagctttttaaaaagtcacttaacgtttttaaaaattatatttacttgacaaatcataattgtatacattcgtgggatgcaatgtgattttttgaaatatgtatccaatgtgggatgattacatcacattaacttatccatcgccttgtttacctatgacttttatggtgagacatttcaaatttactcttattcattttgaaatatacattattattgactgtatttaccctgctgcttaccagaggttgggaagtagggaaggcgaggcgagagggaaggaatggggagttagttgttggtcagaggttaccaagttccagatagacaggaataagtttcaagatctaatagacatttactaattttttttcttgaagtgatttgtgtgaacggggccatgatctgcactacttgcagctcttttaagtcctggaaaaacttagggagggtaggtctaaccatttactttcctccagcatgcaagggcgtacaggcagtttttagtgacctaatctattgtttcaaagacagctttttttttttttaatttaaatgaagacttgaaaagttaccagaaaactctcccagcagtgttgttcctttttctgacaattaccccatcacccaacccctggccttttccctgccctccccacccatctccccgccgtgggcaccgccccgcttgccgctgcaacctgccgtgtgcgtctgcgcactgggggcaggcccaggccaccgagcgtccaccaactggactaagaccaccttgtgtcgtcacttgtgaccgatcttctgcactcccaccctcagcactgttttagaccctgttcatccttctgggcccatcttgtacacaaaacttcgcaggtgactggcctcgcgccctcagcactgttgtaggccttctcatccttcacacctatttcttccacaaagcttcgcccatggctgtcttcccaccattgaagtgccaacgaccctcgccgccagcacttgttagacatccttccacgcccatctctcccaaaaagcctcctcatcccacgccacccccgcccctcaaagggaaactgacctttctgcctctgaatagctcgcgttttatccctctaacagacatttcttattcttttccttgcagtgatctttgtgaacagccatgactcctctctcaagtcggagcccttttcaggtccccagaaaacttggagaagaaaagtctaacctgaaaagccatatccctagaccatttcttctcttccagctggaaaggaactatggggcaaacaggcaatgttgcaacttaaccctgtgttaggttgtttttttttttttttttttttttagacagagtctcgctctgtcgcacaggctggagtgcagtggcaatctcggctcactgcaacctccacctcccaggttcaagtaattctcctgcctcggcctgccgagtagctgggattacaggtgcgcgccaccatgcccagctaattgtgatccgcccaccttggcctcccaaagtgctgggattacaggcatgagcctgtatgatcccagggtgccctctgtcctcctgcaagtgcttgttatctttctttttaaattaaaaaaaattttttgtggctacatagtaggt

SEQ ID NO: 1564031 - DNA, 4001 bp, Homo sapiens
gctggaggccagagggcggcgctcagagttagagacgaagaatctccctagggatgcgactccgcggctacgggagaacacttctgggggcggggctgcgtagtgggtggagctctcctgggaaaggactttggggaatgagtcagggggcggggctctgaatctgagcctgaggctcttttcccaactgagatccctctgtaggcggagctcaagcgtaggggcgtggcgtaaggctcctggatttccccccgaaggcggagctctgacaaaggcgaggccctttaggggcgccacttacctccagccgtggagcaggaagccagggcactgctccctacaggagttgcagggctggccccggtctgggtcctctgcctctggaggctgcagtgggcgggggcagatgcagggccgggtgaggcgcggaagcagggaaggagaagtcaacgcccgcccctccacttcattgcccgcgaccgcacgctggggcctgtcttacctgggcagcgctgggcaggctgggacagcgcccagagtgcgggggagcgggacacaaccgaggcagaggcggggcagttggagccacctccttatatgtccccttttcagggaattccccttcctaggctggcctcggacccccctccccgtccgcccctagcctcagacacctcccaccagccttagatccttccagggctcaagcacctcccctataattcattgtactctccccactagagcacagaacccctactctgggcatcctctccccggcctcatcccggttccctctccatctacgccgccagcagcactccagttccacagggtaggagacgagaccgcattcttccttgagatccccacgtgaaccctgcccctctcttcagaagctcaggagctcctcccctaaaccctggcctcatgccctgatacccaaggaactggggaccctccccaggatctcaggaggcccctgctccattcagaaacccccatcccaagaaaccttggcctttacccatcccatcctagggctatttattccttctccggaccatcaaacccagaccccacattcccaggtcagagacccactccaaaggaagtgaaagaacctcctatctaagaagtcaaaaactcccttgctcaggcggaaccctggaagccttgtccccccaaatcccagtctcttgactctcagcatttcggcatcccaggagtgtaggactccatccctccgtgcacattcctccaaggtactgtgtcctttagaagctgaggaggtcggccaggctcggtggctcacgcctataatcccagcactttgggaggccgaggtgggcggatcacctgaggtcaggagttcgagaccagcctggccaacatggtgaaaccttgtctctactaaaaatacaaaaattaggcgggcgcggtggcgggcgtctgtaatcccaggtacatgggaggctgaagcaggagaatcgcttgaacccaggaggcggaggttgcagtgagcggagatagcgccactgcactccagcctgggtgacagagattcagtctcaaaaaaaaaaaaaaaaaaaaaaagcagcagctcaggaggttcctgctcaacctaaggcttcaagacccagttctctggccctcaggattccctcccacaattcataagagaggggtccccaccaggtcccaggagtgctgatgaaagtgtgtggagaggtgattagggggtttgggccaccagatctacaccttcctccatccattcgcctccagcagccccagccccaggtctgggaatgcaggggatgggattcccagatcctctgtggggcacctattcgctatgcctatccattgcccccttgcctgggcctcagtttacccccgacccccaccgctgccctgactcccgctcaccgcacgcccggagcggcgcctccgggacccacgcgcgaacatggcgcgcccgggcagggtcaagccgggccgggtcaggcgaatgtaatccttgcgaccgtcaggccaccgcgcgtccggcctgggaactcggttccgtaaacctgacaccctcgtgggaggagcgcgccccgcagggcccgcccccgggcatgtggtctctccgctgccagggcgccccctgcctagaggtgaactgcacgtagcccggagtgccccgcgggaaaggcctctgccctcccgctccgggccggtgcggggcgtcacaaggcacgacccccagaatcccggcgtgccacgtggcctctcacgggacctggggcttgaaggttctgtagtggaggatggggagactcagaggtggccaactggactgagaggggtggcgcgctagggtgcttgtgttgacgttttgtgtcgatttatttcggatgcttatttgggagaggggttaaagacacctcttggctcctccccactggtgaggttccgagggtctccccgatgaatgctgcaacaatgggccccaacctcacccgcagccccagctggtgctcgctgggaacctgggaacctggccctagccaccagagagctagatcttatacgcactcctcccttctcattcccctctcagcgaggccaggttccaaagccctcgtcccctctctcccctcatccttataagcctagctgtccagccccgtccccccaccccaagtcttgagaagtagatcttaaagccttccctcccccacccacatttttctctctccagttatccccttccccagctcagttccagggcggggagcctctccttcacgctctcaggcttggctgtgcctccgggctggggggagggggtcccatggcctcagtcagaactcggcccgggtctctatgcacggagactgcagcggccaggcccttcatcgcgggccccggggacctctccccgccccccattacacatgtccctgtcacttcccgtggagtggagaggtaaaagagaataactaatgaactaaggagtcaccccggcgccccacctcccctccttgcctaacctgtctcccatttctccagcctgggcggaggcagggaaaggagagacagtagggtctgaagattagggatggggtcaggcaatgtgaggtttcctcctattcggaccccttggggatttgaggagagggttccacaggggctcggaagaggcttggctaagggaccagaattagaaccaactcctagaaagaccgggcatttggtggccagtagtgggagggtgagcagggctactcagagagtgacagagtgattggcaggagaggcttcccagaggatgctgctctgcctaacacttttgaaggggcctgaaatggtgcagcaagctgaactgcggtcggtgggtccgggtggagcttgttctcaccacctctccctcctttctcccccggccaacctcctccccggcgcccgaaaaagacacactgagaaatcagagccgggtagactaggtggttaaggagtttatttgggagaggagaatcatatttgttcttccttggggaggggggttctttgaacaataccgaagggtttgggaaagggtaggggtctggaggggagaaggaggggccacagccagacaaaatggcaacacacgatcacaggcactactgacatcacagacatagcagagggtgcaggataggggctccagaccaggcctccaaccaccccaggacgggtggaggtgtggagggagggagggcgcaggggaagggggaagaggggtgggccagtcccacagacccgttggttctgtcctcctattaacctagctgtttcatcacgggagtggggaagggtgtgtgtggtggggtgcttctctctggatcccacgcctcaccctacaagccatatcactcgactcttctcaggccacttccgtcccaagtcgtagccagagccattctcccccacccctaacaaaacccatctggaagctcctatccaagtcc

SEQ ID NO: 1564032 - DNA, 4001 bp, Homo sapiens
cggctgcgccagtcagggttcctgccccacccttcttccgcgcaaaacacacccagctctaagattagaccaggacagctttccggggggaccaagacaagggggaaggcagagagagaggagggagggagacagaaaaaccaagaccggaaggggacagggagagagacaccaagagacagaggaggagaaatgcagagagacttgaacagagacagaaagagggagagagaagagaaacagagaaaagagagagagaatgagataaagaggaggagggagggagaggagaaagagagagggcctcctcccactctgtccttccaaattcaggctttcctcgtgggcccttcctcaaggtctaagtggcaaagaggtcactgaaggaagctaagtcccctcttcctcagcggttctaaaggccccactggctatgcccgctggtcttcctaagtcataagctatggcctcgagcccttgggcttcccagcccagcttcctcctttccaaaatgaggacaaacaggagttagagggcctgagagccgacgcctcaccaacacacccaggacagccccctctactctcccatttattttcttgacagccaacaccccacttagccatacggagtccctaagtggcacaggcgggccgatgacaactgtttaaatccagcgcccacgttcagttgggatattctgacccactcagggctgctccataaagcagcgcgtgtccggatgcaagagcaccgagaactcgaaacctctctgtcaagctgcccattcggggttaagttcaaagacagaggacaaaggaaacggataaagcgtccgatacaagaattacccatttcagaggcacaagacgaagagcacaggcggtgtcaggacatgttaggatccgtccccagcgctgccgtcctcgtccccacagcgccccgggacacctgtcccccacagcccagctgctcctgcagcccctggagaaatctgtacattccctgcctctgggcacacagggaggctggcctaggggaggcctgcaggggtcttcgcaccccgcgccagtgtccctggggccgctgccagggagggagcacgaggtcccccaggcgaggtgacccgcaggaggttttgtgacgtcggacggcccaggccccagagtgctgtgtgtgctgggggtggagggtggtctccgagaggagccgtcggcatttcaggttaggcacccggccggtcgggggtacttgcctgggctggggggctggggagtgcgctccacccgggaagacccggggcgcaggtgcagccccgcacggggactccgagccgaagtagcgggtcagggccctccccaggaggtcggcacccagggccctttgtcctactacaacgtcccggccacgccgcgcgcccctgtgggccgagtccccgcccgcactcactcacccacggtggccagcgtgtcaaagtcctgcaggctgtacacaggcggctccggcgacagcgcctcagggctggggcagagcgcgggcgccccgtcgggggtctcctccgccaccttgcgggagtcgctctccgccgcggccgcctgggccagcccgggcgcctccatggggacgcactcaggtccggggcaccgggccaggccggagcgctcggggagccgggcttcccgggacgcagcctcggagggcggcgcggcggcggcatcaacagaggctccccatgcgcgctctcgcctcctggtgcgcggtccggcgcggctgacggagcgacggggacaatggctgggcggcgctcacggcacaagcagcaacggccccgagtgggagcagccgccggcctcggggggcgggcaccgagtgcgggacgactgcggggaaggcgggggccgcggcccgggctggggggggcgaggcgggggccctgcgcattccgggtctcgcgcccgccgcctcctccagctcggtagccgcgtgcgcgctgttggggcgggcggaagccgcctgggcgtgaccgcgcctctccccgccctaacccggccgcggggctgggggcgtcgccttcgcgcgcgctccgcccccgccccgacccagcccaggagccggagacccgggcgtgcggcgctggggaggtgcccacgccccctccgcgcccggggcacccctggggtgggacccaggctgacttctcctcggggacgcactggcgggccacccgcgtcgctgcacccaagcccggaagatggggaggcgagggggcccggggacagggagggcgtagctcagcagaagtgaagttcaaaactaaaaagtgaaactggcgtttggtgaagagaggggctcggattagcccggctaatttttgtattttctcagtagagacagggtttcaccatgttggccaggctggtctggaactcctgagcacaagtgaaccgcctgcctcgttctcccaaagtgctgggactacaggtataagccaccacgcccagcctctgattggctttaagtcatagaaaataggattgctcagctggcaatctgcatacagatcccctctgccctccccccaaaaagttcagtactcctgcgggtgcttgtttgggacctgagagaatttggaatgagggcggatccccaagaggggctgccgggtcttcgggatgagttcagcgtcctggttttgctgtaggactctggtgattctagatttctacttggaaggggcggggaagggcgggctcgaccctgtgcgtttctttgcagcttcctgtggatctagaattctttacaaataaacattcctttaaaaaactagggaaagacagatttgagagatcgcccgaccaaatgtagtgcgtgaaacttgattggtcactgtttcaaacaccccggcgacaaccctataaagaattgtgcagaggcatttcaatttcagaaaccccaaagatttttttttcctggcttaagtgtggctcaggcaatagttggacatacttatatttaaaacccatatccgtgtggatttgaaatgcaaatatagctagatatttggtcacccctttccccagggaaatgcagacagtgcttaacttgcgggcctggcacggcctggacgctgcgcccctgacccgcgaccagggcggcccaggctgccggttcgccgaccacagtttgagcagcaaggggtcaaactgcaaacgcctttgttttgagggatctcagcgattctgcgattggagggggtctccagtccctcagtccgcaggtcaggggggctttccgagagccaaagcggcctctaagtcagaacggacacatttttagggggaccaggccgagccatccttccacagctaacggggagggggagtcaggaagtctgaacctggctcaggctttggatttctggcccctggctgccagcctcgcccagcctccacctgcattttgtgggtggcatttccccccgggggtgacacccgctccctatgctctgcaaaatcctgagctggaatgcaaaacatatgcgacaccagcaggcccctgccatcccctgagcctggttaggacaggtcacggccctgccaagcttcaccagcaagccgcgcaatcccttgatcctggttaggacaggaaacggccctgccaagccctgcctggccgaggggttcagggccagcaaggaacgcgcactcaggaaaagttcgtgtctccccgcggaacgcgcgccctctccactagggcctgaccttggaaatgcaaggctgcggcctcataaagtccttttaatcaaggcccgggtttcacacccaattaagcagatgtccttgcctgcaaattgcacgcaggaagaagaacgtggcacagatttgcagcgttaaactctgcttgagctgctggttggtctgattccaccgaacccaccctgaacttgaccgcatagctacctcttcttataaatagaccctgcacgtttcacaacaccttgc

SEQ ID NO: 1564033 - DNA, 4001 bp, Homo sapiens
tcctctcccaatatagcctcaggttctggggtgctgcattatgcagagggcagaaggattaacacaaggagaaaataaagctttcatgccttcacatttttcctagacgcataggaaaaggattaaatatccacaggggccaaagaaaacctctaaatgaaaaacattcttgtcccctaactatattgccaatcacaaagtctagtcctgttttgtattctttattaaggcccatgagccataatggtttggaaaaatctaaagacagcagtttgtaagcctcttttaactaaggtattgcctggttacagatggcaatgtttacactatcatttgcatcacaatcagtagcacaataattcgggaagaagctgtccattatcggtgacattactttatcagctgggtctaaaagagataaggcgagttaaacttggaaatcagtccaaagaaagcaaaaaagtaagcaaaaacatttaggaaaaaatattcgaaatattcttatctgattattaggtgaaaactttccccttaacaaatctgtaagattgtgggcagggctctgatttaatcgatagggtaacaataaaatacaaattacacctatcagaaactaaagatcccacacttaggtggaaggggcactgaaataatcaggtaaccaagtcatctctaaaacagtcccatggtgccggtagagggtgtaagtcggagtcgaggaagcaagttttactggcaaggcaatggaaaaaacgcaagttgcaatgcactgtccaatcctagtcttccactacattgcctgtcctcaattatctttaacattcaggtataaaattgtttcctaaattccctacacagagcttaaagaaggagccaagtccaggatggactcggttactgaaaaatacgcttttgcattatctgtaccactagctgcactggggaaggtcaaacattccagaattgagatttccaagattttttggatggctcaagctgagatgctggctatcaaggatgcagagtcaacgcatcactttaacaaatcaactagatttatggctccaattactcaggtagatgattcataagatgagaaaagccaacgcttgctgatctaagggaagtcgtaataattttggcgcctgcagtatataatgtcagtttccctcaacaccaagccgaacggaccaacaccatttcgaatcaaaaagctgcttattggactctaggaaaagaaagaccaggagagctcagtacgcaggtaggctctctaaatgcaagctagtctaagagctgaagcaacccagtccagcctgggtggctcaacagcaaagccaagccacgtgtccctaccgccctggctaagcgtcggtcccctctcgtcgctctatgcagccactatctattgggtcccccagcccttgccctcaaacgcagaagcttcgcctcacactccatcttttgactccaccccaccgcacggtaagaatgaacgtgaccctcccgcgagaggtaaaataacggaaacagcccgtggggtaggctagtcacagagctgcaccctctccccccaacccccagtctgtttgagctcaagcggcgaccccatccctcctatactctgccgcctgggcaggtgaggtctagtcagggtcccaacttggtccttaccaggtctcctggttgctgaatttcttagtcaccaccttgcctagctccaggcccaggcggtcagcaattttctgagataagtcctggtgggagctgccgctgaagattttgatattcggcatcctggccaactaccctaagcactccactaagcgatcacggctgctgcagagaccggaaccgaagtcggccacagactcaataccaagcgctttgcgttgctactccgccatcttacattcccgcccggcgcgcggctctaaattacccaaagcggcggaggtggggtcagcggcgaagtccacaccccgctggcaacgattagctaagagggagcgaagggcggggtttggtcctcggtgtagctctgcctccttccgattctctcaggtattgggtgaagagcatgaacgggggcgagactaacccatagcccggccccctgtagctaggctgttggggacaggagacgttggactgggggtggagggatgctggtgacgtctgaggccagatcgttcccgctagcgggaaatcaaccatgcctgcttttttatttcccctccctcagcgcaggaaagtaagtctggctctggtttacagtttcctttaagaaaatctgtttatcaggatgacagccacgagtttgcatgtttctgaacacattttttatctctttataaggatggggctgaattaaaacacttttacatcacagacgtgcatgcaaggagtttgcttgcccattgtaattgcagtgtcgcctttgcctgcaagacagtttacatgggggaagtgactgaaggcatgccacctgaatcatccaagagacactgcaagagaaagttgttttgtttctagtgctggaaccaagtatgttgaaacaagtgaaggaagatggattttccaaactatctggacaataaagatctaacttttatagccctcggaaaggaaagaaagtatagtgttctatgggacttcagataaagagccctgaagggatttgaaaaaacctgggttttagtcctgtctgcctcatgtaagcctcaatgtcatcagctacatgttgctaatgtggccttttacaccatgttttattatttttatagcgatacttgttaattggacctaagtgagcctttattcttgcaccatgtttccattaagcatattttaagcatgggttaggagaagataaaaatcatacaattctggaatcaaaagtgaccatagtgctcataactaccaaatgtaaaaatagaagggacctcagagatcatatagtcgttttacatatgataaaactgagatggaggtgggagagggatttatctaagtggcaaaggcagaaaatactcaaagcagcatcctgtctttgtcttactgctattttcagcagtgtccatggaggacttctccttctgaccttttttgcacttttacaagctcagaaatttaatgtaggcccatgtatataggaatacttggagaaggaagtaaactgcaaggcagaatattagtagtcttccatcataggccattcatcaaatatttactgagtgttctattgcatgcaaggcagtgtgcaaggcgttgaggggactacaaagtatttgccccaagggattcgttcattcaataaatatttagtgaacattctttatgtgctaggccctgtgtattggcacaagaatacattagtaaacaattaaaaataccctgctgtcatggagtttacattctcaaacaataaacatgtaaataagcaaaatgcatagtatgtcaaatggcaataagtgttgtggaaaaaaaaatcaggcaaggaaagtgggataatgtgccagagtgtagaggagaggagtacaattttaagtagggtggtcagagaagacctgtcttggaaggtaacatttgggcaaagacctgaaggaggaaaaaaaaaacaaaaaaatgagccatgttgatatctcgataagcaaagagaacagaaagggcaaataccctaaggcagatgtatctcgcttgtttgaggaataccaatgcgggacgagtgttgtgtggtggaggtggaatgtatctataagagaaaaggaggaaagtgaggtcaatgagataagagtgattggaggccggccaggcacggtagctcacgcctgtaatcccagcactcagggtggccgaggtgggcggatcacttgagctcaggagttcaagaccagcctgggcaacgtggcgaaacctcgtctctacaaaaaatacaaaaattagccaggcgtggtggtgggcacctgtagtcccactgaggcaagagaatcacttgaact

SEQ ID NO: 1564034 - DNA, 4001 bp, Homo sapiens
cagtggcacatgtggtatttttaggagaaactcaacactgacttagcagtgaactgatctagattaaccatgctccttagcaaaagatcatgctgcactgagtacctggaagggcaacatatttgctttcaaaatttacttcatcaacaaatttctcctttacttatatgacgacaccttctgaacaaaaactattcttcttctcgtgttcttacagcgactgaaacttgaacaagactggcaaaatactgcaacactcaaacctagctctatccttctccagagccctagaccatcctctcagacttctgcattaaacactgcagagtggaattctttagccaaagtccacctgccactcattcacaatgtttcttcgcttatattatcatcggagccataactggaatttgccacctggaagaagtcacgtaagattcacatatcctaaaaagctgacttgccaaaatatagcatcttccccatcagtattaacataactcctccttaagaaatttttgcctaaccccaagtcaagattttctgctagaaattttatagttctagattttacaattaggtctatgatccacttcaaagttaatttttacaaatggtgaaaagtatggatggaagttcatattttttggcatatgggtgtccaactgttccaacaccatttctagaaaatgttggtaaaattgaacctttgccaaagatataaaaattatcagtaactgtggacagttaacggtactagacattggaggaagaagggggaaaaatgagaccaatttgaaatgagtcaaggagctgtgtggactcaggcagatagacaaaggagccccccaggtcagcttccgaggatggccaccacctgaggctctcctggacttgagaaatgggtgaaagttacagtcgaatcacggcgttgttgctggacacagcagagtcctagaacaagaaggaagctgaaagtccatcatctttaaagcagcaagagtagtgggagcagaggggagcccagcacgtgcgtcctggggttctcacagtctttcaaaccttggcacaactgcaccctctggataacgcagtggtctgcgccctggctgctcaggagaagccagggaagcttgtaaaatcgctgatcctccgcccgttggatcaaacccttgggggcaggtcgggggaagcagcgttcggaccgtccccaggtaaacccagcgtgcaaccagagttggggacggggggaaacctttagtcgcacgcactggtctgaggttcagctttgtagggacgcggaaactgggaccagccaacccaggacgtctctccaccgcgcgctgacccgatgcggttcccgcccgctgcgcccactctctccccgacggtctgtgaccgcccagacgtctcccttccgggctggggacgccaggccgggcggcaccgctgggaggccgggagcggctcgggaccgccgggtcgccgcggtcccaggaccggaggccctgcaaccgggggcacagccgaggcgcgcatcgggacgcgcggcgccccgcctcggtttcttcgcaggcgcgggcgcgggggcgcggaggccgcgttgccaccgtcccgccccggaagggggagcgcggcgtccgcggaggtggcccgggcaggcgccggcccccaacccggccccgcagccgcgtgcccagcgctctccctagcccggccgccggcgcggcccccacctggtctcctggttgctgaacttcttcgtgaccaccttgcccagctccaggcccaggcggtcggccacgcgctgggacaggtcctgatgcgagctgccgctgaacagcacgatgttgggcatggtggggcgcggaactccgaggggcgcgcggcggcggaggaggtggcggaggcaacagcgacagcgacgcgggaggctgctgctgcgggagcgggaaagcgcggcggctagatgtagggaaggggaggagcggagggggaggagccggaggaggagctagagggggcagagagggaggaagagcgggcgtggagggggagctggaaagtgccggggggcgggggcacagccctggcagcagttttggacgccctgggtggtcctgaagcccgaaggtgtccttgctccgcgagagagctccgagcttcattcttgatcttccagacctgcctcgcggggagagccaatgaaccgcggttagctgggcacagagggagagttcgggccggggggatccctcgaggtgcttcgcagcccggagcgacttcccaccccggaacaccgcaaacccagtgtgggcgactggtgttcagctatagcaagggtctgcaaactacagcctatgggccagatcgcgagagctccctgtgtttgtaccagagagctaagcatggttttcatacatgaacatttgcactttatgtgatgatagcagacaccgcctttgaactccaattaagagaaatatcccccccgcaaaagaattccttttctctcattaatagatgtgagttgcaaataattgtactcaaatattaccgtattttggattatatcaataaaaacattgtgacaattttttctctcttgttatgtaagttcctacgtaatatcttcccttttcttgcttggtctgcaaaatgtaaatattggccatgtggtccctcatagttcaaacttgatgacccctgaactacagagttgcccctgcaccatgtgtccttaaaaaatccaaccactatgtgagtcctcatcacaggctgaggggaagtattgctcttggtggctcactggatcaaaccaagtcccccagattcaccatttttcggtagatgtgatggtccttggggcacttcacaaccttctgcctgttgggtgctcaagggcctgatcccaggaacacagatctccctagacaatccagctcagtccctccacatccctggagtcagggcctccttcctctctttcctgctagaaaccagcaaaaaggttttctcaagatgccaatgcagtaccagagccaacttcagggcacaaaccaagtgtaggagaaaggaaagcagtccctgtctatagagggctggttggtgatgctggtcacagtttcacactcctcaacaaaggctgattcaaccgggtagataaatggcttggttttactaatgtttgccacgaattggctctccatcaacagcaaagcccacttgcaattgggttgtagcctactctaatcagacttcataatgggatttgggagattacagggatgattcgcatcattgggatttttcatctgggtccttgtactttgcaaggagattacttggcacatcgagtgtttcttgtaaacttttgtatctgccagcctatcaaaaagttattcaaactgacaattttagcagcatttctggccctttttcattccgcctagagatgcatatgtgccctattatgtgagaaaacaaacaaaaacccctatctgcaatggtttattatctatgtatttcacagctaattaccatagcaatgagatttatacttgacccactatgtttaaaatttttattgagtctgctaatgtagttatatttaaactcttctaataaaatttactatcagcaaattactataatttttatattcttaatatttctctcatagataaaattgactaataatggtttcttctaaatatatagatgctcttctcaaagggaaagtggcatcctcttagcatgatggggctgtggttctttggtaacacagaaccaaagctgatggactataaaacagtaaaagttaaagcccctggtctttgggtgggtaaatggctgcagatttggaagctcggattgaattgtgacaaaccatggacttgatagcaccaaggagaaacaatatctcagttggggcaactaatacaatgattgttggttcaatagtttgatgagttactctgcttaaatgctaaatgtaaaca

SEQ ID NO: 1564035 - DNA, 4001 bp, Homo sapiens
ttaatctccagtatgtagggcacatttgtgctaaacagagtgtggtagggtacaaggtttcaaatagggcacattagtgctaaacagagtgtgggagggtacgtggtttcaagtagggcacattagtgctaaacagagtgtgggagggtacaaggtttcaaatataaaagcataaatgaataactttcacctctttccacaacccttttttcatccttcctttttgccatcagctgtgctctctgttgggtgatgcaggagctggcattcccccagaatggaaatgggcaaaataagaaggcagtggaggaccaaatatcggaggaggagcaaaaggaagaggcatagtgagaaagggattgaaaatcggaggtcgaggagggatgaaacaatgaacagtagagcaagaaggtaaacctggagtactggaagacaacgggataggccttggccaattatgcatggggtggcatgggcccctgagtgggaaagaaacatgagccagctttcctctgcaggctattcgtgtatttccgggcggcacctccattactatccctgatctaagggtgggaatatgtgaagggcctctcacttgtgggcccctgggtggaaagaaccctttaccttgtggcaaagctacatgcaaccttgcgttattactgcctctctcagtgcccccattgttgacctttgtgccccctactatcagtgcaggagggccgccagagacttcccaggacacattaatagcatcctgtccctcctgcctccagcctgccagtgcatcagagctgtttacttctgctgttgctagggactcttctgcaacagcaggtggtggcccgtaggggtgtctatgagctctcaagctatgaagaggaatgcaggatcctgttctttcagagggccactccagttgcttgctatccagatcagtcagcacattgacggaaggtctcagcggtacttgaggttgaccccagggctctgcgtcatcctctggcttggaactcagacattgcaggggcatgtcgtggtgcagctcctggttcccatttttgtccacagatactaccaagggtgaaggggcgtgccctccaaggcttgcaaaaacagaaatcaaacagctaataaaaatggaaatgcactgaccagaaaatagctacaatatgtaattgactgagctcactgaaatataccagggaaaaaaggagtgccctctcccctatatgtagccaaatacttgctcagcgctctggccccttcccaggtggcttctttagtactaggctacatgattacccttcatgactactcagtggcctatttcattcctcatttccccacctccacaaggcagcaaggaagcttagaagatgcacataacttaatagtaagcatataatagaaaataccagctttttcaattctctctaggatctatgattcactaatcctggcattcagattctggcaagattgttctggtatgtcttccgaagtaaaatatctttttcttcacagaagtcaaagaaaagttagttatgttaacaaacacacaagtttctcttcttgaggtatcattcaacactcacaccaaattttgttaaaaattctttcattcaaccaccaccacaccctagagtaagaatttcctcatgtttaaaccccactgtttagactagggatttgtaaattttctttcaaaattacacttcaaagttgccactcttaaatccggtattcttagtaactaaatttatgtccttcaagtttttgtctgtaatttcctcccacatctcctccaacccattcatccctgtcccagttacacaataaagcaattcaaactgactttgccttcaaaattaaacagttgtactcggttttgtacttacacgttttcaatacaagccatgaagaaatttgatcagaatagctttcctgaggtggtggagataacccactgaacaggccagctaggtctggagaaatgactcctgcttctgctttagaggcttggcaactagaatgaagccagggaccaactgcttctttctagatttggagttctctttctggggttaccagttgctaaggaagggagggagaaaaggagtggggaggggggtgggtggggatgaatctgtgacactcctttgaacttaaatgtgggactggtgtttgcacagtagtagatggatggtaaaggcattcactacattaattctgatgcagggcagttggaaagacaaatcatttcaagaaggatttagaagaatcatggaagcatgatattttttaaagagttatttatgaagttttagtttctacaaggtagttgtcaagtctcctcaaatttggaaacacattgagcagagtattgtgcctaatattgtaacttaaacttccagtttggggatgcatattattaacttggtggagaacagaggtttgggggctaaattgcttttctatctgtgaagatgaaacaagaactcctctaagaatcattgtgacattattttttagcccctcacgttgcagttatatccttcatcttgtctgttagtttataagctctctctctctctctctgtctctgtctatgtctgtgtgcacgcgcgtgtgtgtgtgtgtgtgtgtacgtgtgtgtatttcctgtaatagagctctggaagtttctctcaagttgggagggtcagaataaatggcataacaggtatcataaatttataaatattagcttaggtttggccatgcaacatttttgcatagggaactttctgtttgtccagcctaaatttcattttaagcaagtttactttcccagctttcttttctgccattgatctacagattaattgctccgaaattacaacaaccattccatcatccaagacaattactgttgctctaggacaaagccataaacttggcaaacctgcctaaatttacataaaatttgtgctgtgcaggctagacctgggagattgtgtcttccttattttcaatattagtatatgttgctacagttcaacagtaatgtatatttcttttctcttaaggaaagataacagactcaaataccatgtgcttcaatttttagatatatggtgtctgtgtatctgtgtgtgtgtgagagagacagaataatgcataagtacaaagtactaatgtaaaggaatggtcactactgcaaatcaacacaactcatatagaagtaacctttggggtctgcaagtccacatcttcctgccagagtgtgttgtctccatctatacaagaaagtggcatgtttccaacatattttccagaagaatctgttcacttgcctagcatggttcactattaagtaatctcttgattccccagattctgtttctattcttgcttcagtttattacgcaccttgtccttatgtaaaaataatagtattattagcagtattattgttgtggggtgttaaagctcttttacttcttgtcgtatcagagaggaaattgcaacttgggttaatgcctgctaatagttggtgaatcacatttagataaatagtttcagtataataggttgcatatttttttcctgataatagcaacaaagcctgaggaatgccttttgttcttatcaaattactataataataaacaattttacctagaaatacctgtttggtaagatatcatcttagttggattacataacagtatggtgtaatataggaaccaaattgctgggaacaatgacaatgaccatggcaccaagaattttccaaagccatgaagtgtataatttatggatattacctcatattttgtttgtaacttgttttcctttgtgcaaatagtccatatttattgaatgtctactgcgtgcattcactattgtgttaagtgttgattttaccaaaaaagttaaatatgcaatccatattgacttcagggaatgttctaattttcttgggaggcaaaataacatctataaaattattgaag

SEQ ID NO: 1564036 - DNA, 4001 bp, Homo sapiens
tgatccacctgcctcagactcccaaagtgctgggattacaggagtaagccactgcacccggcctatgaattaccatctttctaacagcatttattaatatatatctgtaagttagtttattaggtgcttatcacatgccaggcagctctaggtacaagggtaacacaaaagactgaggttctagtagtaatggagaaataaggcaagttatataaatttaacagaaaagggtgtgattaattcactctggagaagatggcaaaatttttcaagaagtgaatcaggctaagtctagaaagatgaataggagttcatcaggcactagaaaagagaaaaggcatccctaacactccccgccctccacctgccccaaatttgggaaaatagaaaaagaaagaataacataacaataaaaccagaagaaatcctgttcacctcatgcctggggttggtgcaggggtgggggttgggcggggtaattgtgtttttaagtatacttcagatcagaaagtaaacgtttataaaacgggatttacaatcgagggaaaggggtggagaggaggaagttcagtttattttgttgtattaacttaaaacaaatgagtaaaaatatcaacatctatgcttgggaacacatatactatctttcataaaagtccctaagtttgaaaatgaaagcatatggagctttatccaatattacaatatttgccctaatgttttgtatccttaatattattttcaaaggttctaaagtgagtcggcccaagatcttgacagcacatccacacacatgcccaataatccactcttgattgaaacaatcaacagtagcctaaccaacttttcacttaccctggcttgaacaccttcgcatccttcaaagtctggctttatagtatgaccatcaacagacaaataattaagctctaagttttgtcactcaacctcttcatcctttcattcaattatttcctctcaaatcccattagtttcgcttttctcctaaagggactcgtagaaaatacttgcacagcacaatcacaaaaaccagtggctggagccagagtccaaacgcgcacacactactttccagtcatatccctcttggggctgttcctaccagtgatcaaattcagcggaccaggaagaaggaaaaacctgaagcaggaagactgtttctcttcctttcacttccccccacgccgcctccccctccccccgctctcccatcccccagggccgcaccgcgaccgacctcgcacgcaccccctcccactgtcacccgccactgcctacaaaacagtcatagcctttgttaaaatgtccacgggcacaatggatcagaagagggacacattcccgggggtgggtaaaggaaagtcacacgaacgccacgccctccttgggactagcccgggccgacagcccaccgcctccaaatcctttcccctccgacggggaatgtttctagcaactctgcaccagagaaagcagcgctggaggaagggatgagcttgggacgtccctcatgggcaccaagcaggggactgaacttgaagctgggacaccctccagcaccgttggcaagcctcgcggtcctgcccagtctgtgtgcggacttccagcctgtaaaccccattccttcaattttttttctcgtcatacccaccctcacccactcccgctaccacgcactccgctccccacgcggccctggccggacacccacaggcagcgtcgctaccaacgctaccgcatatctgacgggtttctcctcgcagaaccgaagtcacccccacacaccccaatccttcctggggcgcttcgcctggatcacgtttccccagctaggaacccagcgcggccgccacactcacagcgggtcccgctccgctactcgccgttctgcgagccgcacgtcgcgcctgcgcgctcctatttctgccgagcctagctggagccaggaaccgggagcggactggaagggaggtggaaagaggcgggggctgggctggggcggggttaagagagaaggggcgggaacagggtggggcgcgggggtgggaaacgaggggcggatcctccaccgcttctgctgggaagacccagggctcagggcatcctgctggagctttccactattggggtttatttataacacatacagaaaagccgtcgaggcccctctgtgcactcccacacgcaccgtggagaaagcctggctcggcgcgggcccaagtagtcagccgttgggccgccacgtctctcctagccaccgcgggtccccgccagcctttttctctttcgcatacatacctcaccacacattattccttttcctagtcatttctcctcatcgcgtactcttcagccctggtgaagtgaggggcatagggatttctcatccacagaccgcctgtgtagggcatcctagttaatatacctctttgctatgtgtgagcccagatcgtggttggtgactattcgaccattgtccactgttacagctcagagaattgcactttccttgaggaataattcccttgccactgtttccggacaactcttggtgacaactatctgctttttctaaaaaaaaaaaaaaaaaaaaaaaccgtcttgtacaaacttacccaaatatcttgagaagaaaacccatctttgacctcgctttttaggtagagctatcttagaacttgaatcttaaacttctacaagcccctctaagaaacagaataaaaggcttttgctattgtgtaaactttgacctaatgcttggaggttttctggcattttgcatcataaggagtctagcttgattattattccatgctgcatgcgtgcttggttttaacttgtatgcttttctgtttacagtctggtcagctgtggcatctcacatgctttcagatcagctattaaaataaacacacgcctgagtgaatccaaagtgaattgggctgtggacctgaagtgatttattccaaactaagttccccttctttttactttaattgtgatggaattaagaaacatttggcttattaagaataaaagaattgccacaggaccacaccaatagtctttcctagcaagcattttaactgtgatgggagcattttatgggagagtttggtgattgcccttaaagatctgaatatcccaaaattcttccatttaacctttcttgtcttccattcatatattttacaaatcagattttctagaactcatttctatcttgcacttgtcaaataagcctagggaggatgtagagagatatattgccaaaaggtatattggtaatgtaggcacaaattttgcaggattagtaagtctgtaagtgcctggaagcaggactttgtcctattcatttcactagtaaaatatttcacatacatgttcttaaaaaaattgctaggctaataaaagtaagatttgcatccttaataaatgtgcatatgtgtttttttaaaacttttcacttgattatttttttcttttttgtctaaatttttcaggatattttggttgaaatgacaaaaactagattgaagtagatcaggcaaaaacaggaagttattgtgtaacccaagttgtgaaagggtaggtctatgattggccataggattaaatggaaccagcaacaggaatgctttgaattccagctcaggctctcaatacagacagggtcattctaacagaacatctcaaagtcatgttctgctggtttggcaccgtagcctgttacaagttgctcacacctaccaagttcctaccagagagaaagtatctctcttctctcacttccagtttttaaagcaacagttaaaacatctgattgggtagaattgagtaccgtaaccactcctgaagagaaaatgcgtatgtgacataagaatgggacccaattagaaccacatggttaaagaaaaaaaaataaagagaaaaatttctaaatgaaaacaaacagtaagggggagatgccgttttcagaa

SEQ ID NO: 1564037 - DNA, 4001 bp, Homo sapiens
agtagagacggggtttcaccatgttagccaggatggtctggatctcctggccttgtgatccacctgcctcagactcccaaagtgctgggattacaggagtaagccactgcacccggcctatgaattaccatctttctaacagcatttattaatatatatctgtaagttagtttattaggtgcttatcacatgccaggcagctctaggtacaagggtaacacaaaagactgaggttctagtagtaatggagaaataaggcaagttatataaatttaacagaaaagggtgtgattaattcactctggagaagatggcaaaatttttcaagaagtgaatcaggctaagtctagaaagatgaataggagttcatcaggcactagaaaagagaaaaggcatccctaacactccccgccctccacctgccccaaatttgggaaaatagaaaaagaaagaataacataacaataaaaccagaagaaatcctgttcacctcatgcctggggttggtgcaggggtgggggttgggcggggtaattgtgtttttaagtatacttcagatcagaaagtaaacgtttataaaacgggatttacaatcgagggaaaggggtggagaggaggaagttcagtttattttgttgtattaacttaaaacaaatgagtaaaaatatcaacatctatgcttgggaacacatatactatctttcataaaagtccctaagtttgaaaatgaaagcatatggagctttatccaatattacaatatttgccctaatgttttgtatccttaatattattttcaaaggttctaaagtgagtcggcccaagatcttgacagcacatccacacacatgcccaataatccactcttgattgaaacaatcaacagtagcctaaccaacttttcacttaccctggcttgaacaccttcgcatccttcaaagtctggctttatagtatgaccatcaacagacaaataattaagctctaagttttgtcactcaacctcttcatcctttcattcaattatttcctctcaaatcccattagtttcgcttttctcctaaagggactcgtagaaaatacttgcacagcacaatcacaaaaaccagtggctggagccagagtccaaacgcgcacacactactttccagtcatatccctcttggggctgttcctaccagtgatcaaattcagcggaccaggaagaaggaaaaacctgaagcaggaagactgtttctcttcctttcacttccccccacgccgcctccccctccccccgctctcccatcccccagggccgcaccgcgaccgacctcgcacgcaccccctcccactgtcacccgccactgcctacaaaacagtcatagcctttgttaaaatgtccacgggcacaatggatcagaagagggacacattcccgggggtgggtaaaggaaagtcacacgaacgccacgccctccttgggactagcccgggccgacagcccaccgcctccaaatcctttcccctccgacggggaatgtttctagcaactctgcaccagagaaagcagcgctggaggaagggatgagcttgggacgtccctcatgggcaccaagcaggggactgaacttgaagctgggacaccctccagcaccgttggcaagcctcgcggtcctgcccagtctgtgtgcggacttccagcctgtaaaccccattccttcaattttttttctcgtcatacccaccctcacccactcccgctaccacgcactccgctccccacgcggccctggccggacacccacaggcagcgtcgctaccaacgctaccgcatatctgacgggtttctcctcgcagaaccgaagtcacccccacacaccccaatccttcctggggcgcttcgcctggatcacgtttccccagctaggaacccagcgcggccgccacactcacagcgggtcccgctccgctactcgccgttctgcgagccgcacgtcgcgcctgcgcgctcctatttctgccgagcctagctggagccaggaaccgggagcggactggaagggaggtggaaagaggcgggggctgggctggggcggggttaagagagaaggggcgggaacagggtggggcgcgggggtgggaaacgaggggcggatcctccaccgcttctgctgggaagacccagggctcagggcatcctgctggagctttccactattggggtttatttataacacatacagaaaagccgtcgaggcccctctgtgcactcccacacgcaccgtggagaaagcctggctcggcgcgggcccaagtagtcagccgttgggccgccacgtctctcctagccaccgcgggtccccgccagcctttttctctttcgcatacatacctcaccacacattattccttttcctagtcatttctcctcatcgcgtactcttcagccctggtgaagtgaggggcatagggatttctcatccacagaccgcctgtgtagggcatcctagttaatatacctctttgctatgtgtgagcccagatcgtggttggtgactattcgaccattgtccactgttacagctcagagaattgcactttccttgaggaataattcccttgccactgtttccggacaactcttggtgacaactatctgctttttctaaaaaaaaaaaaaaaaaaaaaaaccgtcttgtacaaacttacccaaatatcttgagaagaaaacccatctttgacctcgctttttaggtagagctatcttagaacttgaatcttaaacttctacaagcccctctaagaaacagaataaaaggcttttgctattgtgtaaactttgacctaatgcttggaggttttctggcattttgcatcataaggagtctagcttgattattattccatgctgcatgcgtgcttggttttaacttgtatgcttttctgtttacagtctggtcagctgtggcatctcacatgctttcagatcagctattaaaataaacacacgcctgagtgaatccaaagtgaattgggctgtggacctgaagtgatttattccaaactaagttccccttctttttactttaattgtgatggaattaagaaacatttggcttattaagaataaaagaattgccacaggaccacaccaatagtctttcctagcaagcattttaactgtgatgggagcattttatgggagagtttggtgattgcccttaaagatctgaatatcccaaaattcttccatttaacctttcttgtcttccattcatatattttacaaatcagattttctagaactcatttctatcttgcacttgtcaaataagcctagggaggatgtagagagatatattgccaaaaggtatattggtaatgtaggcacaaattttgcaggattagtaagtctgtaagtgcctggaagcaggactttgtcctattcatttcactagtaaaatatttcacatacatgttcttaaaaaaattgctaggctaataaaagtaagatttgcatccttaataaatgtgcatatgtgtttttttaaaacttttcacttgattatttttttcttttttgtctaaatttttcaggatattttggttgaaatgacaaaaactagattgaagtagatcaggcaaaaacaggaagttattgtgtaacccaagttgtgaaagggtaggtctatgattggccataggattaaatggaaccagcaacaggaatgctttgaattccagctcaggctctcaatacagacagggtcattctaacagaacatctcaaagtcatgttctgctggtttggcaccgtagcctgttacaagttgctcacacctaccaagttcctaccagagagaaagtatctctcttctctcacttccagtttttaaagcaacagttaaaacatctgattgggtagaattgagtaccgtaaccactcctgaagagaaaatgcgtatgtgacataagaatgggacccaattagaaccacatggttaaagaaaaaaaaataa

SEQ ID NO: 1564038 - DNA, 4001 bp, Homo sapiens
gaaccagagaggcggagattgaagtgagctgagattgcgccactgcactccagcctgggttacaaagccagaaagaaagaaagagagaaagagagaaagagagggagagagggagagagggagggagagagggagggagggaggaaggaagggagggagggaggaaggaaggaaggaaggagaagggaagggaaggaggaaggaaagaaggagaagggaaggggagggaggaaggaaggaagaaagaaagaaagagagaaagaaagagagaaagagagaaaagaaagaaaagaaaattaaaggtaaaacagcagatctgacatctatttgtggaaacgccacatcaaggggctttctcttttgaaccctgcaacaatctccctcaaaactatcaacatgtgaatttgtcaacagatggcctgccttgtgagacagttggccctcaatgtttgtcagaaccaagatggaatatgatctcaaaattctgcttgcattatggatacctgagctttatgtggtgagggtgtggatatagtatgcctcatggcaaggattttttgcttgaagaaaaatggagctgttgtatctgggtttgagaagaatgcatatagtcttaataagggaagagagaaaaatatgcttatcaaaggaaactgcagtggttttttaaaaaaatggagaaaaatttacataatagattacatatatccatcttttgtcccccacacacctagccttggtcaaaggtggctatatgtcacacctatcatagacccgaatacatgttatcctgacgcacctgctaaagtcaccagttcatttttaagcttcagtcgagccaggaacacccccaaaacagttcccatggcatggcccactccattagcaattctgtagccaccttcactgctgctgctgcctgccacgaggcctcttccccctccctccccaaaatgtagcgcctgcttcttcccctataaatacaccatcagtagacagttactatggcaacaataaggaagcaatcgtgagggctccacgacaaagaatgatgctgcagccacacatgtatatgtcccccatgcccctggtggatactgtaaagctgactgtaggcggaaggaatttttaacccactccccgcaggaacacagctgaatcctgacagcctggaaaggaaggaaggcagggaactggccaccacaaagaccttgcttaactccaccccagactgaagcttctgaatctcaggcctctgggacacaactcccaaagtccctcacatgaagcctggtgaccaccagagcacctggtgtcccaagacatggcctccaaaccacttctccaaaccctagactttatttccatccctcagaactgatcgccaggaaagggttctccaaatcgcatgactcatcgacccacccagtgacacgacaactcccaaattatgctcaaactcaaactctggggcccccttgtccctttccactcaggccagccctgaaagtgcctgtcctcgcccaccttcgctggacaccagcgccctgacccagcaacactcttctcccggagctgttcaatacgccccatccccttggcccggacaggcctctagatcttccctcctcaacaatgccctgcacccagctcgttggccctggataccgaaccgtgccctcgggactgggacacccaacccaaatggcctcaccgttctccgggcccagaaggcggccgccctgtttgcgcacgcagcccgccacctcgctgctgcgcctcttccagcaggggccctgtccccgcccacctgctccccgtcggccaagccccccggtccggcccagccgtctcctccctcccttcctcccctccccgctgccctcccaccgccccgggcaccctgtcgcccgcccctccagggccgaagtgcgcctggaacccccgcccctcgcagccgggcgcccaggcccggcccattacctcggcacccccctgcctgcccctgctttcctctgggggctccgcagctgcccgccccccacaccccgccgttccagggctggcctcgcgccccgcgcctcgcgcgccacgaccgcagtgccccgatcgccaggccgcaatcgtcgcgctgccccgcgcaccgggccgccggccgcctggccgagtggaggaaggaggggtgggggcgacggagtgggccgagggggttgggagagcgggcgggcaagccgggccggaggggcggcggcgcgcaccgagcaccgcgcgcccgcgccccactctgccggcgccgcccctgcccccgcccgtgccgccggggggcggggcctgactggcgggcctggggcacacagaggacccttggtcaaagccctggtccagtcgtgacccaaggcgtgggccctcggaagatacggcgtagcagggagctccggcggccgctcccaaggcccgcgcgccaggcgtccctgcgcagcccaacccgcgtcctgtccccaccccccgggctcacctgccattcaggcccgccgggctcctggggccaacgaaaagagaggggggctagcctgcaacctaggcctgccttgccagggatccacagggccctcagaagaaggaccgagtcgaggccgcgttccgccaatgactgggtgaccttggcttcttcacttacctacccccaccctgccccgggaaggcaggcttctctcctgcaaagtccgagaaatggggagaattctgcctccctcgcgaggctgcagcgatttgaaggaggaaatgggtttggaaaactctaaggctcagtaaggggagaaggaatcttctgcgactgcaaggagcgctagatgggggctccttcggaggccgcactgtgagaagttcagcatggcaggacaagacgcatagcagagattacactagtccaggaggaaccacatgacaggtccactgctaagagaggggcaaaggggttccgggtgggctgaggttctgggtctaggaaagcctccctcggagaaggggatgctgggtttttagggttcctttttgttctctgcacatctagaacccggccaggcactggggttggcgtcctcttcctccctccaccccaagtgttgcttttgatgggaatgagtctcagaaggcggttccagaaccactcccacccctatcccagggcgggtattagcaacctgccttgccagggggcggaagaggggtgggcgaaggccttcattgccaccggccgcctcccctccaacccccagggcctggctcccctagctcccccgatgcctgcctctacacttctctccccgcatggtgctttcccttccatttctgcctcctgttagagttcttccctagcttgcttgctatttcacggctgcaggaatcttccttacccacgacagctcttctatggccttccccccatgcctccggagcctgtggggcagaattccacagactcttctggaactaacctcttgagtttcctagcccaccagcatgttcccatcgtgatcttaacaccgcatagacccttgtgcacttgactgttaaaaaagcagctcttccagtatgtgcacaagggtctatggcttctgccctccttctggcactcccactttagcttctggctccagccacatgaggctacttctacttcccactgcccagaatgcctttcctcccactgtggacctggagcacttgcattcattcttcccacacagtgcgcatgacatctctactgtgaggtcttgcaggatccttcctgcaccccagtccgccattccactctcaggactatctgcagagactatgaacatgggggcctcggtggatagcaaggtgggggaggaggaatagcagtgcctctggagcgtagtgcctgctgcacctcttggtggtactacatagtaggctctattatctccagcaagtgtttgacctctctgcatctcggtttccttacctttcagatgaga

SEQ ID NO: 1564039 - DNA, 4001 bp, Homo sapiens
caacatggtgaaactccgtctctactaaaaatacaaaagttagccaggcgtggtggcaggcgcctgtaatcccagctacttgggaggctgaggcaggggaatcgcttgaacccgggaggcagaggttgcagtgaggtgatacggcaccactgcactccagcctgggcaacaagagcgaaactctgtttcaaaaaataaataaataaaaataaataaaaattaaaaaagctatagtagtcattatttgtcaaagggaatccctatttgcagtgactgctatacttcttagccccacagaatagaaaatggtattttaaactctattacaaaaaaatttcaaacacaaaaatagagggaatagaatagaaacccacaggcctactgcttagatttaacaacaaacatcttgccctatttgctttaactagttttttccttgctgagctttccaaaaacaaatcctaaatatcatgacttttcacccttctctttcagtatgtaaaaaataaaggtatttcttatataactatgagaccattattacacttactaaaattaacactaactcctttagaatgtctaatatccggtctgtattcagattgcccccaactgtctcccaaatgtctttttgcagttggtttgtttaaatcaggaaccagacgagatccataaattgcatttcttcatgttttttacgtctcttgatgctgaatagttcctttccctttttaagccactgacttgactgaagaatggttaaatttccaatggagtattaaatcttaatataaagtattacatttaaatttaaatccttaaatatcaccagaccataatgaagtaaaccaggtaaagataaggccattttcaggttgagtaataaaggaaagttccagaaaagagaaaacagtctcttgatttctaattctctcccaaaagacacaaaatggagatctgtaagtatgggacagtctcactagtgcttacgacactgtctgcgaaacacaaggccatctataaatatttgtgggcttactaaaggcaccatgaatcctagaaactgaggatgaaagcacgagagtcctgtgagcaggagggcagaaagaaacacttctaaacttctgtctacctctgcttagaatgtccactcattcccccatggaaatcccactcatgcttcaaagtctaactaaccttcccttctttgcaaaaacttttccaattaacgacagtcatattcagcatcagatcctcctattaacgtgttctgaaagcaccatgtaaacttctctgccgagtatttaccacaatttgtaatcggacatgtttttgtgcttattttattgtctgcatcttccactccaccgtatccccagctcctagcaaactgcctggcacggaaggggcgttcaatttcacatgcgttactgaatacagttactagtaaaggtaaataaatccatataaaaagccttccttttcactgattgggagtttctgagaaatgcggtagacgttctagaactatccaaaaatcagggagcggagctccgggccaacgggaaaatatctgaggtctgtggggctagctcccgcaggcctatcgcgagtcccgaggtgacccagggggactgcttggggcggcgggggcggggttctgcttctctcagaaacggggcctccgctagggccgggccccgaaagccacgtagggcttcgccgacgtcgccgactgcggagagacctagcgttgctttacctggtcagttctagtagccagggatttatcggccagaatactctccttcaactcttccagcttcccgctgtaggccaggttgcagaccattaggttagacacacacccctccatttcgctgtcccagcaactacttgtcgcgcgagcaacgcccgcctcacgtcgccggctccggctacgccagtcaaaacagccgttagagcttcaccaatcaccggccttcctcgttcccttttcttttcccgtcgcgcggcgcctctgggagttgcagtttgagagcagttccgggcagggaggcgcctttgctgccctcacagacttggcccctagcagtgcagaactacaagtcccagggatcctagcgaccgtccgtccgtagtcaagttgccggtggaattggcccaggatgacagctggagaatggagtcaggtacggggagcggctttgagtggaaccgtgtgaaagagccggggtgggtagtcgctggcgggtcgttgagtcggccatatgaaacaggttcgggggcagggcaagagttatgagagcctaaaggtcctgtcccccggggttcctgacctgcagtggcaggcggaagggacaagggttggagctgagtactacctactgagctcgaaccggtgactgtggctaccctccccctccctgccaccgcctagggagtggaaagaagtgggggttaattactctgacatctcggcggtgtggcatcaggacagggttctaccacagcagtgatagcatatggcaccgtactgaggtgatgtgccagggtgatgccaaaggcagggtgtgatgccgtgggagccacctgatatctaagagacctcggtgagtccatagcctggtgacatcacagcttgatgagggtcatcttaaggataccgggctgtggtgttggcattttaatatcacgatattaactatgttgtcaaggctttgctacaactattaagctaatagtgtttctttttatagaaatcccaaatagtgccatagcagaagcaatgcaagactgatcctttatagggcatatccagaggacattatgccacaactaggtaacgataagaatacattcaagaaagagactcatgatgtttatgtttatcctgttatagtgtagaacaggagttgggaaactttctgtaaagagccagatagtaaatattttaggctttgtaggccaaaaggcaaaatcaagaatattttgttggtacttttatgacaaaagagaaaacaaatttcaacaaatttttattgatgaaattcaaaatataatagtaattgagtactttttttgtaatacaggaagactaccaatgagaagaatagaattctttttaggggataatattttgcttaattggggctcagaattagtgttccctattgtcaaaattgattttaagtgttcatctgttaatgctgatctgttaggaaatttttacctatttaatctttgaaaatgtcattttacatagataggtactgccaaatactgatatcaattcataaacatatacttttttatttttatttttatttaatttttcaaaaatttcagaatagttgtagatttatagaaaagttgcaaggttagtagagttcctgtataacactcactcaaaatgaggcacattttacatatcataaaattcactgatttcaagtgcataattaaatgatttttggtaactttactgaagtggggcaaccatcaccataaatcagttttagaactttttgatccctccagtaaggtccctcatgcctatttatagttaatcaatcctctgtcccattcccagccccagacaaccactaatctacttttttgtttctataaatttgcctattctggacattttatataaatgaaatcatacaatatgcagtctttgtgtctgatttctttcacttagcataatatttttgagattcatccatattgtagtatgtatcagtacttccttacttttttattgctgaatagtattccattttatggatataacacatttttatctgtctactcactattagataggcacatcagtttccaatttttggctactatgactagtgctgctaagaagattagtatgtaagtcttcgtgcggacatatttttttcatttctctttgatagatacttaagggtggagttactggatcacagggaaaatttatgcttaacttcttaagaaactgcaaaact

SEQ ID NO: 1564040 - DNA, 4001 bp, Homo sapiens
aattacagtttccttatgcccatgatgaatctactatgtgttttcgtgggaaagcttttggagcagtatttatctgtgtcccaaaatatagtcactaaagtattgagagaaaaaagaaaaccactttgatgctggaagtctaatcatgagaaaaacaaacatctcgggattaatgttattaaggttctgtgatgagtaaatgtgtgatgtgtgccattaaaaatatcatgagccactccatgtgggaagatcctaattccattgagcccctagtcagattcccctcattactaattgctaattgataacatgtcaacaaacggacataggaaaataatgaaaattagcttgtctctagggataaactattacctgtagaggaaaagaagaggaaagagttccccaggtttcccggcagactccccttgggataagtagactagaaatctaaccagcctctagtaccagatctggactagagactcacacaaaacgatcaccttccatccctctgcaccagagtcccagctgggactggttcttgtctgccctccccaaaggagaaccttaagtaaacaagccccacagtccccatcagggattcagatggaacattctcacctatttttacttttctctcccgaggtctccacttttccatctctagtcctcactcctctgcttttcttaggaagttcctgaaagttaccaccattaacctcactttccacatcaaattcccacctcaagctgatggcacaaccggtttctgcgagtgtcaccctctaaccagctgctcggtttcctgtgctcttctcggggtcacacagcctggcttctgttctcacccttcgggctctgcccctcacccccatgctcagatgcacccaaataaaagtggattgatcggttccctcttttcccaaagttttggcatttcttgaggagctactgtgaaagacgaaggaactgcgaattacaaacataatttcataccctagaagatagagatggctacctcgctccggagaagagagcagcagggcagccccctgtcctcgccagagaccacacttctttctgggtgggtgggaggcatcttcatcaccatcccgcctcacattcttttgtcctttcccaacatcccacaccaacaaccgttccccaaacactccggggggccagaaaaagggagaaacaaaactgaggacagggaggggtatctcggaatcccctccaagcatagtattttgttctcaagtagtaggactttccagaatgtcttctctcgttctgctccttgctggcccagttaccccaaagcctccccacccccaagcccactgcgaccaaaacaagcgcaccgaccacagcactgtggccgccgccgccccaactgttgcagcagctgcggggtggcggtagaggcgacgcgggcagggccggacccggaccccgacgctccttgtccaggaggctgggaggctccagtcggccgccctggggcgcgcggtgcaggagagtccctgcggcagctgcctgggctaggagaggtggcgctctcagccgggaccccagcgcagagccagcccgaccgcggccgcggcgctggcggagtctgcccgcacccgtcccctctcacctttaagatcaggtcggtgtgatgctggtccagcatgttggctttctggaaggaggtgacgatgacccggccgtagcgcccgggggtctgcaggtccgagtagagacggtgcttggagcggttgaccgggaagaggctgttaacgaggttgcgctcgatcttggccaggctgtgctggggcgccagcaggtgctccacgctctcctcgacctggtagcggctgaagctggcgccgagcaggatggagatgagcaccggcgccgaggcgaagaagacagggtgactggcaatgaagtggccgagccgggagaaacacgtcctcaagcccctgtgcagaacctgccgcagcatcctagagcagagcgggcgcgggaggagggcgaggcgcacgctcggcgcgggttcgggcggcggcggcggcggcggcggcggcggcggcagcggcgcccgcggcggcggcgacggcggcggcggcgagaccctgagctctcccggagccgcggcaccaccatcggggagtcccgcgccgcgcctcgggagggtcccctcgagccggagacacgccctcctgcccgcggccgcgccctcccggagagccccccagcttggcggcctctgcgccgcccccactccgccctaccgcgtgcgccctccccaccccccgcggcctccccgccaggggggctccgcgccgcgcggccgcgtcccctctcagcgcgggcggggcccggggcagcccccgcggctcgtcatgaccccactcacccgacccccaaggccaacgacggggtggcgcggggagcggcgacggcgctatcgccaggagactctgcgcgcccgcccaggaacacgaggacggagaattccaggctacacccagtcccctcccctcccttcgctcccctcccccggtccggcccgccaagctcgctctccccttctctgccctcctccgggaagacccagagataaataaagaaatggccccgattttccaaacaaaaagtaaagagttctcaggagtggggggagggggcgggtgtcgggcggacccgctcagagccgagtctctccagaggcttaaaggagcaggctgaagactgcgtgcgtcccggctctcgccaggctcaggtggtggcgcgcactggctggtgccgagagggggtggggagcgaagacgctcgaacgtggaaatcacgcctccttccaaataagaaccgtttaaaatacccccaacactgcagcttcggcgggaccacggggtccgggtgtgtgtctggagcacgtccactcaaaaggtatccgtggagaatctttctctgtggctctaatttagggtcgctccagagtggattggggctggccagctctgttgcacaccccccaacctcccacccagtcctttagtaataaaagtgctgataatgacggtcagtcgatggaactgtccgtcgcctgggctcccgggctcccgagctccggggctccccggctcccggttcttcgccctgccttctcttcctcctcctctctctgtcgtcaccagcaggtctgggggacctggtgcggcgtggctggcgcgggcgcccctgcgggcgtagagtgtttgagaaaggctggccagggagtcagtagcattaacccccttctctgcctcactccgccctctcctcccctacatgcgaaggtgtgagagtggagggaaccttatctcagagcaggagagatacaggtctccgagcgtgttgagccgcagggggcgcgggggagcccgcggggcgccgacggcttggcaaagttgggcgtgtgcgtgtgcgcgccagccgtgagctagcaggcagtcaccgtggttcccctcgcactccccctccggagaattccccgagaaggcgggcgccggcttcggccccgggatagacctgcggcggcggcgggaacggccacgcacaggtacaatttagcgcgtttcatttcgcgctccaagctcctgggtctgtccactgcaacgcagaccgagcgggatctcggagtctgggtcactgaggcgctctctccagccaggggggtgggatacagggcgcggcgaggggtcctcagactccgcgctctgagcgctcagcctccccatcccaagcctttggtcgctacagctcagtctcccagtgccaggggtcgaacgggaggcggtggcccgcactacggagcatagacatgcatattaatcaaagctgaaggaagacgaatagggacaggaagaggaaggggagtgggggggggggaagaaagaggagaatgggtaggagaatgcgcctcggggaggcatttccctaacgttcccattccagactcccctacacct

SEQ ID NO: 1564041 - DNA, 4001 bp, Homo sapiens
aaagaagctagacacactagaggaagtcttaaccaagcaaatgtcaacagccccaggaaaggacagagacagataccgcctttgactttaaaaggaaatgtagcacttcccttccaaaatgcaaggggcaaaaaagatcacgatttcaaaataatgttctatcttcctaccctggggctctcccttatcagtactgagctgtccatcttcctgacatctagtgagttggcctagtttctgaagccatttttagaacacgttcattttaataatcaaggagtcaggagtctcgcacagtttcaagtgtttcatcagtttcatcagttactcagcccttctctccacgtcactcagaggaggggccttgtggtcactttggcagtttgaccagcaagaaggaggcttactgtcacccctgactctgtctaaggtccaaccatacgctcaaggaaaggccagctgtgagcctagaggagttgtcttcagtgatcccagtgcctttatagaggcccccctctgctccccatgacacaagaagttgcccttgttatgtcctccctcccgccatcccctgcacattgacatattcctgtcatatcaggtttctaccttttctgaattaaaggtgagcacaaatggtcagacaagaatatttgcacttagcctattacataaactcatggagggggaggattgaacattcccctggccctcggttaagtcactgcatttttacaaagacctgaagacaataccaacagaatgaataaggagcagttcatgtattagatgccccagacaagtaaagaagatatcattccaggggggctgttacaaaaaaacaagttttgtctattacgaagggctggaccctgcctcaatttctttaaaagggctcatggctttctgccagaaccaccccactccaccgccatctcaactcagccctaattttttaactataaactgcaatttaaaataaagcagctttttcattctccatggatttccatcatttccttccctctaacgccttgaggcttagccaaagtggggttttgcagcctatcggcacccaagcagtagaagagacatcaggatgtgtaaagtgctttgggatccatcccagagactaggacccacagatgcctcctgcctccctctgcccacaggtgccgctgctcggggtaggggtcatggatgggaatccaacatgcttttcctggcaggacctgtcaggcaggggctaagggtaagaatgcaaccccattctcaaccgccctaaaaaactgagtgaagtggggacggggccccgctgagagaggtgaaaaggggtgaggaggagccgagggtcctcggctcagcaagaggcgaaaccgccacgcgctggacgctggacgacgacaaccgctagagctatgcctcgggcgaggtcccctcccgggtcccacccttcctggacctgaccccctggatcaccttgatcttctcgccctcgatttccacggtcttctccctgaagtccacgccgatggtggcttcagtcttgtctgggaaggtacccccgcagaagcggaaggtcaggcaggtcttgcccacgttggagtccccaatcacgattattttgaagatgcgaatctgcacgtactggtccagcgacgagtcgagctccagggacgccaggccagcggccgaggcgggctgcaggctcccatggcccaggatgggctgcgccatctcccccggaccgaaccggggccccaaccccccttgagggctccacacaaagagaacgtccacgttcgtgcgctcgaggcgagcgagctctgtgcgtgtgtgtgtgcgcgcgtgtgtgtgtgtccgcccgtgtgtgcgtgcgccggcaccgtgtgcgcgcgcgcgcgtgaagggggtgcctctcactccgggcccccctcctcctcctccagcgcaccctccttgcagctcggaggcaccaacacaaaagccagggagaggaggagagagggaggagagtggacgagccgcgagccttctgcctgtgtgcgccctcggaccggatgctctggcgaaggaccctaccgcgctgctccagccgccgccgcgcctcggcccacaccctcccctgcctgcattcccgggacggacccgagggaagaagcctcaggaggaaagagacggggtggggacagcggcacacgccaccccgggatagacttctttctccttgcccccgtttatgttataggtttcgggctccccacccccactggctcgagcgcacggggtcagcgggcagggagcacagctggggaggacaaagagctgcaccttaagacatcactggatcacttcggcctccctggagcaacgcaactctgcggggatggggtgggggcggaggcacctctttcacctcgggagcagcgggcagctgagccgcgccttcccggtccccgctaccccgtcccctctacccccaccctctacccgacccgcgccttgggataaagggatgctctgtcttaatgagtgagcaggtgcactcgcgggccccaggcagcctgggaggccgctgccaagacacgcagtgggttgtccggggcctgtacagctgagaggagggagccagcgggcacgcgtgtgcgtgtgtagggggtgtaactgtttctgttacagacttgccagatgtaggggggcgcgtaccaggcgccaacatccccttatcacaccacgcgcacccatcctctgaatgttcaggagagcggctcctattggctgccgcagtcggttgtgtttggctggccaatggggaaggcccgccgcgggagagggccacacagaggctaggagaagggggggaagctagtggtggcagttccagcaaaaggggactttgtttacggggctagccattactggcccaggtggaggatcttgggacaatggcataagctccacagtgccttccattcccaagccctccatataaccataagtccctccagaacgctggagtttcagagggagttgggaatccctaggagggttcacctccccctgcagctgaatgtagaacaaagtggttgggtctaatttgccagaagcctagattatgcttggaagatgataaatgaacacaacctccttacagtattagggggctgctgcccaaagcttactaatcatcacacacatcttggtcaagaccagtattccttctccctaaagtcattcgcgggttcagaatttgtttgaaatcgactttactgggggtacaatttacatacgataaagtgcacccatttgtttcttttaagactttacctctccccctacatatttcataagctaaggtaacactgacacatgtcactagcactgactcgtgagttattgctaatgccatcaaggtcagggattcaaacagcacagttgagctgccatcttatttgggaggttgagctgcaggaagagacaaacatgaccaaatccatttctgctgagagaaaaacaattcagtgcatcagtgatatacctgaaagcaaattggaatgtgactactcaaggacgtccaagttactcagaatggcatcttccagttaataagtttattagctgagctagcagatatatttacagctaacccttttatcatatatgtgggtcgcccatttctaaaaccctacattatactactcagcattaaaactacccagataaggatttcctcttagttggctaatccaaaatcatccttatgaataccaattttcattgtattatgtatcaatcatcattgtacagtatttttggttttgattagtctgatgcctagtttgctggatcgttcccctctgtattggaagttaatgcccctgatgatctttatctacagaatagctttaaggtggagaggggtaactattaattaggtacatcctgtacacaaagtagaaaggggctttgccctttgccaattcacagctagaattaatgct

SEQ ID NO: 1564042 - DNA, 4001 bp, Homo sapiens
aggccttctaagcatggacataaggctacataaaccttaaattcttccctacattaaaaaatcttaaataatgtgaaaagacagatgataaactaggaatatatcttacaacatacatgacaggaaagggttaatattcttaatctataaagtactcttacaagtccatattgcccaataaataaataagcagtggatatgaacaggctgttcatatagaaagaaattccaacaaacacataaaagatacctttctttgcttaggagaaatgcaatcgcaagttcaaagtgaacctgtacaaggatattttccacagtggtgtttgtggaagtggggagctggaggtaacttaagtttgtaattatttcttctccttacccctcttcaattacccaaccagtatcttctatgcttagttagttttcaatagataaatgagtaaatgatcataaacttgggctattgagttttcttgatctggttcctgctgctctactttagttcaaattgttctctgcaaagttttctgtgtacactctgctccctctcacttctgtctttattcatgctgtttcctatccctgggcgtttcctgtctttgcttaggcagtcatactcatccggtctcatcttctccagttaacctttcctcctctgtgttcatacatataattacaaataatacatgctacaatagaaaagcaaagggttctgagtgaaagtaaacatattcattgattattcaatgaattcattgattgaaattaagcatgttcattttgtgccaagtgttacagtagggagtgggcatacaaatatgagcaagacacactttcgtaattgctgattatctatttccctcaactatgttagcacagaagttccaagaatgaaggggctttgtctgtttagattacatggcatccccttgtgtgagtctcctcacactgttttcccaggaacaagcccagagtctggcacatagtagatgatcactgaatgtgtgctggttgcaagaaggaatcaatcgtatctatttcatgttagaacatatgttagcatatatatgtgcacacacacagatgtggaaataaaacataatacacatgtatttatgtatttaaatctctgtcagttatgttaggatgacctgggaacgtttttgaaagtatgtaacatagggactgagattgatgaattacagatacagagatcaattccagctagtttgttagccaccaaagggcaggttggtggagttgtggtgcaagcaatatgtgttattgaccggccttccctgccagggcgcttctttccttgcactaaactccgggttagccgaaggtgggcttcggcagaatcctcaagacccttggtgttgccctcctggaccgcacctagaaccaggaagtcctctctccccagaggcggtgcaaaccccgaagaccctcccactgcttgcgggcccggactgcgctcccacctgaacctctcttgacccgcggtatcccagatctggagcttgatgcgttttcctggctcgatctccaccaagcgggagaaaaaatccacccccacggtggggtcagaaacctgggcaaagcgaccctcggtgaagcggcggatcaggcaggacttgcccactgtggaatccccgatgacaatgagccggaactggtacagccagatggcctccatggccgcggctctgcaggtctccttggcccggaccggggacggcgggagggggcgccccgccgacgcctcagagagcgcggctcggcaggatctagctcagccgcgagcgcatcgctggcctgggagcccgaagctgggtaggcccaggcgccgggagagcggagggatggatgctgcgctcgcaaaggtgatgaaatggcagcagcatcagcaccacgcactctgactcatcactgacaaccgggttactgtaatcccccgcgtagacgcgacgcctgggccgccgcactatctgtaagaggagcgcacacaaaatggctgcaacattagcgcgatccctccctttctaactaccccacccaccctctgttcattaaaactgttctctgtcgttcaaactgccaatgtcataccttttcattgaaactagcaaagcaatacaaaactgcacaaaaaagggaaggcacataattatatattagtctacaagtgtttccatgctcacataaacacacaaatattatatgtgtttgtattcctatatgcatttattgctgtttgtttttacaaaaattaaactggggccttactttcaattaataattgctttttgcaattaataaagcaacataaatatctttccatttccacctaatttcccttttgtcataacttattttaaagtgtagccacaagtattttatttctgtgagctacagtcttaaaaaaggggccatgaattcaaagagtataagtattttaaatttaacggacatgggcattctactttccaaaactatttaacagtttaaattctacccagcaatgtgtgaaaagaccatcgctctgcattatttcaagcatcatatgtatgttttattctttcttaattcttctcaatagaatttagttaaataaaaatatgtctcattgctttatttttacatttctctgactactgatgaggtcaataccaagtcttgtgtattgaccatttcatttcctcttctgggaattgtctcttcatatcctttgtattttttatgtgtaattttattttattttttttttgagacagagtctctctctgtcgcccaggctggagtgcagtggcgcgatctcggcccactgcaacctctacctcccgggttcatgccattctcctgcctcagcctcccgagtaggtgggactacaggtgcccgccaccacgcccggctaattttttgtatttttagtagagataaggttacactgtattagccaggatggtctcgatctcctgaccttgtgatctgcccgcctcggcctcccaaagtgctgggattacaggcgtgagccaccgcgcccggccttctatgtgtaatcttttatcgttgccttactctttaaaaaaaatcagcttcattaacatgaaaattcacatactgtacaattcacccatttaaagtgaacaattcttagcataggtttttaatatactcacagatatatacaactatcaccacagttaattttataacatttttatcacttcaaaaagtaacccagaggggtggggggaggggggagggatagcattaggagggattacatttacctaatgtaaatgtaaatgacgagttaatgggtgcagcacaccaacatggcacacgtatacatatgtaacaaacctgcacgttctgcacaggtaccctagaactaaaagtataataaaatatgtatatatattttttaaaaaaaggaacccagaaccttttagctatcatctctctatcccatgttcctccagcctttggcaaccattaatgtactttctgtctctataaatttccctattctgaacatttcatatacatgaaatcatataatatgtgcatttttgtgactggctgctttcacttagcataatgttttcaaggttcattcacactgtagcaagtatcagtacttcattcctttttgtggctgaatactattccatcatatggatagaccatatcttgtttatccattcattcattgagggacatttgggttgttcccaccttttggctattctaaataatcctaccatcgaatattcatgtgccaggtttttttttttaatatctgttttcagttttttgggatttatacctaagaacggaattcctcagtcctgtggcaactctatgtttaaccctttgatgaaatgcctgactttttcacagtggctgtaccatattacatcccactggcagcctatggggttccaatttctccacattctctctaacatggatgtgaagtggtactttattc

SEQ ID NO: 1564043 - DNA, 4001 bp, Homo sapiens
ccatggctcaataagaactccttcacccacgtcacactagaaagaaaataagagagcagagagtacatggaatcaaaggaatgataagataaaaccaacattcatttattgctactatatttctaaatgctctctgtttcaaatcttctatttcatagggcacaattattttatcttggaaccaacaatcttcggagaatgtatcccaaagatacaattcaaaaagataaaaaggcagaagcacaaggtcattcttggcagaacaaattgtaacagcagaagactggaaataagacagatgtccaccaataaaggactgactgaataatctaaggtgcatctacatcctagatttcaatgccggtataacaagcaaggaagattccctctctctgctgctatgtagtgatttccaggatataccattaagtgaataaagcaaagtgcagaaaaatgtgtagagctgctgttgtcccataccatacccactggccactcatggctatttaagttaactaaatttaaatggaattttaaattcacttcctcagtcacactcaccacattttaggtgtttaatagtcacaggtagctagtggctactatgttggacagttgagacatagaatattttcacctttgtagaaattctattggactccaccagtgtagaatatgtcaccttatatatatggaataggagaaaactaatagaaacattctatttgcttatatttttaaaattggaaagttttaatgaaaattgatttaaaaaatcattacctataaagagaaggaaaaacagcccaggacagaagccaataatgtcttttcccttaaaaatataatatatatacactggctccatgcactagaaaggtgaagaaacatgatagacccagtagcaatgagcaactctagtgcccatattgaatccacttaaaacacatcacactgaaaggaactaggttatcttagagaaatgactgagtttaggtctgtgtagccattctactagatgaatctggaccaaactatcatgccagagagtgcgtcaaaaagactcagaagccaagcttaaggggctctcgctggacaaagatgaagcaatttgaacattaaataaaataatgactactatggattaaaacacattataatataaaaacttctacagctcatgatgacactctaaaagaaaaataaaataaaacaaacaatatcaactcattgcttgcctttggagaaccctagggaaacaactcattgttttgaaaagtggaaatattgcaaaagaattaggcactcatccaaccctttctatacatactatccctcagtgtaacctaatggtttatgaaagtttatttaatagaataattccagctaataaagcagagaaaattatagaattagaatatcatccttttatgacctttaatgaatatagaactaagcaacaatccttagacgctgcagaaaaatcgaggtgaaaaagggatgggaaattttataatggatggatcagcttaacaatacttgaacatagtaattaatcttaacatcacaagaggagagacaattagacacaatgagccccctgtgtaacactataggaataaacaataccacatatgaagtacttctgaccaaaacaaatctaaattgaatcaagcctctgaatctaacaccattttgttaaatttttttattatacttttaagttctgggatacatgtggagaatgtacaggtttgttacataggtatacacgtgccatggtggtttgctgcacccatcaacccgtcatctacattagttatttctcctaatggtaatataaaaagagaaagaaatacttggaatttgatttggaaaacctttctcctgtagccagtccacctccatgtgcttgatacagttgacacttcttaccctacaggagattattcagcctatcagccaatctagaaaataaaatcatgaggatccatgtttggtggtataggaactattaagtttatattggaacattttgcaaaacatgttaaaattaagttaaaatgaatgtggctcgaaattaggattgtaagatttcggatttcaactcagtttccacagagaagtttggttgacctaaattttaaatatgttaggaataagcccctgctgcacatcattatattcaaagttctctgtagcttcatttgtgaaaacaaatggatgaatgggtatatatttgtaaaacatgtctttgggataaaaaggcattttgagttcttggttttcaggatgttccttctggtattcttcaaataaatgcttctatagtattataaagataatttcattaacctgctaaaatgggaatgtatttgtctatagctacaaggtaaaaagtgttatgaataataattttaagatgacagatattaaatagttcaaatattattgataataagatttttttaaaaaagaaaatatatgttcatccaaaagaatgaacatgaacattcataacaccattattcatgagatgtcaaaaactggaaaatacacaaatctccatcacagataaatatagtgtgaaatatccaaataatataatactttacaccaatgagaataagcaatctacaatatagaccacaataaatattaatttcacatacattatgttgactgaaagaagcaagacacaaaagagcacatgctgtatgattccaagaatttctcttctaacctcccaatagagattggggcaggagaggaatatcaacaactcatttccttttatttcaaggtacttagtgtctttttatgttatctgtagcttaacctcagataagtgaagcaactttcttctgagcccttgaaaagtgattaattacacataagatgaaaagctaatactatatctgatggacaggcaatgtggtgtgagagattcgggcaagaatcctaaatggatgctcagtctgcaccaaatcacaccgcagtcactgagtcaccatggtaaccattctggccaaggaaagctgagaaaaaacaaacaccactatcccgagcttgttcctaatatgtactaggaactaaataggattgacatgatgcacagtaattaacctcaagtagtccttacaataaaaattcctgacagcttcagtgacatacaaatgtatacatactcacatacatatatgcttgctcaccctctcaccactccaaattccaagaatttattgaggttgatttactggtgggtaaagaagtaaatctcgccaggcatggtggctcgtggctataatcccagctactcagatggctgaggtaggaggattgcttgaggttaggagtgtgagagaagtctaaacaacatagcaaaactctgtctctgaaaaatgtttttaagtttagctgagcatgggggcacacacctgtagtcagttattcaggaggctgaggtgagaggattgcttgagcctgggagttcaaggctgcagtgagctatgattgcaccattgcactccagcctgagccacacattgcaacaaaatcatttctgaccacacatataaagttgaaagctactaaactatgttcttttggtgtgatttctgaagatgacctgtagaattgtctctggaacattttcctccatagtttcaatatatcgccaatgacttgtaaaagcagatacggaaatacaggtaaacacaggttaaggatcaaataccttttccatcctagagtaagctgtgctttcaaccaaaaaaatgcctcactgatgttaaacacttggttgctgatagtactgtgaaaatatagtaattagcaattgtgtttaacaaacaaagccatgtatagcatcatcaagagtatgaaatatttatgaacaatctgtccacagatgtgcagtgcctgtacactgaacaccacacatcattgctgagagaattaaagacctaaataagtggaggacttaccatgctcatgggtca

SEQ ID NO: 1564044 - DNA, 4001 bp, Homo sapiens
aaggacttatatttactcagttcatccaatatcaattataataacccacagtgtaaactggaaagtaactacatggaaatcacttctccttccttcccatctaaggtctcagaagtgctttcccagatgtgatctcattaacctctatatcgatctgagaggtgttaaccaaaactggccagcacaggggaaattactcacctaaggccttataatgggcctggccccccgtgttctattgcattgtttttctgcaaagcctaatcttgcagggttacattatacatatttttctttctttttcttttcgttttaccaaaagataaaaatatatacttttttattgttaagaaacattttcataaataagtacttatttcattccttactgaaatggcttttttcttactgacccattgaaaccatgttggctatgttcaacataactagagatatctttggcgttttcctcccttagcttcatatcttgtagaacatcttgtacaaaaaagtagatttacagaaaaacatacatataaatcacttattaatctccaaatgtagtaaaataacatagcaaaaactttatcaaatccatttcgtgcacaaactggacagatctgttacgtataatctctatatgcatctgcagtgttttataaattggtgctttgacatcaaaaaggaggtttacaaaaagtcccctctagtaatatcaatgactcggaatgatctcactatcattgcatctcaaattcccttgaatttatactcatcactgtcatatcaccattcttacaaaagcggttattttaaggaaaaagatgcagtgtgattatgatataagtaacattcaaaatttcatgttatcaagagttaagcagagtactaatttcccctttataaacacatgcacatccacgtagaaattcaaagtcaaactgcgtaaagtgcttttattgacagaaggcatcacacacattcccaagcagcattgttcccatgagaaactgaaaacgtatttctttgaatctagaatgcatcttccctcttccaggtgtaaccattcagagtttttcctggagcgattccagcttgtttccttttggtgccttccttaagaaattttgcagctgtttctggtgcagtttttgggtgggctctggggtgggcagacgatcttcactttgcagaggctgctccttttgtgagtggagctggtggtgagggagtaggagaggcctcgcatcatcctggcattcaggcccttagccatggagaaggacttgaggtggcttcttaaggcaatggggagcgggagcttgtccaccagatgcacaggtgtgcaggacacgatggtgcggcagcagaggtcttgcaagctcagtaccttgctcggcctcccgagccagttcaacctgtgccgcagcagcactatcctggccagctccgtgaaagactctatgatgttgaaattgcacagagggctgacctcaaagaaggtcacgcccaggcgctcggcgtaggcctgggcctgctccctgggcacctgcctcttgaatgccagatgtaggcgattccccaccaggattttagggacaccaggggcatgttcctcaatcttcttaatccatcgatccataccctcgaaagaccagcggtttgcaatgtcgtagaccaggatcactccttgtgcaccacgagagtaggagcggaatatggtacaaaatcttccctgccccgacgtatcccagagcttcagcttcacccgctggccgtccagcaggatggtggtcgtcttgtagtcgattccccccaggtgactgtacggggactcggccgtgccgtcctgcaggctctccaggatctcactcttgcctacgtccctgtcgcccaccagcaggaacttgagcaggaagtcgtaggcctggtcggggctgcccggggcgctcatcgtgctggccccgccccccgcctgggccagaccagcaaggttgtgcgcagaggcggtgccgggcctatttttcttgagaaattagcatagaacataaaaaatgggatggggaagtctacgaaataaagtgaaatgaggtggtggctttgatggttttcttttacaaaccctgggaaaccggttcagcgattgttttcctttttcttacccagcacagagtagtgacacagcagttaattcatcatggaaacctatacatttcccttaaaactttcatgtgatcgttatggaaccatgccttttggattatgtcaaaggaatctcctttaaaggaaggacgggtatgagataggaagcagactaagatgtgttgagtaccgtatgtaccctacgctgtgtatgacgcttaaaataatttgttcttttacttctcagaacaattgtctttggtagctatgattgttttcattttacaaatgagaaaaggcaaactcagaaatgttacgtaatttttaaaaatcttgccgttagtatagagatcacagaaatcacaatcctgagccagtgctctccttatataatgccccacacatcctttctactctgtggccatgccgggtttaggagtaagtgtgaactgtctgtgcatgtgatccttgacaagccacgcatgtttgcatgggcactaacacattttttgctgcagggggacatctcccataaatataagagccaagatctcagaagaaacatctaggatatggatttttctagagtgtctcataaataatattcagccaagaaagatgtgttgaaataacgcatgcatagatcaatgaagggttttagatttaacacacgtacagatcctataacaaaacagcaaaactgacaaaatatataaatggttcatggatgatgaaatgcaaatggccaataatcataagaaaatgcattctagctcactaatatataaggaatgcaaatgcaactatctaaatatacttttatcacctatcgtttgacaaaatttcaatgtagaaaaaactgaataagaatttttttttaatttgcaaaagaaaaaggtaaaagtggctctgtgtgtgtctgtgtatgggggcaggatgagggaccaaatacatcaaggaaatggaaacacacttctcagttataaatgcatttaaatattgtaactacaacaggtataaagatggttaaaggaatgagaatgctcagacacatataagggagtttaaattattgaaatcaagccccaagggatagatgtgtaagcatgtaatggatgaaacatttttcacatgtacaaaatagccaggtaagaggttatttgctacagtattgctgaaatctttttaaaaaggaaaaaatgagaagcattctaaatactcatcaatacagaacaaacaataacaaagttgtctccctaatttacacaaactcccctaaagacatcgccatgatctgaatggtggaatctgaccatttcttaagccttggaagtgcatcttctaaaagggaggtgctctcagggtcctctagggagggtgagggatagaacctcattccaatcctgccacttacctcaagaggcgacttaggttctgtgagcctgagcttggtcatctgtgaaatgggactgactataccatcctcacggagttattcccaggcataaatgggaaaacctgtccagggtatatggcatggaatgggaggcttcaatggccctttaaatattgagacatagcagtaggggttagctgaacctcaaggccaaggcaggcatcgtgaaaaatcattactcattgtttctcctaatgaaaacacagacatccatataaagaaggcaaatctccctgatacaccttgatttcagagttttagagatggagttctctacattcttgtgtgtttcataatctcacgaaaactgttcaacatcatgcctccgagaagacacaaaaccagttccccatgctggtaagaaaaaaactgatcggtgtaaatgtaaaaacatatgctccag

SEQ ID NO: 1564045 - DNA, 4001 bp, Homo sapiens
acatgatggggagatgaaccttgacccctatcccacaaaagataagccaagcttatccaaaagagtaaacagtagtagtagctacagacagagcacaattaaagtatcatagaaagaaacaagtattacctttttcacgttgtaaccggttttggcactggtctcaataaacatcacattgaggtttctggatttttcttcaccctgttctgcagtgacttgtctggacgaatcagaaatgatgaaaagggccagagttattggatatggatagactcttctgaggtgtaatgatgcttacctagggccaggaaccctagaagccttaaacccatgacccttctgactacagggtggggactctctcctatacccccaacatatccttgtgccctgatgggacgcccccctgtccttcccatcctgcagtgctggtagggggcagaggggactaaggtaactcctccccaagtaaatagaggacagttgaccctccccatagagactgaattttaggtatgccagaagaagttgtagttatactttaccttttgttatccaaatcaatcttgttacccaacaacatgatgacaacatcgtcacctctttctgctcgcacgtgttctacccacttatctgtctccttaaaagaattgatgtctgcaagagaatatgttccagagcgttgaaacatttaggagagatttggagagaacacttcctctctgctaattttgtcaatctccctatcaatccctttataatccccttttcaaataaaacattgcataacacccacttgtaatgtcatagacaaccactgcaatagttgaatcacgaatgtagctaggaattaggctgtgaaagcgctcctggccagctgtgtcccatagctgcagctgaacctgcataaaaatgtttaggaagaagatgggggaaaggtagacaagaaactagcctttttaaaaagctcaaacctaataaaggcagaatacaaaaggtcaggtagactggatccctgagaagtggctgctatagcctcagaccaaatggcctatagtcctaggacaggtccaaccaatttcaatatactgttttgattcaggaagaccctacagcacagcagatttaaggattcaaggtctcttggactttatgttacagttggagattagatgaaggcagacagaacaagaaacatcatagggcttggtaatttgaagaggcttcagttttttttgatggtgctacccaactgtgatgaataggcctaaggggttgaagtgtagggttagtggtatgagagttaacactcactatttggtcctccaagtacatggtcttagacaagaagtcaattccaacagttgcctgcaaaagaaaatcagatacactccagcattccctctattcccaatatgaggcagtcttagaacccaaagtggagaatgacccttcaagaagttgtcctggctccacttcccaatgcttacaatacataactttgaggaggagaatctccaggtgagtccgccaagaagagtggcaaaaatgtaccatatgactcggtggtggtcttacctggcaggcgcagccgaagctgttgtacatgaagcggctgatgatggatgtcttccctactgtgagggagataagcaggccaatcgtcgccctcagtgccctttctcccctcaaagtttctatgagccctccctcctcctccaactccaatctttcccaacgaggaggaactcggttccccagagaatgccccaccccatttcataccaattacacctccatgtccccaaagcccaacccagacccacaccgctctgctctcccaggaataagagtttagatttgcacagagactggtattccgttctttcggcagcctccagaccaaagcctccggcctccatccaggcctcgtcgtgaccaaaggcagacatcgcttcaggtaggttgcagccaaaatggcttccaacgctcagcctgagccgccggacttcacgccatgctctactgacgtcggctgacggccattggcttcacacccaggcctgggcatggccacgccccctcggccccctcctggcagcttgcactgcgcctggtgttcagcgcaatcctatgaccactcgagtggggtcatggggtggagagagggatggccactgaccgtgtcagagggaagttggggtcagcgtatggggaaaagcacgggctaagtgtagtgtaatcacagcaaaggggtggaggtggggaagattgttctcagtagttccgtgaccctccaggaagaggaaataggcaagagatcgctaggcacatctgaacaaactgatttattagagtgttacagtgggggctcccacacagacgggcaccagagcgaggtgctcagctcccctcatctccctcagcctccacagccttctggctctcctcctcgcctttccgcgtaaactcctcgatgactatgtcctcagagcttgcagaagcagcagaagagaatggaaggttaggaacccctttctgggtgtcctccgtgtccactcttttttcctgatcccagaaaagtgatcccctccctgcttcccaggtaggctcctcggccccctcttggtgtccccacttttccatcagccactctggcttgtttcctttcattcccgcccaaatttcccagcacaaaagtcccccaggagcactgaaagggacataaggatgagggatgggaaggagggaaggtatcaaagaatgaaagacgaaagaagtaagggcgagcgggtgggggaaaaggaaaaagaaaaatgggaaggggatgagggggaaggatgattccaacaagagcagaaggtggagggcggggggatgcagaaagggaaaggagggcatatgaaaagcaccgaactgtgacacgaagctaagccatatgtttccactgcacatgtattgaaagcaccccaaggaagcattttcacatttctatcgtcataacatggagggtggaaatgggaagaggggaatggggcttcccaatcttgtattccattacctagcggcctctgtagcaagcatggagacggagggaaaaaatggagctgaagctgattagaggctcttcggttccctgaagaagtatctttacttcccccccccccaacttcccaatcctttgctccagcacacacgacacacacacttcccctgaatacctagacacccagcctacctattgctattccatccccaggcaaactgctagtctccaattcatgagatcagaatggtttggaccccagccctcaggacagccgtccctgtgagttccacctggtcactcaccatgagatggcttcggatggatcaggaccaagggtagctccacaccaacatcgctgcaaggatcccaaggtggagttacatctcctctctctacaagcccaatccctgaacctccctcccttagttttccagtctttggatgccctcagaccctccagaatcaatcattattttgctctccttatccccttgtcctcctcttcttgcccaagttcccccaccccacagtctctcacctggctgtcaggtctcctaggatgctgtgggtagaatgacacccaaaattagcagcgggaaatagagaaggggcaacctagtttcacaaggggatgagggatcataagacctaatgagccagccacagaatgggtttctggaagggaaagtgacttgctcactgagctcacaggtttgggaacctggtctgggagaaagggtggggaatggtttgattgggtcaatctaactgggagaaaaacagaggcgaaaagcccttgactcttcagcccctgcccagacagacccagaaccctcacttacccaccacaggacaccatcaggttgactctgactttgtaggacaccaggatccccagcagctctttgtccattcccggtctaatactggaggttgtagtattcgtttt

SEQ ID NO: 1564046 - DNA, 4001 bp, Homo sapiens
aaatttaaaaattaaataacaaaaataaaaataaaaaagaatgtttagcagcatccctggcctctacccactagatgtcagcagcacctcccttgcccccaggtgtgaaccaaagatgcctccaggcattgccaaatgtctcctacgaggacaaaattgtcctctcttccagttgaaaactactactctaaaattacccagacctgctttgaatccccgctccaccccatcacaacctgggtcatcttggaaaacagactgaaccttcctatgcccccccaaattcctcaactgtaacatggagctcttactgaagaaatgctatggaaattaaataaaatgatgtacgtacaggatttacacgtacggaatattcgccgcagagtgagtgctcaataaatggtcagaaatgaggggaggctaaaaaaaaataatttcgagaactcaaggatcttctctttaggcctccagagtactgtagtccagacagaagaaatggttgagatagaaacaaaaagagatgagagaggttggaaaagaagtgatagcactaaggtattatttcccttatctctaaaacccggcttggagtcaaagccaatgatgttctacttagtgtttgcctatctactctaacattccaaataataaacgaaaaaatatgcccagatcccaaaagtctccagaagagaaactttgtagtataaacgaggaatttaccacagcagacacaaaaatactaaaagcaccagactgccacagcattgtcttagatttaggaatccaaataactactaaagttctagagaagcaatcatgataacttcataatcttctaaaggaaaaactaaaggctggcttcttaaaagttcctaactgaatcgttccaggtttctttatctctagttttgctacactggacagcttctgagagtacaggcaatgtagggattttccattacaatggtgccagagaccgaaggacaaacacatttttaaagaagcaatcaaattctgcccattgatttttatcaggacgctaaaatcctatgaaaagattgtggtcacgtgccgatttggaaactagcagaaaagttattcctcaaaagaactgtagtcacgagatgtgtcatcccttaccaaaaaaaaaaaaaagcaatacgtccaccaactatttattaagttcagcacttaaatttctcattttgcctttttacttaccaagttggaagaaaaaagggaacgcgattgtgaaacgttagccagcgtctgaatcagataatgcccccaaaacgcctgcagcctctaagattggctttactttccgaattcctcacccgagtggtcgtaagacatcgagcaaacacgttctgctaggtggaacttcagaggtcgccaaaatcaagtcatgggagcgcctttgttttccctacattaatcattcgggtgtaggatttggtttggggtctgtggatgtgtgtcccggagtggttgggggaaaggctggcgtgtacgtgtgttcccaggtgaccgggtgtatttctccgtgtgtatgtgcacgggtgtccgggcttttgtatctccctttctccagtgtttgtgtgtgtttctgtgagtccctctccccaagggtgtggggaccgtctttcctcctgcgtcagagaggaggcagggagacaaccagccgtcctctctcccggggcggccttgtgacccgcgctagccccgcgcgcaccgcaccccgccccagctgcccgaggcccgagccgccccctcagaccccgacacccgcgcactccgcccggtcccgaaggagtcccgagtcccgctcacctcgcggccacacgaaagacgacccgggagctctgggccggcccgtctgggcgcaatgaggacagagagagggtcggggacctgcacagcaggaggcagccgcggtagcgcagccaggctcccgctccagctgctcccgtccagcgcggagggaacaacatggcgacgggccggggcggggccagggaaaaagcggggcggggcctggaaggcggggtcccgcggccgagaccctgggggacgggcgcggggaaggtggagccgaggcaggcggggcctggatcgtgcttttccttcgggtcgattgctcctgaagtgtcctcccgtctgcgttcgggcgacagcgagtacgaaataactgtcattttgaaaagtttacgtaaagtggaaataaacagacctcatgagcacagtcacaggatgtcgtgattacaatgataaaaacgactagtcaaacggacaaagaacaaacaggtggatgaaaaatgaaaacagttgtgatactgtggaaaaacaagaactttttaaatgaagctattaaaactttcctttaatcttgttaaaatactgcctctgtcatctctgaatagaaagcgatggtgcaaaaggtggtattggagaagctctccttaagtccttgctttatgtatgaagttgagtgcatggatcctatgatacagaaccctacaggcgggagggactcatagggacatctcaatacgttttgtacggtgatttagtttgtttatcagaaaaccaaatactgcgtgttctcactcataagtagaagctaaatgatgagaactcatggtcacatagagaggaacaagagacaccagggcccacttgagggttgagggtgtgaggaggaaaaggagcagaaaaaaactaggtatcaagtactatgcttattacctgggtaactaaataatccgtacaccaagcccttgcaacaggcagtttacctacatgacaaacctacacatgtacccctaaacctaaaataaaagctttttaaaaaagatttagtctgtttattttccaagacaaagatctcacttttatgatgctggggctcacaacaagttaaataatctccagctttttggggagtcattttcaggtaatgacttttcattcagcactagaaaggtcatgtttgagaaagttcctcacaaattaaaaaggcaattttagaatgcttctgaaaacgacacataagcttaaataattgttttctcataaacagaaatctatttcttatctgcaggtcatttccccaaggaaatatgtataaacgtttataaaatacaaatctgttaaattggggggaagaagaaatatacactatcttgttttaaaacacatattaaaagtacacagtaaaacattatatatgaacactagagttaattttccaatagaaaaaaaagtcatgtacattgggtcaaattgcaacaagcaatccacagggtaattaaagaaatgccacctgaaaatcgtatatcctaaccatagtcaaggagtgatcaaataggagtttatctgtgcaactgctaatgccaactagctattaacaagtgatctcataaaattattgtattttgagttaaaataaaccttgacaaacccaacagctttcataaaaatgttctaagaaggttccataagtgactctcaggctgttccaaaatgtaagaaggcattcaaacatatttgagtgtagcttatagtaccttaagaaagaataagcttagaaagttactttctctaaaattactatcagttggatactagccaactgacatttaagaaagttagtatattctggtctcttccaccattcacttcttaaccacatttctatgtcagtgcaagagtaaagtgggttaaaagatttttctctgaagggcaagtttgggggatttttgttattggatgtgtgtggttggtaagctgatgcaagttggatagacagttgctatctctcttgctccataaacttgttccttgatgaaaacattaaagaactaacctagtttgactcccttcatctaacgaagattttcatctttatattctgtaaacaccaatgcatcactcacgggagagaaagaggccaaagttgctatgcataaatgattcttttacttaaataacacctactt

SEQ ID NO: 1564047 - DNA, 4001 bp, Homo sapiens
actagcacagtgtaaaagcaaatgaaatcattttttcctcccccagaatatgccggatttaatccaaacctttaaacaaggtaacattaagcaggcaaatgaattctttgataacactaaatacgtaaataggaaagtcaaatgacgtatgcatcccttatgggtcctctgtcgggcgagcatttggaccaaaacgcttattctgattttgatcccattcagagaaagatctgactctaactgagtaaaatattcgagagacgcaattcccctttcctacccccacaaactcattaatgagcatgctctaaggatagtttactaacttttttttttcccatcagggtctcagtcttggagagtaaggtgaattaggaatttccataaccaatactccccagctctttgttctttaacacacttgaaaccttctgaatctgcagtacccacaaagccttattcaaattattgtatttagttgggaatgcttagaggtgggagtggaggtgggggaggaggcagtacaatgaagaaaaagaagttgaacctttgaaaatagtacattttagtatgatgatggagagaagagaggcagaaaagcaaattcgcatcagttcagttgccatggagtggaatgatgctcaaaatcagtagtgcagattgctcggaggcaagtcttgaaagggatgtgtactgcagggatcgataggggaagagcaactggggagggctaggcactggatgagagtggcactgttggaagtctgtacaggggaggagccatggttggacctgtggggaaagcccatcttgtggcgacacactggtaagggctactcaactcactgttgaatgctggcacaataattggaaatattgcactgaagaattgggcgcggctatatttatgtaaaattcaacacggatgagaaatgattgaatgtttgagtgtgtttccaatacaacccaatacttggcgttggtgctggtggtgggtgcttcgtagcgcggaaaccctctgacgcactggattcattttgcagagctaacaagttatcagctacatccatgccgactccaaatgccacagctgtcatgccactgaaacgctattcctacattcatgcccacatttatatcctatatgcaactcaaagggtccaatgtggagtcccacatctaacctttcactgctcacaacgacagctctagggctataagcccaaaggcacactagatagcaatctggcatcgtccccaggacacttcttcctcagtagactgcccagggacagataggtagataaggtttggatgacatcaagcgagctgaacacaaggaaaaaaagcttccttgggagacaagaatgctggcatctctacgacaggggcactgttagcattacggacctagaaagtgagatgtcacacatagtcccaactacctccgacccaggtcctctcacctcacccccagctcttagagctagtcggctgtggcgcatgcgcactgagccacacccgctccccacggagccctgcgcctctctgctcggctctggcagcagctcgggattactcagcaacgcccccctgcactgtcacctgcccccgactccgacctcgggagcggctcagtcccttttctcaagctacgagtggtcctggggatcaactagactttcctttctccctcttctcacaggccccccacctcccggccttccgggtcctccagcccctagcccctgttcctgcccacgcacaggcaccttacccaacacaatgggaaggaaacaggagagggccgcgggtgccaggcaggtcagctctgcgtgccgggaatccggctccttagagtcaccgtcactgctcctgctgcctcctcgtcctcaatggggcagcaagtgcggcttggacctcggtggcctgacagctgccgctcgcgcccgccgctgccgccgcgcagcgtctcgagcccgcgcccgcgcccgccaggggagggggcggggcccgcgccgcctcctcgtgcccctttctcggcggtggggacccggtgtagccgcctcccgccctccatgtggcaagcgctccctggctcgcccactcttctttcatgctcatcgtccaaccctggtctcccttgtcctccttctcctcccctagccgattagtaggcacagcggcaatagaccgtcaaatattgctcttccacttagctcctctgcagcctgggcctaagccctcaagcagggctagccactgccccacttcctgcaattatcctctgatctacctcatttatcctagctcaaaatcctttaattttgccaagagggtagtacatacaccctcttgtttcaaataactcaggaaaacacatgatcacaacacattgctaggccctctaactggctacagcttatgaaattttcaggcaattaaaaaaaatgtccacatctgtagcgcaggcatagaggacacactgccctttactcttaccagatacagttctagagggccacacagggggcattacttgaatttcccggaattgctgctggggcagaatttgatgttttaattgtgcctagccgaccagctagtctctttttgttgttttctgtagccctctggtacttccaactagtttgtgattttccccctggaattgaagaaggacaaagctcctgaggtcatttagcctgcactccacctctctgtcaggcagctccatctctgaagcttccccattgcccgaaaccctgtgaccttgtggcacaggccctcactcatctcatgaccccgtccaggccctcacacatacccgctacttccatctaggccactcttcctctgtctcttgacaaggcaatcgtgcaatcaatctccgcaggccccagcttaaatgtcacttctcaggataacctttctcgataatctcagaatagagatggtgccccagtttatactcttgtagcctcctgtaacttgctgtatttttccttcataacacttacccatttttggtggtacatttaagtgtatgattatttggttgacagctgtcttccctactaaactatagtggggaaggactatgaggtcaaggacaacgtttgtgttcaccaccgtatgcacagagcctagggcaatgcttgctgcataggacatgctcagaaaatatttgctgaatatgaatgaatgctgtatcactaatagttgttatatttaaataaaataaattgatgtaactgaatctcatgtgctcctatttaaaccaaccccgttccccacacatacactctaaaacactcttctgatgaagacgagattcacacaatcctctaaatcaaattttccgcatacattttagtctattaaaaaactattgagcatgggccccaacatatgtataaggatttatagattatatacatgtactactgtacatgtatacattacacattactttaaacatacattttaatgagtaaacattaaaatactccacagaaattttaaaagaatgagaaaaataaatatattgatgttccaatgttttctttttgcacctcaataaatagttttgtgaaatgctttaaataacagtccttcatattagagtaactcgtctttaggtgtaacaatctagactactttttcattttctcatagatgccattttccaacagtttaaaaatctctgagaaacccccaaaccaactggcaagttttaaggatcttttagtttctaagctacctcgttctgtagtcaggatctcacaactgctgaaagcaccacacgtttagtgaatgttggaacacctaaaggtaagaaaaatcctttgttagaccaaagattcctacatgtaaatcctatattaaaagagtctctagaggccacttaaaaagcagctactattatctttctagaatggaagcaacatgactaacactagttgtgagggatcagcaaaaatggacagcacgaagattca

SEQ ID NO: 1564048 - DNA, 4001 bp, Homo sapiens
tgggaaaagcacagaaaaccttgcctgatgcttgcaaggctaagaattgttttctccctgctggctgcttttctctctgttctaaagagaagcttccaagaatcagttaaataaagggatcacaccagaggatgcgagataatgctaaaccaacaaaaacaaagacccaaatgaaacagacagagccatgagaatacgcggttatcaaaactttgtttggccatatctatttatcatcgctgcacacccgggctctgcggaatatcattctgttgatgtcacttatcctcagcaaaatatttacacatccttaaaaacgccagatgaggggggccggcccgcgcactgccgcaagccgcccctcaaaccccatcgctgggttctgaacagcccacgacataggggcacgacggtgggtggcaccagcgggcacaggtgagagctaccaacagttccgggaacacggtcacccagacgctgcgccgtgccctccccacctctcccctacctgactctgcaagcagcagccacatacccgatatggtgtcggcgcctccttgtcctcctctcctgcctttttcattgattaagttctcaaaccattgttaaagctgggttgctttttccttggaaaactgggctaaattcattaagcttccctctgccacaaaaggaatattcataaaagtttggcaggcagaaagggagactgagtgagtgccatggtgtgggtaacaacccgctcctccaaagccaccttcttcttccgtgccccatccctctctccatccatccgtcgtgccccaaacctactccaaggacttctgatagggaaacacaaagcagcagctgtttggcaacatttctacccctcgccagcaactgtggtgggatgccatttccccacccaggcggagcttatcctgaacaatagtcgggctttaaatggcaaacaagcaaacacacagagcacaaccccaaccccgaaaaagccaccgcggagagaagcaataactccctccgcagcaaaaggcgccactgaaacgcacgcaaaaatgcagcgagaacgttgctcggtgcctaacatggcagaaagcccgagctggtgcggccaccccggggctgggcattggggggcaccggggctcccggggcgccgacgcacactcacccggctccgggggggatgcggggctggccgcgcgtcacaaagaggagcccggcgcaatctggcaaaacccaactttccaccaggctcgccagggccgccagatacgtcaacagaatccatctttcgaagggcctggaaggcgccgggttttccgggccggggcagaacggcagatccggagactgcccggtgcggtgcctgggcgcggagtccgccgtgcaccgccctctgcgcccgatgccagtgcgggcggcggcccgaaacccacttcggggcccccgccccgccggccggcgccgcctccccggcagtccccggccccgccggccagtgcgcggcgccgggaacgggagcggggccccggcgcgccacacgggcggcggcctcggcccgcgtccccgcccccgcccggccctcccagccggccccggcctccgggcgccgtcctgcccccgggagcaggcccctccccgggcgccgggccccgccaggcgcgcccagcccggcgcgccccctgcgtcccggtggcagctccgcgcggggagggcgggggtgaccccggcccgcacgggggcgccgcggccactacctcgcaatcgcggccgccgcctccaggaagccgcggggtggtcgagtgtgctggaactctccggtctggcctcgccgccggccgcctgaagggggtgcgccgcggtgggagccgccgtcgccgctgtcaccgagtcgctgtcgccgccgccgctgctggttgtgcgtgagcgtgtgtgcgcctgtgtcctggcgagtgtgtgtctgcgtgcggcgcccggcctttactatatacaccaaggggtgggaggaggcggggaaggggagggcttgggggaggcggcggaggagggggagcaggaggggggcgaaagggtacccgaggaggcggcggcggaggagggacaggtgatctcgcccacggggagggcgtggccgtgggcggcgcggggtgccaggaagaaggggtgtcggggcggggaggaggaccttggggggagcgccgggggagggccggaggagctgggaccctactgcctcccggcgggctggggaccattccagaccccaggatggagaagagcgaggaacagagcccagaagggaggaagtggctggctgatggaagcgggggaggtgggaagggctcagcgatcacccgaaaatgccaattgtgataccggtggaggatgcttctcacaaggtgggagattaggaaagatcaaattagtccacctacgtaatgtaatttccatccaagaggtgattcatgtatcaatctaacctttattaagcgcctagtgtttgccagatactgggcaaagaactggagttacagggacggtgactgtatgattgctgaccagtaaataagtagtaggtgtcagttgtactattgatcattttaaaactgaaaacaataaacccttagaattcttgagacagccaaggaagcaaccaaattggtttaatgattctccaaagatgtaaagatttttttctattaatcaaaacaggatgaagatatttgagagagaatagcagagcagaaattatttaatcagagcagagaataaaatgaatctagttgttcttggtagtctcgagccccctgaagttccaatactgtgtgtattaaacatgactttcctcttatcaaatctgagttttataacacagtttataattagtatgggagcctgaacttgtgtttgaaaggctgtattctaactatgttgtgttgcaagcataaggtggtagtaactgaggctgaatgatgtctgtcttgagcacttttgcctttgtggactccttcctccgtagaaagatattacaaattacattttacaattgcatttgtgtaaagatgaatataatagcattatatattaaaacagtttcttcaacctaaaaattcattttttcttctgattttaaaagaaattaaaagatttatgtgggtccctaaacatgagccccaggcactgtgtctactatgcctaagggagaagtcagccctggtagtaccattccttgatactgaatttcctcttttgaaaaagaagagttaaattaagaagtacccagaccacacaggggtggaaagacacacagtgcaagtttaagaattgataataatgaatatcaacagaaagtgtcagtttctacttgtttcaatcaggttttggggggtttaaaatcagccccaactaattaatgatacctgtggaaatatttatgaatgtgtcttcaatcatttcagcaaccaaagacttcctctatagatctcataactgttctaagttcttggataaggtatgtgaggtctcggttgccaagacctagcctgaatccaactaaagacacagctgggcaattataattgggcaagttcatggatgaaagatccataaaggttttgtgtgtgttgagggggtatgtgtgtataaggtagggattgatatcctggaaggcaattactagcctatttcttttgttggcctcatcacaaccctgggttaatgtttgatcctcactggcagttgtgattcatatttgctgccctttgaggtgcttatgttttcaggaaagattatattgattcagattaatgcagaagaaataggcttcatggcccccattcccaaataaacatacagtggcacccttctgccttttcatcctggctgcccttgcaaagggaaggaaaaaaggttcataaagggtgggtctggatttgtgtgtgcgtgtggggtggtgctttgggacagaaataggacattaatgtggaataattttgttc

SEQ ID NO: 1564049 - DNA, 4001 bp, Homo sapiens
cccttcctataggaactgcagcccgagcagggggcgtggggaggagggcgagcctgggaaaagcccggcgagggtggcgaggaggcgcgtgcccccgggagggaaagggtgggggctgcggcgaggggaccctgcggcgaggcggacgtcggaggagcccgcagcccggggctgcccggcactcctcccccgcccttcacacaaaggggcccagggaccccgcttcctgctcgcgcagcccagccggctcaggcctgagggctccgttccagttaccgctgcccgggcgggtttctgggccccggctcccgcgggggtcgtccggcctgtgaaggggagaaggacgcacattacccggctgacccccgccccgaacctgcggcgccggccgccgcctcccccaactcccacccggatcaagctactgccgcttaccccgccgtccgcacccgcccggccgccggggaggctctgtcacgccaaggccatggccacccgctggctcctctgtctctccgctgccccagcgctgctgctcgccgcggggaaagaagcgggggccttccgcggcggccgcagggactccaggcgaacccacctcttttttttctcacccaccccccacccccacccccacccccacccccacccccaccaagcacacacccggaagggtttccctgacacactggctgaggtgccccagttccccgagactggacgggatcacttccggtggggaaagtcccacctcttcggggcgagccgggtggcgctggagccgcgccctgctgagcgagcgagccggccggggacggtttcgggtcgggactccggcttcgggaacgggcctctggaaacctgcgacgtcagtccttacccgcccgcggctgccgcggaccgtcccacccccaaacccgtagaagcccctccgacctgcaacctccagccgcccggccctaggacttgagcggctccctggccggtgcggaacctgcgggctaataatctagcgaccgggagaacgccaaacatccctggactagaagttgcaggggaaatcaaacagcccagaaagtttattctccttgctggtatttcttccacttgctattttgctgagagatgcatgcaaactacccttagactttcagatgcagtgcgttttacttagccgtgcctgacaaacacacagaacttttaccgtctggtagatccgccttgactttaccagcgaatactaaagtcacttaaaaaaaaatcacaaggctcgaaaacagcagcattagaagtagactttatggtactctgctcagctatgttctcatttgattccaaccactacacggcagaaaaggtaaccaatattcaagaaagatttgattggaaacggtttaggcctaaagactaatttattttaatcgttgattatgtataacaatttgcttggctggctcttacatgctgaagttttgttttaaaggccatcctatgtagtctttgaaattcaaaagcaagtagtaactctggtgttagattctaagtttctatttttagataaaattgttacttccgactatctttccctttgctagctttctatttgtaaactttgtgtcggatccacagagccccagggccaggagtctaggctgtattttaggtgtgtcactttcttttcaattcaagcatgtacccagaaacctgcgagactcagtggccagcctagcaaaaatgactccaaattcccttacttacaagccctaaatggccaaactctataaagagatttattactcagcctaaattgttggacattagaacacaggcgaatcatagtagtgtgaggtcccactgtccctccctgagtattccccaatgtcacttacagtcttcaaaggagagtttagttcaatttctccttgacctcaggccggtgccatctctccagcgaagtccccagctctggctccagctggcctgggccctgtgtcgtatcagaggcactgccctctgctggaaggggtttggtctgtgagttatgagtttccccacaggtcactgctcctttcacacgtgctgttgcctgatttggagctctgctgctcatctccctgcctagctgtctccagactgtctggtgggattcacagccctccaccagccgtgcttgtaactgagtctggaaattcctcttctgatccagccagtgttgagcaatcgtggcaagtctttgctctattactaaactgtcaaagcaaggagttctttttcaggtcatcccacctgttggcaattctaatatctctgaatgtgttggtcatgcttaggagagagttctttgtttctccacgcagtgaaacatactcctcccctcagtacagcgtcctgtggggtcactctcgtcaactacagtggacaaatattacactcagtctaaagatccttctaaactttcttaggaagggtattcattacagcattgattaggaaatcaaacaattggaagaagcttaaatgtccttcagtaggtgatttttaaaagtttcatagctctctatatctattatctatcatctatctatctatctaccaacctacctacctacctatctgtattcacagaataggatattatgcagctactttaaaagagaaaagcagatttgtaagtgtttatataaaaagatggccaagatatattgtagggctgaaaaagcaagatactgaacaaatgtctagttgctactgtttatgtaaaacgcaggtgtgtaatagttacatagccattcaaatctgaaacaaagtaattatgggtgaggactattatgaaatggcttttatttctccatattttaatttataaacaataattgggaaaaaggaagtaaatataactttataatatttttaaaggaggaacaaaagaaagttgttgatcttggttttgtaaaaaaaaaaaaaaaaaatcctgactgtctaggggtcagtggacaggtccgcccaatttaaacaaattccctacccttgcttgccctccccaaacatctctatacttagaaaagtattttcacatacattatctcattagactcctgttgtttgctagtgtactctcattaagcaatgagggtataaagagcaagcagaagagtgcggcctggcagttgagagctaaggctctgaaatgagacagaggtgcattaaaattgcagctccgccacattctagctctgtgtccccaagcaagtgatttcacttgtctgagcctctaactcctcacttgtaaaaaggagataagaagttaacgtgaaaatgtaatgaggtattacaggtaaagtgcttagcacagtcccttgcacattataaagcctcaataaatgctatttggtttttatttaaaagatttaatgaattgttaatttttaaaaaatagcaaacatgggggtaacaaaattttaaaagctcaaatatctgcaagtggcacgaaaataataattcagttactcttcacaaagatatttattgttaaaagcttcttatgtttttcaggggggaacattattcatatgtcagtgtatcaatctaccttctatatatatttttaaaaattactgtactacaaaagtaatcaactgtacacactattttttaccttgctttttaaactttaattaattaatttttttaagacagtgtctccctctgttacccaagctggagggcagtagcatgatcatagctcactgcagcctcaacctcctggactcaagggatcctcccacctcagcctcccgagtagctaggactacaggtacatgccaccacacacagctaatttaatttaatttaatttttttggtagagatggagtcttactatgttgcccatggtggtctccaactcctgagctcaagggatcctcccgacttggcctcccaaagtgctgggattaaaggcatgagccaccatgtctggccttcttaatttttatttcatgg

SEQ ID NO: 1564050 - DNA, 4001 bp, Homo sapiens
ttaaaccttcagtctgtttcccagtgaaggacaggacagattttctaagagattggaccacatccagtttggccacccagccggagtaagaaatctgcacttgttcagtgttcccagacccacgtattttctgtaaatacaggcaatgttaccagaaacaatttggatcaactgcagaaaaagagtcattcctgatttttgttggttattaattctaggtactagtcttttctattagtaacttttcttcctactacacgccccaagtaattaagtaaaatgcctagaaggcaggtcttgagttcttcgtcttgcaacactaagatttatgaatctagttgagaaacttgagagagaaggggagggcggcgggagggggtgttggggggtgggaggggaaggtgtgggtgggacagacacagaggacttatctgtgcaacagataatcggctccaaataattttttcaaagtgctctatttacccgagattatttgttagatgttttgtcgtgtaagttaatcaatacttgttgaattgagcaagcaacttcagaaggttatattccaggcgaaatatacacagactgacatttctttttcacttttctttcacttaaaaatagctttaaaatatttgttgacgcttgttactttttactacgctctatagaaacaacccgatagtcttccatggcaggagtaacctcaaaaatgcgtcatgtctaactttcaaaagcaaagcacagtcattaatgcacggttcaagcaacccagaagtcgatgtcggattaccacacccccttctaacaaattacaagacttggtttggttacctgaaaagactgttgattaaccaggctataaaccaggatgaaaccttggccgtttttgatgtagagatctctcatggaggcaaactgctcagttcctgcggtgtccagaatttccagcacggagggggaagagtccacttcgatctctttgcggtagaaatcttcaatggtggggtcatatttctcaatgaaagtcccagtgacaaactgcacagtaagggcagatttgccaacccctccactccctaacaccactaccttgtattccctcatgagtctcaccttcaccaactcctaccagagggggggaaagatcaccccgctagctgtggcgcggctagacgaggcggaaggtgggcggaaatctgcgaactggggaggagagtgcagaggagcagagggcccaaccggggaagaagaggaagttacaggagggggaggggaaagagcgtagagtcggggagggtggggaagggatggtaatgcccttcctataggaactgcagcccgagcagggggcgtggggaggagggcgagcctgggaaaagcccggcgagggtggcgaggaggcgcgtgcccccgggagggaaagggtgggggctgcggcgaggggaccctgcggcgaggcggacgtcggaggagcccgcagcccggggctgcccggcactcctcccccgcccttcacacaaaggggcccagggaccccgcttcctgctcgcgcagcccagccggctcaggcctgagggctccgttccagttaccgctgcccgggcgggtttctgggccccggctcccgcgggggtcgtccggcctgtgaaggggagaaggacgcacattacccggctgacccccgccccgaacctgcggcgccggccgccgcctcccccaactcccacccggatcaagctactgccgcttaccccgccgtccgcacccgcccggccgccggggaggctctgtcacgccaaggccatggccacccgctggctcctctgtctctccgctgccccagcgctgctgctcgccgcggggaaagaagcgggggccttccgcggcggccgcagggactccaggcgaacccacctcttttttttctcacccaccccccacccccacccccacccccacccccacccccaccaagcacacacccggaagggtttccctgacacactggctgaggtgccccagttccccgagactggacgggatcacttccggtggggaaagtcccacctcttcggggcgagccgggtggcgctggagccgcgccctgctgagcgagcgagccggccggggacggtttcgggtcgggactccggcttcgggaacgggcctctggaaacctgcgacgtcagtccttacccgcccgcggctgccgcggaccgtcccacccccaaacccgtagaagcccctccgacctgcaacctccagccgcccggccctaggacttgagcggctccctggccggtgcggaacctgcgggctaataatctagcgaccgggagaacgccaaacatccctggactagaagttgcaggggaaatcaaacagcccagaaagtttattctccttgctggtatttcttccacttgctattttgctgagagatgcatgcaaactacccttagactttcagatgcagtgcgttttacttagccgtgcctgacaaacacacagaacttttaccgtctggtagatccgccttgactttaccagcgaatactaaagtcacttaaaaaaaaatcacaaggctcgaaaacagcagcattagaagtagactttatggtactctgctcagctatgttctcatttgattccaaccactacacggcagaaaaggtaaccaatattcaagaaagatttgattggaaacggtttaggcctaaagactaatttattttaatcgttgattatgtataacaatttgcttggctggctcttacatgctgaagttttgttttaaaggccatcctatgtagtctttgaaattcaaaagcaagtagtaactctggtgttagattctaagtttctatttttagataaaattgttacttccgactatctttccctttgctagctttctatttgtaaactttgtgtcggatccacagagccccagggccaggagtctaggctgtattttaggtgtgtcactttcttttcaattcaagcatgtacccagaaacctgcgagactcagtggccagcctagcaaaaatgactccaaattcccttacttacaagccctaaatggccaaactctataaagagatttattactcagcctaaattgttggacattagaacacaggcgaatcatagtagtgtgaggtcccactgtccctccctgagtattccccaatgtcacttacagtcttcaaaggagagtttagttcaatttctccttgacctcaggccggtgccatctctccagcgaagtccccagctctggctccagctggcctgggccctgtgtcgtatcagaggcactgccctctgctggaaggggtttggtctgtgagttatgagtttccccacaggtcactgctcctttcacacgtgctgttgcctgatttggagctctgctgctcatctccctgcctagctgtctccagactgtctggtgggattcacagccctccaccagccgtgcttgtaactgagtctggaaattcctcttctgatccagccagtgttgagcaatcgtggcaagtctttgctctattactaaactgtcaaagcaaggagttctttttcaggtcatcccacctgttggcaattctaatatctctgaatgtgttggtcatgcttaggagagagttctttgtttctccacgcagtgaaacatactcctcccctcagtacagcgtcctgtggggtcactctcgtcaactacagtggacaaatattacactcagtctaaagatccttctaaactttcttaggaagggtattcattacagcattgattaggaaatcaaacaattggaagaagcttaaatgtccttcagtaggtgatttttaaaagtttcatagctctctatatctattatctatcatctatctatctatctaccaacctacctacctacctatctgtattcacagaataggatattatgcagctactttaaaagagaaaagcagatttgtaagtgtttatat

SEQ ID NO: 1564051 - DNA, 4001 bp, Homo sapiens
tggtattttagtagagatgggatttcaccttgttgcctgggctggttttgaactcctgagctcaggcaatccgcctgcctcggcctcccgaagtgctacgattacaggcgtgagccaccgcacccagccaaaattagcttattatttttataacttgttgcaaaatcctctttttaggttagagtttcatttaatcctctttaaattatatgtccgcaacacccaaatttaagatgcttgttttttgtttctttgagagacacggtctcactctgttggctaagctagaatgcagtggcgcaatcatggctcactgcagccttgaactcctgagctcaagctaaccttccaaagcactaggattacaggagtataaaccactgtgcctgaccccatatttaatacactttaaaagtacatggtcaagttcctactagaaaaggtgcaagtgaatgagaaaggcagtctaatgcagggaccagctgtgtgatcttgggatggcacttaaactctcactcccagtttccttatcagtaaaacaaggatgatgaaaagtacctacagcatagtactattatgaggattacaacaaacaacaggacgtagattcttcagatgtgccaggccctgttctgagtgctcaataaatgccagcaattattaccagagaaactgcagatgtaacagaaaagaatactcttatgaagactaacagcaatctcaaagtgtattccataagccgataacatcttttctttggtcaattgttgacaaggtctttttccctttaccaattaaaatgtatttatcttggatgactgttacgtgtgttcactttgtaaaaatttatcaagccatacaacacttaagatgtgtgaacttttccgtaaatattctatttttcagtaaagttttaaagaaacgcattagtttgggcccagaaagatgctgctctacattcaagcccaggaaatgtcaaatatattcagtgcttcctccaaacacgattaatctcacaacagcttctttctccccttttaccaccacactatacaccagaaatcatcccacaaatcacgtaagttttgaaaataaaaaccacctgccacctcatgcaagggctgattacatacttatgttctatgcataaaacgccaaaactaggaaattcagaacgacagttaaatttaaacaaaataaaagttgccagaaacccttacttagtcacttcaggaagccactgaacggtaagactgggccactgaagagcatgggtcataaccaggtcatatagaaacggtgtattcttcttccagattttatattcttcattgatgacacgctcctccacagtatcttcaaacactgaaatttggagaaagcccacacgattaagtggctgagatagatcaaagtcagaaattggaggtcacctcaagatggccacacctcatgtactctttccttttacctctaatttggacacggacaactaactgctcttccagaaggtggagaaaatactaacaatcaggaagcctattttttccattgagatcaataccccctgcgtacaccatgttgggtagtcaattacacggacatggaaattgtttaccctgttacagctgttcgcacctgttctaagatgacgacctgtacgtacaggggctgcgcgacccagtcgggaagacaaatgcacgtgtagcagaagcccacaggcctggtctctccaatccccatcaggggaggccccagctcccacgacgcccgcctcggcagccataggcctgaggaccccagcaacccccggacaagggccgcgaccccgaggcggtcaacgcgcgcgcgcgcgtagaaagagccgcggcgctcgcttcccagcggcgggggccgcctccgccccggggccgagggcgccggagggagcgcagccgctggaggagggaagggaagaggggggcccagccctcggccccgcgcccggctccggaagtgctcggagccctcggcgcggcggtcccgtcccgcgcaggcccctcgaggcgcgcgcccagtctcgcgcccggccccgccccctgctccgcacgccaattcgcgcctttcgccggcgcgtgccgcggcctcgcgcgcccgccgccccccgcggccccggcgcgcgccgccccgcagggcctcttactctctttactcgccatcttgcgtcgggtcgttcgcccctcgccgccgcctcggactcctctcgttagccaagagcagcccgaccgctggcgctcctgcctttcccaagcgcgtcacactccccactgtcgaaagcccgggccccgtcttgctgcctgggtgctccccagacgccgcgtccttctttcctgcctcctccccgctcgcgggtaccgaggtctgaggcgctcttctctctctctccaaacttggaacgagacttttcaacccgcgcctcccagcccgcccaggcagctgagcgcaggcgcatccgccctgggaaaagtgagaggaggcggagaggcgggtctgggagccaacggctccggcgccgagaccaatgacgcgcggcgggcgggtttcacgcggcgttcggaggcgggcttctgggggtgggcggagcgtgccgcggcaggaagttggcgatgcgcaggcgcgagggctcgcccggcgctcccagggccggccgcggaggcggatggggcgcgcgggggcggggcggatgagggcccgagggggcggggcggatgggggcgcgcgagggcggggctgatggaggcgcggctggccggctgagtgggggccgcgagccccggggcggcgagccttggggcccgcggggcgtggttgcttgtagcggcagcggtggtgggggtgagaggggggcagggaggctgccgccgcttagccaagcaaaatctcagagcaagaggggaaaatggttcctgttctcgagagattactgtgccttcaaagtctccctgataatcacggacatgcaattctctgcacccctgaaatgttctcctccagccgactggcctttcctggggcccggtcgggccgaggtggggctggtctcagacggaggagagcttttggagaggccgcgggcgttttctgcctgcaaaagccgccgggccgccctgttaggctaaatgtgcagcctgtggcggcacaggccgccggcgggccgaagccgatttacactgttacattttaatttgttcgatgtttgggtccttaagatgatggtttgcggcctcttcgcgcttcaggggattttgtccctgcactggcgttcctttctcatcccagccccggcccctgctgagtcatttttgtcacctgcaggggtcccagcgcgaccccaccccaagctggcggagctggagagagcagggctgaactaccctgggcctgcttacctgagccctgctctgctcaggaacttcatagcccctgaggagtgtgtcgggggaggagaaagctggctgcaaggccaaaagggaaatagaagaaaatgagggccaggagcagaggggacggagttgggggaggcgaccaaggtgcctgcgtgcaaagggaaccgaagtgtacgtccagctccgggagaggctcctcttgcaaaagcacccccggaacatttgctgccttgatacctttccaagtgccttcatgctcagatgctatcttgcagatgccgctgtcatgcccacttttctgaccgggacgcaaacccagacgttagtcagtggcagaaccagtcacattcccttctgtagatatttactgtgttgtttccgatacaataccgttcattattataacgccctccccccattctgggtcaaggaatcttgttagtgcctaaggctgagggggtggctagagagggaagagagttggaagggtgtttaagcaatacagccctcatattctaggacattagttggcaagactttttctaaaaggaccgagatagtaaatattttaggctt

SEQ ID NO: 1564052 - DNA, 4001 bp, Homo sapiens
acctacagcatagtactattatgaggattacaacaaacaacaggacgtagattcttcagatgtgccaggccctgttctgagtgctcaataaatgccagcaattattaccagagaaactgcagatgtaacagaaaagaatactcttatgaagactaacagcaatctcaaagtgtattccataagccgataacatcttttctttggtcaattgttgacaaggtctttttccctttaccaattaaaatgtatttatcttggatgactgttacgtgtgttcactttgtaaaaatttatcaagccatacaacacttaagatgtgtgaacttttccgtaaatattctatttttcagtaaagttttaaagaaacgcattagtttgggcccagaaagatgctgctctacattcaagcccaggaaatgtcaaatatattcagtgcttcctccaaacacgattaatctcacaacagcttctttctccccttttaccaccacactatacaccagaaatcatcccacaaatcacgtaagttttgaaaataaaaaccacctgccacctcatgcaagggctgattacatacttatgttctatgcataaaacgccaaaactaggaaattcagaacgacagttaaatttaaacaaaataaaagttgccagaaacccttacttagtcacttcaggaagccactgaacggtaagactgggccactgaagagcatgggtcataaccaggtcatatagaaacggtgtattcttcttccagattttatattcttcattgatgacacgctcctccacagtatcttcaaacactgaaatttggagaaagcccacacgattaagtggctgagatagatcaaagtcagaaattggaggtcacctcaagatggccacacctcatgtactctttccttttacctctaatttggacacggacaactaactgctcttccagaaggtggagaaaatactaacaatcaggaagcctattttttccattgagatcaataccccctgcgtacaccatgttgggtagtcaattacacggacatggaaattgtttaccctgttacagctgttcgcacctgttctaagatgacgacctgtacgtacaggggctgcgcgacccagtcgggaagacaaatgcacgtgtagcagaagcccacaggcctggtctctccaatccccatcaggggaggccccagctcccacgacgcccgcctcggcagccataggcctgaggaccccagcaacccccggacaagggccgcgaccccgaggcggtcaacgcgcgcgcgcgcgtagaaagagccgcggcgctcgcttcccagcggcgggggccgcctccgccccggggccgagggcgccggagggagcgcagccgctggaggagggaagggaagaggggggcccagccctcggccccgcgcccggctccggaagtgctcggagccctcggcgcggcggtcccgtcccgcgcaggcccctcgaggcgcgcgcccagtctcgcgcccggccccgccccctgctccgcacgccaattcgcgcctttcgccggcgcgtgccgcggcctcgcgcgcccgccgccccccgcggccccggcgcgcgccgccccgcagggcctcttactctctttactcgccatcttgcgtcgggtcgttcgcccctcgccgccgcctcggactcctctcgttagccaagagcagcccgaccgctggcgctcctgcctttcccaagcgcgtcacactccccactgtcgaaagcccgggccccgtcttgctgcctgggtgctccccagacgccgcgtccttctttcctgcctcctccccgctcgcgggtaccgaggtctgaggcgctcttctctctctctccaaacttggaacgagacttttcaacccgcgcctcccagcccgcccaggcagctgagcgcaggcgcatccgccctgggaaaagtgagaggaggcggagaggcgggtctgggagccaacggctccggcgccgagaccaatgacgcgcggcgggcgggtttcacgcggcgttcggaggcgggcttctgggggtgggcggagcgtgccgcggcaggaagttggcgatgcgcaggcgcgagggctcgcccggcgctcccagggccggccgcggaggcggatggggcgcgcgggggcggggcggatgagggcccgagggggcggggcggatgggggcgcgcgagggcggggctgatggaggcgcggctggccggctgagtgggggccgcgagccccggggcggcgagccttggggcccgcggggcgtggttgcttgtagcggcagcggtggtgggggtgagaggggggcagggaggctgccgccgcttagccaagcaaaatctcagagcaagaggggaaaatggttcctgttctcgagagattactgtgccttcaaagtctccctgataatcacggacatgcaattctctgcacccctgaaatgttctcctccagccgactggcctttcctggggcccggtcgggccgaggtggggctggtctcagacggaggagagcttttggagaggccgcgggcgttttctgcctgcaaaagccgccgggccgccctgttaggctaaatgtgcagcctgtggcggcacaggccgccggcgggccgaagccgatttacactgttacattttaatttgttcgatgtttgggtccttaagatgatggtttgcggcctcttcgcgcttcaggggattttgtccctgcactggcgttcctttctcatcccagccccggcccctgctgagtcatttttgtcacctgcaggggtcccagcgcgaccccaccccaagctggcggagctggagagagcagggctgaactaccctgggcctgcttacctgagccctgctctgctcaggaacttcatagcccctgaggagtgtgtcgggggaggagaaagctggctgcaaggccaaaagggaaatagaagaaaatgagggccaggagcagaggggacggagttgggggaggcgaccaaggtgcctgcgtgcaaagggaaccgaagtgtacgtccagctccgggagaggctcctcttgcaaaagcacccccggaacatttgctgccttgatacctttccaagtgccttcatgctcagatgctatcttgcagatgccgctgtcatgcccacttttctgaccgggacgcaaacccagacgttagtcagtggcagaaccagtcacattcccttctgtagatatttactgtgttgtttccgatacaataccgttcattattataacgccctccccccattctgggtcaaggaatcttgttagtgcctaaggctgagggggtggctagagagggaagagagttggaagggtgtttaagcaatacagccctcatattctaggacattagttggcaagactttttctaaaaggaccgagatagtaaatattttaggctttgggggcaactgctcgactctgtcgctttgcagcgcaaagcagccatggaaaatatggatgcatttggctgcgttccgataaaactacagacactaaaatcgttttcacgggtcacaaaatcttttgattttttttttctatcacttgaaaacggaaaaaccattctcagctcgagggtcatacaaaaacatgtggtgggttagatttagtcggaggactgtagtttgcccaccttgttctagaataattgtaccttatggctctgcttcaaagagaacctcgtgtgcaaagcaagaggcggcttgggagatgatttgtatccctttaatacagtgtactcatttctgacaagtagacatgatttccaaaacctattaaaagaaatgtttaaaggactgaaagaaaagaaatcttcccagacgacttggctttaaaatcttgatactgtttacctcagtgagggtcagagaaggaaatatggaacaaatattttgggaatttctgagaatattcacacactatcatgcatttaatccgaaagtgtcatgtacagca

SEQ ID NO: 1564053 - DNA, 4001 bp, Homo sapiens
cacagtatgaaggtagcccctacttggcctgctcctccctttccccgcaaacataaggctagagcccactgccctagaaaacagcaaggacttcagcagacagggggcatcttgcagagagacctggcggggccacccacagtgtgatcagggctttgccacctaagacaggtagacaaattcaagcctggggctgcatcccagggtgggggtaggggactctcagggctgaaagtcttgcctgagattcagcacatcagacaagacttcacaacaatgggggccccaggctccttccacaggccccaagggaccatctcatcctcccaacaagctgctggctgtcccctataaggcagcaaaagaccatgaaaggctcttgggggggtgtgtgaaggggcgaacttggcgacgagacagctgccacctccctgggctcctggccaacacagccttggccctcacacagcaactggctcagccctgagccctgtctcttatgtgcagcccggtcctaaggtggttccctccccagggctcaagcccggtttccagaggcaaaaggggcccttttggaggctgttctgaaccactgtgctcttctattgggatggagcagcagccacttcatccaaccctcagggctgtggtgagaactcagggagtcctgagaaccctgtgacccagccagaggtcaggatgaatcccagatcttcaggccccaccctctgaataagaagcaggtaaagccaggcaataatagcacctgctcaacactaggttgctgccacacctttgctctatgctcgtgcacacacatacacagacaaacacactccaattttctcttcctcctcaagccacagggaacccgagttacctgctcccaggtgggcaagagttagaatcacacagaggcactggcgtctgagagcacaaaaaccttcaagagactctggcaaaggggccagagtcacacagtaacatccaccacagccaagggccagtcacagacacgagccccaaataactacgggcccacatcacagaaggaacacacagtaaggaccacaattacacagtgggtcccctttccatggatgagcgtcagtgtcacagatacaaactccccaaaagaaggggcaatgagtcacacacacattccctgcatgccccttcccacccaataagtgggttagggtcaatcaaaagacagtcgtcccccaagccccgccccatggataaggatcagagtcacagaccgccccccctcaaagggtaaagaccagagtcacatcccccctccgatcccccaggaatagagaccagaaccacagaatatttccccatggaccgataaacaccagagtaacacagagcagcatcccctctcctatgcacaaactcaaagtcgcagacaaccgcttccccactgataaacttcgatgtagccgacacagtgatccacagtagcccactcccatccgtccctcccttcccccaacccgcatgcacccatcccatgtcccagtcgcgcacgcgcctttgctcacaccaaaaaaaaaaaaaaaaaaaaaaaaaaccaaaaaaaaaaaaaccctcccgggttgagacattgcaccaacccctccgttccgcgcatctcccccgacccgaagtccgccctcgcgcctcctctacgtccccgccccgggccccttacctccgcccccacgaccagcgtcgacgctcaccttctcggcccgggctgtcaaggaagggctcccagacatcacctctgcccgccgccacctcctccaactctcccagctcagccggagccggagcgcgcaacaaccaagtccgagactggaggcagatcggggggaggggagaagcgccaagcgcgctgccctcccagggaaactcactgccgcctactcccagccggccacagtcaccagctcaaaatggcgacgacgagaagggagtcggcgctccgaccaccatccacctactaaggaagcgcgctctggccggccccggcgattggtcaccgcccgctaggggacagccctggcctcctctgattggcaagcgctggccacctccccacaccccttgcgaacgctcccctagtggagaaaaggagtagctattagccaattcggcagggcccgctttttagaagcttgatttcctttgaagatgaaagactagcggaagctctgcctctttccccagtgggcgagggaactcggggcgattggctgggaactgtatccacccaaatgtcaccgatttcttcctatgcaggaaatgagcagacccatcaataagaaatttctcagcctggccgaaaatggttggccccacgaagccacgacaactggaggcaaagagggttgctcaacgccccgcctcattggaaaaccaaatcagatctgggacctatatagcgtggcggaggcggggcgatgattgtcgcgctcgcacccactgcagctgcgcacagtcgcatttctttccccgcccctgagaccctgcagcaccatctgtcatggcggctgggctgtttggtttgagcgctcgccgtcttttggcggcagcggcgacgcgagggctcccggccgcccgcgtccgctgggaatctagcttctccaggactgtggtcgccccgtccgctgtggcgggaaagcggcccccagaaccgaccacaccgtggcaagaggacccagaacccgaggacgaaaacttgtatgagaaggtgagaggcgggggggggggggggggtagtggggacggaaccccgaaggggtcagtccgggatcggcagatggggcgctgtagaggacgttcttaggcagtagaggactgcgcggccggcgaaagcctagaagacttgggaattttgcctaccttgtgttcctcctttgtctctcggtatcttcgttccagggccagaggcaggattggttttattttgcagacagaaatcacacctcaagtggacagcgctcaaaacacgttagaagcagtatagtacaacgataatactaaacaccgatatggcacttgctcgttgccgtctgcattcttttttttttttttatagggacgagatctcgctatgttgcccaggctggtctcgaactcctggctcaagcgatcctctcgcctcggcctcccaaggtgctgggattacaggcatgagccaccgctccgggccccgtctgtgttctaaacacttgacatgcattagctcatcttatactcgaaacaaaccccatttcgaggtgggctctattattatactcatcctacagatgaggaaactgaggcacagagatgttaagtggattgccctagctcacataactgaatacatggtggaggtggaactggtatttgaatttagggctaccaggtctgctgtgctgtattaatagcagacgctgtgaaatcaggcagcactgacggttacccacccgtgtgatcttggtagcataaacccttggtgcctcagtttctttgtctgtaagatgggaacagtaataggacaccttctaaaaaataggacaccccacctgcctcatgtaattaaatgagtaaaaatggtcagaacagcagctggcacttcgtaagtatgtactcagcactagaatgtgtttattattgccatgtttcacctcactgagatattgtgaggtgtttctatgtgaaaagactggcacataataagtacttcatcaatactaacctctggttaaggggcttggatatataggatgcttgttcattctgtaaatatgtattgagggcctgctgtatgccaggctcagttcagggccctggggatacagcagtgtggaaatcagacaaagcccatgctctcatagagcttacatgatagtggggaagacagaaaataaacagtaaaatattagaaaacaataatacaaagtagtataatagataatataacatgagaatgtatgatatacagagaatggggaaagtat

SEQ ID NO: 1564054 - DNA, 4001 bp, Homo sapiens
tgcctgcatgatccacacggatctgacgaccatccagagactaagtgtgggagacacaaggatgatgggttggcagtcagtcagggcaatggtgagggaagagcaggcaagggtaagtgggcaaaagaggccaaaaattcctgctgggcaccaggttctgggtgccatgttccagaataagctcctttaccccagaatggcttcatcaggagctatagaatcccacacaaaatgacctgaatgcaccatgttccccttgctactacttacatcttgactgaactcaggctgagttctcctccccactcctctaagctgcccgactatcagggctagacagacacctctcttggtttgaggcttcagagtccatgtcagaagactcacgaggtcctctccgggccaggcccacaggtctgcagactctactacctaagcccaaggcaggtcaaccatccacaggtggcttctcggcctcatgcaggaccagtcgtcgcctcccaggcggccaggctctgtctgccgctgccctccaccccctagaacaaaaggcagtcatgctcctgtgagtgggcactgcggggcttggtggccacgctgccccgagcagacacagagggaaaaacaaaaagaatgaaggaagccgcagatggggacaaggtccctctgcagataggaggccccacctctccgttcatggctctcatggcaactgaagcatgctctgggttggtgaaggtgatgaaaccaaaacccctggaccgctgagtctcccggtccttgacaacgaccactgtgagagggagagaagatggagcaatgtggaccagtcagtaccccaaaggttaagtagcaaagggtggccggaaaaggagatggcataggtagggaaaacggagcgctcccactaatcccaaagacgcttcccctcatccttagtctacaccataggcttaggaagaaaaagaatttggaggcgtgggtcctaacttttcagttaatactccttgaaatgcaaggatcccagactttctctcaccaacccccattgtgagtatggcccgtctcaccctcagagataggtccgaaactgctgaagtggtcttccagtgcctgctcgtcggtgttaaagttgagccctcccacgaagagctttccttcttcagaggacatggcagttcaagtcctgtgggaagaacatgaagaatggtggcaggaaggagaaagaaaatggagatgtgagaaaatagcgagacggaaagcagagaaaaagcacagaaaatagacaagaaagaggaacaaaatatgggtaactacagaaaagctgagaaaggcggccaataaggtggtaatctgaggagctggctcagcgcagccaccattagggggccacattgcgcatgctctcacattcatagccgccacgcccgtcattttgtgccactgcgcaagcccagaacatccctgcgttcccttaacgccggcagaacaagatggcggcggccacgtgggataaggaaagtaagtgtcggctgtcgcgtggtcactgccaccaccgacgccaccagtccctcccggtaggcctcacactcagatacagcgcgccggcctcccaccaaccgaaatgtttcacctccaagcacgggacccgcccgtcccagagaaagccaagcctacgtgtcagtggccattactctccccactcgctattccccggtcacggccggcgcggcgcgtgtgtggcgaggagccgccgtttcgcaggacatatgcaacttacctggaaattaaaacgtaaaaaacccggacgaacagcgagctcggaggagcacaaaaaacagggacggggctgcgccggaagacgattgataaagagtacgtagcgagaacgtcccggaacgttccccttgcgcgtcccggcgtgcgtgctgattggctgaggccagcaggagcggagtggtggggagaggaagggacagcaaagcgaagggagcagtgttctccgcgaaatggggtgtttccggaaatggggtgtttccggaaatggggtcgacttttgaacagctggtgcaccctaaacgtcagcatcccccccacaaccggctgagctgcctttatcccttccacaaaggaaccttctcaatctcatactacttgctgtccctgacatcatcctcccgtccttgccatcatttcccccgctggatcggatgtcttcctcaccatcgtagtcgtcttcctctaggtccctgccattctctgatgttaacctccttcaccttctagttctttaacctcataccctttaaaggcctgacattttatcccccaccgtcactgatgtcatcacccttcacagtccatgatgtcagacccaacgttttaaggtttgaccctgactcctactctttctcctctgtgctcaacatctagccgcctgtcatgggacccttttccctggcgtcattccatctcatctctgacttcagccctcacccttgtctgactgctggcgtgaagccagccccttaattttctcaccaatagactgcctgagatggcttttacaaaacaggatgctggccgggcgcggtggctcacgcctgtattcccagcactttgggaggccaaagcgggcggttcacgagttcaggagttcgagacctgcatggccaacatggtgaaaccccatctctactaaaaatacaaaaaaaaaaaaaaaaaaaaaaaaagaaaaaaaaaattagctgggtgtggtggcacgtgcctgtagtcccacctactcgggaggctgaggctggaaaatcgcttgaacccgggaggcggaggttgcagtgagccgagaccacgccattgcactccagcctgggtgaaaacaaaacaaaacaaaagaggatgctacgatcttcagaggttgtaaatcccaatccatagagcaatttttgctctcttcgaaagtaactgagcccttgccgggcgcagtggctcatgcctgtaatcccagcactttgggaggccgaagtgggcagatcacaaggtcaggagttcaagactaccctggccaatatggtgaaaccctgtctctactaacaatacaaaaaaaaaaaaaaattagccgggcgtggtggtaggcacctgtagtcccagctactcaggaggctgaggcgggataatcgcttgaacccgggaggtggaggttgcagtgagctgagatcatgccactgcactccagcttgggcgacagagcaagactcagtctcaaaaaaaaaaaaaaagtaactgagcccttgattcacagaagggactttcgcaatacacaatagacttatcccaatcaagtagtgtctgagcccactgttcacaatttagtcttcagtgtcttggccacctttacaataaatggatttgacagatttttcacttctgagcgccacatcaacgaagaataagttagtttgccctcagaggctaaatttcttatccatagaatgaatttgcccaacacagaccaaatttgctaacatacagaatacagtacatccatattcctgttggggtaattcccatatttatcttcctgttattgtcagggattcctcacatagtctaattattaatcccttaggtgttggaaatagcctctccagctctggcatttgtgttattaactttgtaagcagtaaacttagttgaataaagatccataattttgatataatcatttttccccctatgttctgtgcttttttctgagacggagtctcactctgtcgctcaggctggagtgcagtggcatgatctcagctcactgcaacctccgcctcccaggttcaagtgattctcctgctttagtctcctgagtagctgggattacgggcatgtgccactatgcccagctaatttttgtatttttagtagagatgaggtttcaccatgttgttcaggctgttctcaaactcctgacttcatgatccgcctgcctcggcctcccaaagtgctgg

SEQ ID NO: 1564055 - DNA, 4001 bp, Homo sapiens
ccttatctatattatctaccattactgaccccatttattcaaagacacttctccaacaattcattgccctttaccatttagtccatgaacacttactaaatacctgtttacacagaaggcactatgctaggtactgagggaagtcaaaggtgtttaagacatagtccctatcctcaagaagcccacaatctatttagggagaagaagtgtgtgtttatgtgttgtgtgcatgtgccttggcagcggggggaggagagaataataacacatagaagcatatgccaaattagtagaaattcacagaagagaaaattgggagataaaggtggtaaaggaagacttcagaaaggtacttttaagctgacattcaaaggtgtgtgatgcagaaaaggagaacagggaaagagagtacaaagggatagtaatatatactgaaggataataagaagtagtaatttatcaaacagttaagtgacacagtgcaagtgatggtttagacagatgaatgtggttataatatgccatagagattcaaagggaagaaacaagaagaactagttatgaaactactgaagtaaaaggtgatgaaggtctagactgaaatggtaatagtgaaaatggaaagaaagggttagatgagagaggccttttggaggcagaggcaaggaagtcaaagataatcccaaaatttcagtctgtgtaactgagagaacaatggtaccaatgaaggaaagacaaagctccagatggaataaatgatttgggaaagggaaagtcagtattgttttagccacattgagtctagtagcttttacaatagaaacgccagcatgaagtatcaggaatacttcaaatacatgactaggaacattttgtttagggataaattcatatgtactagaaactatttgcttttttaaaagcaagggaattaataacacaaaattccggatagtggtcacctcaggggggaacgaagggagggaagagacacagtagacttctaagggactggcaatgtcctatttcttaagcttgtagtggatgcgaacctttattattctttaagctgtatatatacattatacattatttcgcatggaggagatatcataaaaaaatattaaaggttagtttcaggcaggcaaagtcataaacggttttttaaaagatgcaaggaactgacagtgcaggaaagcatatcagtaagaattttaaatgcactgcactattccagagtgatgattctacttgcagagtgaatctaaaattaatttaagcccgtcaatagttaggaggctcaggccatttaggctcaagcggccatttacctcaggacaagtaaggggaactgagcccagcaatgccttccacctcccctccccccaccccataaatcgaaccgctttggtgctgtccttccacatttagaaacaaagtaccgctcccttactttaagattcgaaagcgctacatggtttcggggcccaagcaagtagtctttaacacacagacgttgcaaataaatgcgcccgccccgagcctttctcaggtggaggtggaggtaggggagaacggcgaggggctggcccgaggtacctacatctccggcgccgggaatttgtcagcctcaaacccttttgcccagctgggtccgggtgaaacgacgaagccgcagcacccggccagctcccggggcccgtgccgggagggcattcccacagcagccggccccggtggcagcccttcctgaacttcgctctgcaggcctgttcagcccgtctcccctcctcccgtctcctttgtcgtgttcccgctcccacgaaaccgcatcctgagaacgtgcaatacccaaaccagaaagcaatggaagccattttcaaaagaaaaggtagaacaaagctccccttgccgcctgctcttcagacaagtccttacctcttcatgtttccacaggcccctacctccaacttgggtaaataggccgcggacctcaagtcccagaactccgcgcggcggacttctaagggtattgtgatggagcatggggctctgggaattgtagtagcacagagctatggcaacagaaagagaaagtagatctcaagtgacaggtatgctgaacattgtccaaatatttattttgaatttctcatttaggttcaaaagaagacccaaaatatccagctcataaaacgagtcacctttgacttcttgattctctcatccattaccactaattcctggctcttctgtaatttcctttgaacttatcaacactgcttttctttcaaggatttatccagcctacctaccgtttccagtcgagcctctgcttcatccttcacgatgtagccagagtcatcagacacgagtctgactatatcacctgtactaatggttctcctctatctgtaacagagacttgagagttttctccactcagaatcagaagtctgtgtatgttcaggcccacatatgttttattgataattatggtgaatcaagaaagaggtatagtatagtggttaaaagcataggctcttagtttccagaaatggaaatgcaaatgtctttaagtgtatgaaaagatgtccaatctcacaaattttaaagtacactgactaccagtactccttaaaactagcaaggtcatcaaaaacacaagaatctgtcacagccaaaaggaaccaaaggagtcatgatgactaaagtaatgcagtatcttggatgggatcctggaaaagaaaaaaagacatgaggtaaaaactaaggaaatgtgaacaaactatgctctttagctaataacaaggttcgttagctgtgacaaatgtatcagagttatgcaagggaaactgagttgtacgtatgtggaactttgtactatgcaacctttctgtatctaaaactgttctagaacttaaagtttatttttaaaagtacattaaactaccatttttcacctaacagattgggaaagatccaaaagtttgataacacacttgttttattgagattgtggggaaacgggcgctctcaatacactagtggtaggaatataaattggtacaacatctattgggggcaaatgaggatactactaaaatcataaatgtacattccctttaaagcagcaattcagttatgaatagaatcctcaatactatatatcctctaacctactatcattccttgcaacattgtttatgaaaacagaaatgaaaatatccaagaacatactatgaaaatgtatcattcaatgaaaaactatgcagcagttaccaagatgacaaagttctctatgaactgctactaaacaatctccaaaatatagttagtgcaatagcaaggtgcagaacgatatgtatactatgcttctatttgcataaaaaggggagctctagtcacttaaaaacatatatatgtgtgtttgcttgtatatgcacaaaatatgtttgggagaacttacagacaaatgatgagtgaatgcctccaggtaggggaactggatggctgagggacaagggcagaaaaaattcttcacgtatctttttgtgccctttgaattttgaacccatgactacattacctagtcaatacttttttaattaaagagaaaccctcttacatctcaagaagccaaagaagaaaagattgtaggtaatggtggggggcggggcacactacttggatttgaatctcacttctcagttgacagtatagcacgacagggttttagaggcaatctggacttgaatttttgctctggtaagttactagaccatgtgggtttcagtaagtttcttaactggtctaggccagttttctcatctgtaaaatgaggatacctcctaagtatagggtgactgtcaagcacatacaaaggtatggttttaaagttattccatgattgagtggtaatctatgagtaaatagtcaaatgttaatcagtagatttagacttatccaaactgctttgtatttccatgctcaagttagag

SEQ ID NO: 1564056 - DNA, 4001 bp, Homo sapiens
aattattctgaactgagagaatgttacgagcataagatataactcactactagatttggttctgcaattacagaatactctttggaacaggatcacaaacaggatgagtggatcccagacaggtatatactgaaaaacaacgaaaactcaaaagctgtcctagaccagacttggacaactacatgttattttatgcactagtaacaggttatcatccatcgtgtagacaatctcacctttccattcatgtctctggctgcatccttagcgtctgctgggctttcaaaggtgacaaaagcaaatcctcttgatttgttggtttcacggtctttcatcaagagtactaaaaagtagttttcagaaaaataaagtgttaccctaggtcaaatgaaataaccaaagtaaatgtgtaaacagaaagctcagaacttcttagaggacaaaaatacattatcatgtcagacgatcaatgcaatcaaattcatcatagcttatattttaattataatagcccagcctgtactgccagacaactcaccttccactattcgtccatatttgccaaatactgcttcaagagctttctcatttgtttccgtattaagcccaccaatgaagagctttcctgggcgatctgcttcaaccatgtttttttttttttgggccggtgagtctgttgaaaaggaatagtattacctcactgcaaaaagttcctcaagtttattggacacttttactttcgcacatttctcatattttccactaaaaccattgttccttaataactaaagaaaacgataacgagctaagcctcagccacagtaggaagcaatttgaactaagtagtttagtaacactgcaatttacataaaactggttaaaagggccaacttaacttttaccactacccttgatcacccttagctgttcttaagcaacagctgcttaacatttgaaaaagcaacttttagttccagtcctcttgcctttgaaagattcaattactcatcacacccttcctaacgatggttttaaaagactcccaaggtcacaggctagacacaggaccttaacaccaagccctcttccaacgactcctcttttcctcattaggattccctactaaatccaaggagaaatgtgaagtttaagccaagttatgccgcccctcttcttcaccggcccccgccctaccgaaaattctactatccggccaaaaagataaaaacaaatcgtcaacatcgtttgctattaagtaacggaacgcggacgcacacactaacactcgacactccgtgactgcagcggaacctaattaaaactcgtcattaaaaaccgcgtgtaaaagacaaaatggcgacacttggattcaacccagaaccaccgacactggtcaggggactaacttttaccaccaacattggctgggaacattcagagggcttcttctccggggccgccaatgaatacgaagcccgcagcccgcatggaagtccacatgcccatcattagcgccagcgccataccaatgcaggtatcgccgtggtgcggtcgctcctcgccccgctccagcctacaaagccccgacctccgctaccaactcccgcagatggcagccaaactttctcgagaagcatacaaccaaacgggccccctcatttgttttccctcgaccccctcagctttatttaaataggtcggaacctttgggttcttaaaatggcgcccgccacccccatctccagggagatataatccccagtcctaacacggggagagtgtcacgaaaaacggactgaggaaaggagacacgtaccggaggggtgacaatgggttcaagctccaacgagctcggcgataggggcttcctagcagctcagcaccagtggcggctgccgggtgcgaggaccgaaccgcgaagccgctagcactactgcgcaacgagggcgaacaaaggagacagcaaactttatactgcccgggaacgaggctgaaggacccggatggaaacggagcttagaatttgaaacgcaaagggaggggggaagtagttcccagtctccccattggctggctcctctgtcattcacccttctctcctccctttttcccgggccctcggtgttgggtcgacagacctttctaaccgttttctctacccccacccgttctttacaaacgcgctttttttgctttacgctaaaatggtgcacaggcttcctttaataaagaactgaagtttattgagcgtcctagtgggccgggcacggtgcaaaactttacttttacttttccattaactcttctaattgtcaaaatgtgatgagggtagatactcctactataccaattttgcagaaacggaaaacaaagaagttttggcaatataatatattttcaaaaattgtctttaacaagtgtttttagtgagtgtgggaatttctgataaatacatgtaaatttcagatgagtaaaaaacgtacaaaacagcatgcagatagtacattcatatagaacaattactgagcaccttgtaaatggtgggctctgggctaggccaggaaaatacaactccagggaaaagacaagagtcaggcctgtgggtaaggatgccggatttaataaatgaaaataccaggccgggtgcagtggctcacgcctgtaatcccagcactttgggaggccaaggtcggtggatcacgaagtcaggagatggagaccatcctggctaacacggtgaaaccccgtctctttttaaaaatacaaaaaattacccaggcgtggtggcacgcgcctgtagtcccagctactcgggaggctgaggcaggagaatccgggaggcggaggttgcagtgagccaagactgcgccaccgcactccagcctgggcaggcgacagagcgagactccgtctcaaaataaaaaagaaaatgcgggacgctaatttattctgcgaagctgttaaaaaattttaaataaaaatatgggacgcggccggggcgcggtggctcatgcctgtaatcctagcactttgggaggccgaggcgggcagattgcctgagctcaggggtttgagaccagcctgggcaacatggtgaaaccccgtctctactaaaataaaaataaaaaataaaaaaattagccgggcgtggcggcgtgtgcctgtagtcccagctactcgggaggctgaggcaggagaattgcttgaacccaggaggcggcggttgcagtgagccaagatcataccactgcactccagcctggcaacagagcgagacttcgtctaaaaaaaaaaaaagggacgcccagttaagtttaaatttcagataacgaatactttttttagtatagtatgtcccaaatctcatattttaaaaattcgctgtttatcggaaattcaaatttaactgagcattctatatttcatctgcccatcctacttgttgaggggggaaaccaaaaaattttttaatttttttcttaaagaaattgaatacaattaacaaaagaatggcatgttgtgattaatgccagggaggaaataaactagttgctttgatggacaatattagggagaacaaatttgattaaaacatcagggaaggtctatgtgaagaggtgactttggagatcagagctgaaggaagaaaagaaactagctatgggaacagctgagggaaaaaccttcaggaaaagaagagaatagtaaacacaaagtagagaggaagagcttggcatatatcaagggacagaaagagggccaggtgacaagaatatgaggggcatgaaatgagggagccaagattggcaggacctttgagcccattaaatgactgtagggggtaagtgtgggaaaaaggacactaatagggctgtgggagcagaccagaaagagaggatggtggcttgaatcagggtggcggcagtggacacggggaggaaagaacaattgttagatgaatatgataggtatcgtgtttaatggtgctatggtctaaatgt

SEQ ID NO: 1564057 - DNA, 4001 bp, Homo sapiens
gcagggatgccattcagcctagagtgaaaataagtggtttttgtgatgccacaaaatgtattacagaaacaaagtactctgtcgactcaggaggcaggaaatgaaaggacacttactgtgagaacacacagatgatgtccccttcagtcagttcataaggaagccctcctagaagagaaaaccacatttcagttccaccaacatttaccaagtgtttactacataccacgcactaggccaggcactaggggtggaaacagtaagcaacaggccctgcccttaaagaaatcaagtctgggctgggcaccgtggctcacgcctgtaatcccaacactttgggaggctgaggagggtggatcacctgaggtcaggtgttcgagaccagcctgtccaacatggcgaaaccccggctctactaaaaatacaaaaaaaaatcagccaggtgaggtggcgggcacctgtaatcccagctactcaggaggctgaagcaggagactcgcttgaacccaggaggcagaggttgtagtgcgccgagatcgtgccattgcactccagcctgggcgacaagagtgaaactccagctcaaaaaaaagaaagaaagaaagaaattaagtctgactcaatgacagaagtacatgtaaggtgccagtagtacagaaaaaggagtaattaattttgagtggaagtcggggtcaccactaacgaaactaatctgatcactcagtcctcctgccacccaaaatcctatggacaaagcagatagtttccatcacaaacctctgcttccacaaacatgttgaattcatctgctcattacccacaaatttacagctatgatacaaaatcagtctacatatgtcatgattaaccccacctacacatagacaaaggttataaagacactgttaagcatttcctagggaataatttcccctccaaatatttatttcctcatttgtaagatggggatattagcacgtaactcgcaagattattataagagttaaataaaacgatgtatataaagtgcttagcacaatgtttggtacaataacctctttgaagcatcaaacttgtacaattactgattgtgatataaagtgaatacagtaatggtaacgtggccatggactagaaagcaggagctagaggagcaaagtgaattctggaagggaaggggaatgggggagggtggtggtagcaatatggagctgtggctaagaccaagagttctagaatgctatagttctgcctgttgcgcttactagctatgtgaccttaaggaagtcccttaacttctctgcaccccaatttcctcagcagtataatgggtcagagggtgagagagaaataacaacagtccctgaaccttagcacagcaaatggcaaacagtaactctcatgagcactgatttggcagggaaggaaaactaaaaatggggcagaaaagagatgtaacacggattcccgggcagacagcagatggatatgaaggtgggcgatgaatgtaagcaggagtgaagggtgaaaatgccgaaatagtcggaaaccgagcaggagaatctggagagcactgaggaagaaagatgtggacctcacccaggaagatccaggcgctgtccttgtactcggagtgccaggacaccttatcggccaccccaagctggacctctcgttcattcagctcgttgatcagcttcaccttagttaaagggcttcacggtggcggggggggtggggagggtaggcagaaaagcagacaagtaagtgcgaaccggccggagctgaggaagagcaaaactaggggacgagctgttccagtccccgcgccgctcccgcccctcggccccgcagacgctctaccacaccagtcccggtggaccacccccagtggcccgctgctccttcctcaaaaggaagctgacgccttacttcatctcctcgggttcgcgctcagcactcaggaatcagcgcccgggaaaggcagcgcagcgcatgcgcggccccggcgccagtggccagtcgattcggtgacctcgcgccggaagagccggggcgtaccggggcgtggcgcctgcgcactagcagccttccgcgctgcgtgcggttacctcttggagaggtggtttttctctagtttttcgctttttcttctctgtgaaatggggtaaaggcacaagcctgggctgttgcaggacccccacctcttgaacgatatctgaaactggttagattagctataaatatttgctgagtgaacggaacaagcagcctgatgtggcgactttagtctcagccctcgctcccagtccagagtcccacttggaccttcgctcctagtcagttgctaaagcacagacccatcaaagcatccctgtcatggcagaaaagtgaagaagataggtgaaaaggtaaatcttctgttgtccttatcccaatacataggcaacagaccagtgtgcttctataggctgaatcgaatacctacacatttgcatgagaactgctgcacttactcttttccataggctctctcctagttgagcaggaggcagaaattaatattgttaaattaatagctaacaattgagcagatgatgtactatacgatgctagagtatgtactaagcaatttacatgtattgtctctccaccctcacaacaacccaataaagcagagaaaattacaatccctagccgggcacagcagctcagcctgtaatcccagcactttgggaagctgaggtaggaggattgcttgagctcaggagttcgagaccatcctgggcaacatagcaagaccctgtctctaaaataaagggaaaaaaaggggggccaagtgtggtggctcatgcctgtcatcccaacactttgggaggctaagacgggtggatcacctgaagtcgggagttcaagaccagcctggccaagatggtgaaactctgtctctactaaaaatacaaaaattagccaggcatggtgtcacacgcctgtaatctcagctactcagggggctgaggcaggagaatcacttgaacctgggaggcagagattgcagtgagctgagatcgcaccactgcactctagcctgggcagcagagtgagactcctttttatttaaaaaaaaaaagaaagaaaagaaaaaaaatttccaccctcattttgtagaggaagaaatgaggctcaaaggaataaattaacttgaaaggtactctacctgcacccgtcaggtcaggttgatttaatcagtccttactgaacatctagatttgtcctgtacagctaaggtctgtagacaggagtatcagggtgggtcctctgccttcaaggagctaatattataattaaggggacaagatatatttgcttgatagatttcaaccagaaatatctagaaaccagtggaagagattattaatgtataatatgtgatttaacccatattgacagtttgaatccattttgcatgtgtccacatcaatacctgctcttggactatgatgttctaaaagtgaaagtccagagctgtgcggcctaactcagagcaccagatattaggtccttcataaaagcattttgatgatgataacaactgtaccctcaagtggcccaccatgtaaccaatgtcctgccaagaaggagaacagaggctgcccaccaatgacagttcctcctcattcattctgtgtctgttcccccctccccattccaacccagctattcattaactttgtaaaattatcttggcaatgaaagctaaacagtgacagattgcacatggggtttatctgctcctaggaatctcaggttgcttagttgtgggttgaagtagccattgcagagtggtaaactagcatgcagcattatcttgctgacttcttcaaatggctgtgaaatgagagagttaagactatacctggggattagtcatcagtgttccgagagaagctggagcaaaagagtagaataagaccaatttagattgagaacatgagaaggct

SEQ ID NO: 1564058 - DNA, 4001 bp, Homo sapiens
gcccccactgtaggcatcaggcgagcggcctccactgttggcatcaagggagcggcctcggtactcctcgtagcggcctcctcctccgtagcggtggctccagctggaactgtcgtggcccccgctgtaggcattgggcgagcggcctccactgttggcatcgagggagcggcctcggtactcctcgtagcagcctcctcctccgtagcggttgctctggctggaactgtcgtggcccccactgtaggcgtcggcagagcagcccccactgtgggcgtcatgcgagcggcctcggtactcatagcggccttctcctccatagcggtggctctggccgtaactgttgctggaactgctgtggcccccactgtgggtgtcgggtgaacggcctccgctgttggcatccagagagtggcctcggttctcctcatagtggcctcctactccgtagcggtcgctccagctggaattgtcgtggcccccactgtaggcctcgggcgagcagcctccactgttggcatccagcgagcggccttggtactcctcataacggcctcctcctccgcagcagtcgctccagctggaactgtcatggcccccactgtaggcgtcgtcggaccggcccctgctgtgggcatcagtggagcggcccccgctgcgggcctcgtgtgagcggcctcggtactcctcatagcggccttctcctccatagtggtggctctggccgtaactgttgctggaactgttgcggcccccgctgtgggcgtcgggcgagcggcctctgtactcctcgtagcagccttcttctccgtagcggtcactccggctgtaaccgttactggaactgctgcggcccccactataggctttgggcgagtggtccctgctgtaggcgtctggcaagacgactggcaaggcctcggacgagcggccttcactgcaggcatcgggcgagttgccctggtactcctcgtagcggcatcctcctccataagatggcggtgtcccccacacaggggcagcgccgcatgggcctccgtagctcttgaggggctctcggtaggagcctttgctgggatgatctgtgtactcatggtcgcgacccctgtagccattttggttgccgtcgcctctcaagggacggtagtccgggacactggagtggccataatagcggcggctgtagtctctgagcgcagggacaaaatccccagggtcgcggcacgggggcagtggctcccggacccgcgggcctgagtagccatcttgcccccacacggccggggccttcccaggcattccactgccgccaatgcgagccaggcttgaccggggcacagccctcttgtggggtgggccggcccagcgccgtggctgcaagcctgagtagccatcttgccccgacacagtcggtgccttcccgcgcattccacagccaacgctgtgagccaggctcgacggcgtggccctcttgtggggtgggctggcccagtgccgcggtggcggcccgcgcttcctgggcatcggggccctgtagggccacaggtcgaaataccccgcgtagccgcggccgtcatcaggcctgccctgagaggggggtcgctgtgggctgctgccacccccacgggttctgtgtgagaaccttgagcgactgccgctgccgggggttggcgggacccatcggctgctcttgaatgccggtttgatggtctgggccaccatgatggccttaccatccaggtacttgccgttcatatctctggcggcagccttggcgtctgcagggctttcgaaggtgacgaacgcgaagcccctcgacttgttggtttttcggtctttcatcaggaacaccttgatgatgtggccatacttgccaaactcggctttgagggctttctcgtcggttttgaggttgaggcccccaatgaaaagcttctctgggcgatccgcttccatcatgtctccctgccgaatggtgggtcagaggaagtgggaagtgatgacgcggcagttcagtcgcggccttcgagcgctctcgtggagggcggctcctaccggttgggggggtggatgtctcaagaaggaaaagagtaccttacgtcatagttcttgggaacaccaacgtctatgatacaggtagaggaaatcctaggaatagaaaataagaagtagccagagaggtaggaagagatcccagaagtgtagtcttctaagccagaggaaaataatctttccagacatatggaatggttattgatatggtggttgttggttacattggtggatgtgagagtggatagaaaccaaattgcagtgggttaagaagtccatggtaagtaagaaatttagttgtgttgtgggtttatgtgagtttggctgtaaaagaagaggcagatggagggggttgtgggatcgtgggaggtatttttgtgtttgcttttaaagatcagagataattcttcgttggtattttaaaagacaaatagcatatttggaatttaggtatactgaagcatatcaaatacatctggttaataaacatgcgttctatgaggtttttttctttttttgagacagagtctcgctctgtcactcaggctggagtgcagtggcgtgatctcagctccctgcaacctccgcctcctgggttcaagcgattctcctgcctcagcctcctgagaagctgggattacaggggcccaccatcacatccggctaatttttgtgtttttagtagacacaggatttcgccatgttggccaggctggtctccaactcctgagctcaaaagatctgcctgctttggcctcccaaagtgctggtattacagatgtgagccaccgcgcccagccgtatgagtgtatttctaaatgatgttttttgccttcaaggtattgatggataatattgtatattttaaagtattttaagtagttgcttagattctaagtgattcagcaagtgtgaaaatagttcttttaattaccatagatataggtatatgtttaatactcactattttcttttcagatctttccagaaatcgttttacagaaattccttctgatgtctggttatttgcaccccttgaaacattaaatttatatcataattgcatcaaaaccattcctgaagccattaaaaatctgcagatgttaacataccttaacattaggtaaggaaacaatttaaaaataaattttggtttttattgttgttctaatccttttttagtcgcaaaggaatatgtttgatttggctgtgtagcttaaatttatctcaacagtatcttatttgtgttttttatatgttcacattattttgtaggcttttgtcttgttcttgagagcagagcttagcaaactttaacacacaggaattacccggggatctgttagaatgcagattctaatttcttaggtctgttatggggcctgcatttctaacaggccccttggcaatgctcatgcctacctgctggtccttagacctcagtttgagtagcaaggctttagaccataaatatttcctgaaattatagcaccacgatacagattttatatgcatccttagatatgtgaaacaaacagtgcttgagttattttttctcacttttgtgacttcttgcttctacttcaaggatggttagagtggggtgagaatgttgaaaggtttggaagtggatgacagttcatgtttatacttagtaagtgcttaccatgtgccaggcagtcagtgttccaaacgctttacccatattaccttatctagttttcatgacagcattttgagataggtaccattgttatccctgcattacagatgaggaaattgggttaagctatttgtccaaattcatagatatattcagcaagtggtagagccaagattaaaatcaaagcagtctggctatagagctctcattcatacatagcttttaccctatatatgtaaaagaatgaacactcagtaagtataagaaaaaaactttccctgccaaa

SEQ ID NO: 1564059 - DNA, 4001 bp, Homo sapiens
cgagccccagggtgcccaggggagtgggggagtggaaggcctcccaccaccccagctccccaggcatcccccacctgcacgtgctgcagaatcctccgggcgcaccagtcccccagctctgcgtatttgcccgccagctcctcatctgcctccccgagctgctccaccaggttcagtagcatcatgggcaccgccatgggctccgcagccggggccccctggagctggggccggcccagtcccgacgcgtcctcctgcacccagtggacgatctgatccatcatctccaccgcttccgtctgggggtgcaggaggcaaggggaggcccaggctgaggctacatcctgtgccatccccctggacacggccctggggtgggagagccaattcctctcctgaacccagagacaccttcatccagggcctacttggggcctggcacccagcgtccagtaggggccagtcagatccgccccactctgctcccagtctgggggtgcagccccttccaggctgtggggtcagggtctggcagcacagggagcccagggaggagggaagggccttttcccagttgggggcagggcgtggatagggccctctccgtctgcgcccctgtgggggtaggggagcgttcagaggtgaaggggacttggcccacagatgggtccatgggaggggacttgcgtagtgagtgggaatgcatcaggtggccatggcagggtcgcagggtggggtcttcaggggcaccctcctctcacacacctggtaccgcacttcccctgtggctctccacagctcgttcatggccatggtgtagaaacactcactgaagatggttcgctgcaccttgaccgggcggccgtcccgagtcagcacaaaggcacacttcttgccaggaggtgccacccgggcataccgcagcaagaactcaccacctggaggttggggggttggcatgccaggggtaaggccaggacgccccgcacacaccacccttgagcctccccaagtccttcgctgcttctagatccctctaggaactccgcacatgtgccctgttgagtaaacatggacggagtcactgggagatgggcaggaagggggcacctacctgcttttgctgcgtccagaagctgagcatggcggaagcgctcgaaagtgcggtacaggcgacaatacatccatacctgcggggtacgggagggaaagtggcttaagtggccggctggggtgaggtggggagacctttgaggcgatgggccgtgtgcctgagcttccaggctgggaacaccatacctgcctcccctgcagccacacatacttgaggtcatcatacacccgcccctcgcggccaaggcacgtgaagaagcccctgtgggaaggcagggttagcaaagtctggaacgggccttgccagcccctcctgcccctctggggccagcaaatctgtgaggtgcctgagagtgagaaggggcctcaggaagggcaaaaaccctgctgaggactccagaagcacgccgagtacccgtgctcctggtcgtgggagtgctccatccagaaagccaccacgcggtccagctcctgccccacgcgctccttccaggcctgcagagtctctcgctctttctccatgtcctaggggaaatggggcttgaaggcgcagcccccacatgggacctaggcccccccagcctcgggaaccagccctcagggatctccccacctctgcacggggcttcagacgtcaccatccccgggaccctccaagacagcactccccccaagcaccccaccactggcctgtcgcgctgggagacccttgctcatccctcctgctcctctaggaagccagacagagttggtcgcggtcccgtgactgtcactcagctgacacagccgcgcccggctcaccctccccctcctcttcagggttccgctgggcctggggcggggctttgagcccgacccccgcacttgttcctgccgcgaccctccactcgaatgggccagtccctccagggcccctgctgggagctctggtctcaagatcctgcttggtgggaaaagctgggatggccggagggtctgggatgagggggaacggggctgccacccaccccgccctacaccaggggccccggcagggcggctgagggccttggccctaccaagcctgtggggcaggggtgcagcaggacagggaacagctagtgggcctgaatgcagaggtccctctgacctgtcaccacacagggtagacaggaggcaagttctgtttttgttgttgttgttgttgtttgtttctttgttttttgagacagtgtcctgtcgcccaggcagctcactgcagccttgacctgccaggctcaagcgatcctcccacctcagcctcctgagtaggtgggaccacaggtgtgggccaccatgcctggctaatttttgtatttttagtggagacagggttttgcaatgttgcccaggctggtctcgaactcctaagctcaagcgatcctcctgcgtcagcctcccaaagtgctgggattacaggcgtgagccaccgcacccagcctagcaagtcctctcttttgaatcagtttgtcaccaactacctcaacagtcagtaatgggcagccattggcgctaattttttttttttttttcccaagatggggtcttgctctgtcgcccaggctggagtgcagtggcatgatcttggctcactataacctccgcttcccgggtttaagcaattctcctgcctcggcctctggagtagctgggattacaggtgcctgccaccatgcctagctaattttttttttttttttttttttttttttagtagacggtttttcaccatgttggccaggctggtctcaaattcttgacctcgtgatccacctgcctcggcctcccaaagtgttggtattacaggtgtgagccaccgcgctcggccttggcactgacttctttacacaagtgacacagctctaaggccagacagtaactgcaggtaacagcccacaccccccttctctgggcctgttttccagctgcccagatctgtctgtagctctatgactgacccgatgatgctacaaggcagctgggctgaggtggttcctaccttccaggccaacagtgcacaaaatgggttccagcctctgggcgtgggtactgcactgctggtctttgatgccacagtggctgtctcagtccctgctgcaggctgacccacccaaccccaaacagttcccctttggggtgcttggtaatgaggctgatgccctggcagctggggaggcatcctctgtgtgctcccacccaccctcggcctcggctcatgctcaggggatgagctttgtgcccagccgggctgtatctacctgccctgctcacaggcctgtcatgttcacattcatgtccagcctccctcctgcctccccagactgagtggtgccctcagacggaaacgcggtattttcagataaacaccagaggcatgactgatgtggcccttgccttgtggagtgtgatgcagccgcggtgagacaagtgagctgaaggaatgcggagggtgggtagccccacaggtgccagctacagaagtggggtaggaagaagccttgtaccacccccaccaggcgaagcgcccacaacgccatttgccaaaggtatggcaaatccgcaaggcccctcggttctggggccagccccatgtggcccctggcctccaccagccccagccatgactcctaccgctctgctctgaaggacactttcccacccctctccttgggcctctgcgaggctaggctccaaggcaggtcacagttggtgcggtgggtaagacagagccatggctcctggtgtcaagccctggccagtctgcttccccccacccccacatgacacagcagaccccacaggacagaggcttcccagaagaggtcgcattcgacagggccttgcacacacacccatgccacaggtggaga

SEQ ID NO: 1564060 - DNA, 4001 bp, Homo sapiens
cttcccaattcctaaagaggcatcaaccaacatattcagatttactatgcccacctcctcttatccgatgcattactgacaacaaaataagccttaataggtacccagctgtcacttacttgctgcatagcctcagtcaattattcctctttcagctgggaagcagctacagcactgaataaatgtattatgctcgggactattctgagggcctcatgtaatagccacggtttgtgttttaagacactgactttctctttacctgatccagctcaactactcatcagcaatggcagaactgtctacatatcaaggacttctttagggataaacagccatgctaagttctgtgaatactagttacagtttcagaaatcccaaattcaaaagggtgaaagattacaaagtgtctaaagttatgctcacaaacatatagcagtaaaaacactccagcagtataaaacgcagtcttaagcaatttttttaaaaatacgtatgaacacaatgacattgcaagtgaaccataaaaccctcagttctcctttgaaactagattttaaaataccactcgccactctaaatattccattggtgttaataacattcatactattgcttttaggaaaagcttcatttcacgttttgaacctgatattaacagtcttatcaccatgaagtgctggtgacatgaaatgacagacaaaggcttatcaagtagtctttctccaagctccaaggaaagcacaaaacaaaaacagcgtctggtatgtatcatcccctagtacttttccaagtatagaacagccaaaaggtggtagctatgacatcccttacctttcaattctatttcaagtccaagtaatgatagatgggaaactacagctgtttcccatggtggacttctgaagtccacctctaatctcaaatgggaaatttggttttgacttgacaaacgtcctcttgcagtcccgtgtccctgttctgcaacttgtcattaaggttttcgatttaatattaatatttagaaatatgttatgggcaattacatatagtagatacttatatattacaactacatagagaggacaacattcagccctgggcctcgaaccctacggacacacacacccttcaagttgaaatcccagcaaggcaccctgagaacccactcaggagagggaggggcaggagcagcgagcagaggttaaaccaggcagcagccaaaacaaacaccacttccagaacaggacaaactttgggtctgggcggctgcagaaccccagaaatggccgggggaggggagagagtgtcagactgtctcagggaaggaagatggggagagcgcacccagcactgggcgaggagctgagctgcgaaggaggctggtgtcccccggggacaagggcgtcgccgccatccccggctgcagagtcctctctctcagaactggccgaggcctccgggtccctgggggcagccctgtcgccccactcgcaacctccgcccccgcacacactgccccacagacccgcagggacaggaggcggagggacccacctggtgcagcgtctcggcgggcagctgcgatgcccgaaacaggtcagccacggggccggcggccgcagtggccgtgccgggggcgactctggcggcctcggggggcccagacccggggcccccgcccgcggcgccggcacagcgcgcgaagagctcggagtagcactgctgctcgccctcgctcagcagcagcggcggcggcccggagccacagcccccgcccgccgctgccgctgccgctgccgccgccgccgccgccgctgccgcctccatggggccagcaagggggcgcggcggagccctgtccctagctggggtgctgctgcgtccgccacagccaccgcctcctcggcctcagctgccgccgccgccgccgccgccaccaccgccgccgccaccaccacccccacgccccgcagctgccgcgcggccgcttcctcccggcgcgcgccggccccacccccgggcttgaatgttgtgcctcagctgcgcggcacatggagacaggcgcggcgcggcccaatcacagcctgagatgtcaccccggccccgcccccgcctcccgcttgccccgcccagcgccaggtaactaacccagcgcgccgcacgccctccgcccgtcacaggctccggtgcccaggaaggcgggccccgtgcctttccaagcctaccctgcaagggagcggagcctttggccatccgccctggttgggaagggggcatctagacccaactggagagaagctcttttcggggagcggggaaggttgtgttgttttcttgctagaaggctggggcaggtgtggtgcccacaccacgccatgccctttccagaaagggacaaggcatgggaaattaggtttcctttcttccatagcagtactgcttatgtcctaaagagccggaagacgcagacgtctgtacaaacagggtcccactgaccccagagtgttcagggtggtattggagttaggccccctcgtcagacatggctcaaaccaggagttgagactttataaggaataacatcggttactcgtaaatactagagtagtaagagtacaaaaagacccattttgcagatcatttcgtccaaaccctgcttttacagatgaggaaactgccatgttcaccttcattcctccaaaaccagttgaatatctcgtatgtagcagatttatatgctagggcctgaaaatacaaacctcagtaacagaggatcctcactctccaaaggaagcacttattttagtagtaaaacaggcattttttttagtacaaaacttgttcaagctcacaccaaaaatcaatgcgaaaccccacatttttccaccccggtccatgtcctcctctctctctccattcctccctatcctaaagcatacacactatatttttcaaatgtgcttgcttccccctggctagtactctaaccactttttttttttttttttttttttgagaaggagtttcgctcttgttgcccaggctgtagttcaatggcacagtcttggctcactgcaacctccacctcccgggttcgagcgattatcctgcctcagcctcccgagtagctggaattacaggcgcctgccaccactcctggctaatttttgtatttttagtagagacggggtttcaccatgtttgtcaggctggtctcgaactcctgacctcaggtgatccaccccacccccacccccccacctcggcctcccaaagtgctgggattacaggcttgagccaccacgcctggccctctagccgcttttaaaagaaagtccaggccgggcgcggtgggtcatgcctgtaatcccagcactttgggaggccaaggcaggcagatcacttgagtcctggagttcgagaccagcctggccaacgtggtgaaatcccatctctactaaaaatacaaaaactagctgggccatggtggtgagtgcctgcagtcccagctacttgggaggctgaggcaggagaatcacttgaacccaagagacagaggttgcagtgagccaagatcacaccactgcactccagcctgggcaacagagcaagactctgtctcaaagagagagagagaaagagagaccagaaaagaagccactggaaaaaaagtctgtcccaccattgcactggaagttccagcatcaggcccacatatctgcatctcttttccaaaaattctctttttaaatgtcatttttcctgggaagacctgcagaaatatatgcatgaagcctcactgggaaacaataacccaaaagaaaacatcagtctagggttaagcactaataaaaaatatattttactacaaagaaaactacaaaacattgatttaaaaaattgaagaggacacaaaaacatggaaaggcatcccatgctcatggattggaagaattaatattattaaaatgaccatactacccaaagaaatctacaga

SEQ ID NO: 1564061 - DNA, 4001 bp, Homo sapiens
atatcatgattgccttttcacgcaaatatcaatgacataatcctaacaggcttgcagctctctcgctggtgtaataaaacaatgacccaattattttcaagggctgaggcagtagatgcaatgactgggtatgttgtgcagggcgctgtgtgtgatggacggggcacagtagggcagcaaactgtgtgctgaggatcggaaacctgcctcccgagccaaaactcctgccattcatctggtcagaataaaaataaagccattcagtatgaaagttcccacttgttctcacgacggaggccagttgggaaaatgtggtgcagcactgactgaagcaaattctgtttaaaaaaccagccggtttgtgggtatttgtttatttataactgccccaccaccacctccccacaccctgcctcattctgcaaaggatttgagatgggattggaacactgaaagtttgtttaagtcctaaacaggtccagctactttttagaccgatgacaaaatgaaaccttctggatcaagccccttgctctgtggaacactgctttggtttacccagccagagctagtccttcttgtaccctgtggtgagaggcacctcttgcaccagaatacccttgtgcccagtgctatgcttgaccagggaaatacacatgagcccataagcctgaagcctgaaaatattaaggaatatggattcacttactccctcactcatttgctcattcaacgaatattccttggttagctattccagaacaagctctcttccaggcacaggggaagcaaaaatgaataagatccagtctctgcacttgagaagctcctcgtctagtaggaaggacagacaagtaaacaaacccctgttctgcaatgtggccagtgctgtagtagaatcgtgcctgggggtggcgtgggaggtgtagggtaacatgaggtgggggctgcaggtggcatagatgatttagtttgtggacttggactcagactgccttgagttcaacttttggttctgtctcttgctagctgtgtgaccttgggcacttttcttaacatcccagagcctcaattccttcatctgttaaatggagctaataatagagttgacgtcattgggttatgatgaggattaaatgagataatctgtgtagaacacttagaacagttcctggcacatagtaaatacccaataaaaacttagctttttatgctttttatttcttttgtttaatttcataagactgtgtctggcgatgagactccaaggactggtttctaaaacagaactgttttcaacaaactcttcccttttagcctgattttttttcctatggaatgacacagttctgccataatttttccctcagcaaccatatgtctggcaagaacctcaggaagaaaatattttccagatggttttgcttatgtcagcctactatgtgccaagcaccactctagaggagagggacacattgctgagtgacacagacaaggtccctgtcctcttggagcttacattccagtgggagagacataccataaatagacaaatataaatagacataattacccagagcagtaaatggggttaaggaagcattgctaataaaagaaatgtaagagaggaacaggaggcatctaactgtgggtggtcagagaaggctcttctcaggaggtaacgttaagctgagactgaaaggttaggaaggagccttccatgccaaaagcaagaggaagggcagtccaggcaggagcacgaacaaaggccctggggcgagaaaagaccgagaatgttgcagaaattgaaagaccagtgtggctgagacacagagccctaggagggaggtaaagccggcaggattagtacatgcattttgaagctgaggaaatggaaagcccagagagatgaatggacttacccacaatgccttgcacaaggtaggcgctccatatgttgtagaattcacagtcagtagggcggggctgaggccctttgccttccaaatcggactgagatttcccaccacaactaggaatcagctacccagggagactgaaacatacagtcgtttttgttggtgagtcataggcaatgcacattagagtgtggggtcgagtggccccagctgctgcctgtgtgtgtaaagggcgggggtgggctcaggccgcggctgaagctttttagcatgtttatgatgagctgaaagaactcactgcttaatttaaaatacggctcacacatacacatacaattcagcagctggaggagctgccaggaaatgagaataagtgtagaaaattggaggatcaggaatatcaggtattcggctccgtttcccagctcccatgcgctgtctctgatcccataaggtcccatcttccctaacaaactctgggaggtcaagacatggttggagaccgtggcagtttggggaagggaggcctggccagagcccttaatgctagctacactgattgccccacccggccttaagcttgccggccttcctctcgttcatgttccttgaaatctgacggctggaaaaactcatttggccctgatcactaactgcctatgctagctgctgcttttcctgattgtgtgtatcttgcctcctcaaccacacgggggccatcggcacacacttgaggaattgagttgttttcttttgtattcaccgcagctctcagcacagtagaatttacacagtgagagactcgagtgtgtttgctcatgggttgcaagatagtatcatttgaaaagcctttggggcagagtacctgctcttaattaaaaaaataagaacctcaacttgacaaaaatgtgttagaccatcaggcgtatctctggtttccttcacattgttcctctacacccagagtccccggcctgcatgccggatgaacctacagcctctcaatcaaaatgctccacaagtcatctctttgggttctttgctcagaatatcccttctgactgggatgccctctctcccaactctaccaatcataaccccatctcacccttcaaggccaaatgtaaatgccatctctggcatgaagcttttgcaggcacaattcattgctcttgcccctgaacatggcaccctgtgtctacctcttttatggtacaggctggtggactggaatgacctggtttcaaattccaactccatcacttcccaaggctacctccgttttctcttctagaaaaagggataacaacatcagcctcaatgggatgttggaagttgccagtaaaataatatctgcagcctgcatagcacaagacttggcctccagagctcagtaagtgttttttgtcatcatcatcatcttcatcacctctggggagcagaagaatgtaatagttccagaactggtttggtccattcttaaaaatgtgaccttgggccagtctcttccactctgaggctctgtttcctcatgtgtataaaatgaagtgataatagtttacccacctccatcacaaaacctgctgggaagatgcaaagacataataatgtaggcaaggtaaactgctaagcacagggcttatcgcataaaaaaaaaatgctcatttgcgtctgcacacccctacaacctagaaaactcctttaagggcacagacaatattttacttatctttgcatctcttgctgcctagcctagcccagaacctctgcagctggcagacccacaataaatcattgttgaattgaattgaaaacccaaaccagatgtgcctcctcccctgtcaaatgaagctttcaagctggcaggttgggcctgctgcctcttcactccccctccctccaagctgagcagccgccattgtctaggcctggctctggggaatgaggcagtgcctgccgagaggagggattcagagtgggtaaggatagatggcactaggtgggatgagtgcggtagggaagagcactctgtctgttcctgatgaccccaaacagactgcctttgaagggggctatcctgaa

SEQ ID NO: 1564062 - DNA, 4001 bp, Homo sapiens
ggcgtcttcgaacttggcgttgtcctaaacgacctgtgcggcgaatcagttggggggagctgtagaatggtgaattggtgcctggaaggccttccagaagtgggactcgattctggttcctccgtctgctaggctgtattatgggaggtgatgcacccaggaagttttcggcgtggtaaccacttgtggggccagaagtctgggatgacgcgtgaacaaaggtcggctccatctccatcagctcatctaggtcatcatcttgggcctcatccagtggctcctcctccacctcaccataggtctcctcagtccctggatcctgctgtggctctccttctggtttctggcccccatcctcatcttcatcttcttcatccttactctctccttcctcctcattcttgttccttatctcctcctcctcctctttctgtttcatttcctcttcctcctcctcctccttctcttccttcttcttcatttcttcctccttcttcatctcctcctcctccttctccttcatctcttgctgaaaagccctcatgcgcttcctctggtccttggagtgaagcctgtgcctgcgtgcctcttggtcttcatcttcactgtagtactcttcatcttcactttcttcctcattgggactcggagcaaaagggaagatgatatttcgaactccagggagcgggataggcttgggaacgcgcacttttctttctatctccacacattcgagaatcagctcatccaggtcggccatttctgttgaccataagagctctttgcggaagaattccgacaggcctttgaggaattggttttggaggcggcagtcatcccaagacaagaattgggccaggaactgaaaagcatctgcatagctgccgagggtacagtggccctgcttgagcttgcgaatggcctttttagccacacgtggggggatggggccacagaattccttacggatttcatccaggaagcgcgggaagttggcatgcaaggggcttccttcctgggtgaccgagatggcccagtccttggcttcgccagtgaaaaaggagatcagaaaggccacccgctcggcgcccccggggaaatgaacctcatggtcggctatgaaggtctctagctgcatcaggaattcagccaggtagactgggtctcctgaaaagggctctatctcaggccgctccagcggtgccagagggggttgcgggggcggttcctttgacgcgggcggaggcagcgccggcgggggcgggatgggcagcagaggggggtcagcgggcccgtcgggggtgctgcgatcctggatcacgttaatcaaaagatcatccgagatacagtcgggctccgcgcgtgggggaggccggcacaagaagggcagttctcccccgggaatgacttcgatctcactgagcgcgaactccaagttctcctccgcaaggacgggcactatgggtactggccagcggatgtagctggagacattgccccgcaaggaattaacctcggccagggctctcccgagctggaggcccaaattggcattctccccgcgaagggcatttaattcttcgcgcagggccacattcgccatgcggaggctgttgagatttcctgacgcctcagacatctcgacaagcccaggggccctggggctccgtggtggggaaaggggaactggaactacgggcggccggaggaggccgaaatgcggcggcggggctcgggagggaccgaagtgcggcagcggggcacgggccaggccgggccacacccaccggggcgagctcggagggcggcgctctgggcggagggcccggcggctcggcccagggcgcgttacctcgtcgccggggccggagagggcgggcggaggcacggggcccggaggcgccaggcggaggatgcgggcgacacggtggcggcggcgaccgcgcgaccgggcgggcgggcgggcaggggcgagcggagcgggagggagcggactgcggcaggatctgtcgaggaaaaatcttgcggccggcgattccccgccttttaagcgcagcctcgcactccccccaccccacgcaggggcgggccttggggaaccgcgggcgcccactggccgccgcgcgccgctcccctccagctcgcctgcgcctctcactgactctctccttccctagctgcagctaactcgggtcgggaaaatgcgacagcgactgcccactcgaggtcgtcatggcgacagccagtgaacgtgttcctctcctcgggcaggcccccgagtgtagaggagctgcttcgggaggcgcagctcaatctccagagcctgttgcaaggtaccgagagggaggggggctgcggccggagcccagaagcgagatgcgcagcggcaggagggaggcaaagaagaaagaggacagggaccagcaagataaagacagagagtttaaaaacaatcgacaaagcagtttccagctttcacctttcagcctaatgattctgaaagaggctatttccagggctgtttccccccatccccagccccttttttcagctcagtagcccatggggaaacaaggacagagactgaggcagggccataagttatgccattcaccgagagctgggtgggagactcccacaatgtgggcctacattccctccagcccccctcttgccacatcgcccatgcctttgggatcctggcaccagaagacaaagggggcatctgcaggatctcccactctgggcttcactcactctgctcttgcaataacccctggatagctactgcctcaccaaagtaagcccaatacacagcacccagaggtcacctattttgtcccccctaaccaagcctgagcttctcgatgtaaagaatcacatcttgctacccttaggtttccagaagcacctggcacaaggctggattccctccccacctgccaagaggtgctcagtggatgttgagcatgaaaagaggtcttgtcagcactcctttatctatactaataaaggttaactctaatggcgaatagaaaactgctgatgggccaccaacaggatgacagccataacccccaccccctaccagggcagtggtgaccttggaaaagcaagatgccaagggacaccatgagccttgtgttcagataacaaaggacttgccacacagaaaaagagtcgatgtgctctgtgttgctaccatggcagaattaggaccagtgggtggaaacccagaaggaggcacattccacctccagataaggaagaactttctgacacacctgacagccccaactgtccgtggaagaaatgagctgccttgggagggagggagctccccttccctgcaggtgtgtgcgctgaggctgaagaaacacctagaagggctgctgaggagggagtctgggcacagaatgaggcgttggaccaaagaaccccaagagcaaccccaaatctctgtgattctgagtctttgttcagtgtacatacagcatgaatgtcccttctctactctcactttcttcatgtattctcatcaaattcatcacttcaatcaaccctattcaaatcttgtgcatccttactcactgatgatgccgctgaacttctgcctcttttatgctgttacctcctccttccctctccttcaccttagccctcctagacctgacatcacttacagcgggactaaggtgcagggaacacggcccacaaaggctcaagtaaaagttcttgacatccaagaaagaactccagattggacttcctggtgtaaatctcttcttgcttcacacaggtcatttccttggtagggtcgcagaaaaccttaagagctgcagggcttcaaagagaggaacttgcagtccaaagtagcaaaaggtgtctgcattctgagcctcttttcgtaactgagcactcaaggtggggatcattgagataagggcttggtccccaaaccaccacagcatgaatttattgactttctcttctcctcgatc

SEQ ID NO: 1564063 - DNA, 4001 bp, Homo sapiens
ccatgaccagcgaactgggagaagacagagaaaaattatctgaaaaggagaaaaaatcagataagaatcccatgtgggagaggaaagacaggcaactttcaagagcaatcttttctttctgtacctctgccctgagtaggcggtttccaggaatgatccacactgcctgcatttgtcaggcacaggggctcaggcctgtaatcccagctctttaggaggctgaggcaggaagattgcttgggcccaggagtctgggactggtgtgggcaacatagtgagaccctgactctacaaaacaacaaaaaattagcgggtgtagtggcacatgcctgtggtcctagctactcgggagcctgaggtgggaggatcatttgagttcaggaggtggaggctgcaatgagccgtgatcatgccactgcactccagcctgggcaacagagcgagaacctgtctctaaataaataaataaaaatggcctgcatcttcatccttctcccagggtagctatctgctttgaagtaagtggtcctacacatgatgggcaaatgaatagagagggaaaaaagaaaaataatgtttgatctaatatttccttcaataaactacattttaaaaaagaaacacaggccgggcatggtggctcatgcctgtaatctcagcactttgggaggccgagctgggtggatcatgaggtcaggagttcaagaccagcctgaccaacatggtgaaaccccatctctactaaaaatacaaaaaaattggctgggcacagtggcgggtgcctgtaatcccagcgactcatgaggctgaagcaggagaatcgtttgaacccgggaggcagaggttgcagtgagccgagattgcgccactgcattctagcctgagcgacagagtaagactccgtctcaaaaaaaaaaccaaaaaaacaaaaaaacaaaacaaaacaaaacaaaaacagaaaccaaaccaaaccaaaccaaaacaaaacaaaaaaaaaaacaaacaaaaaaacctcagcccaaactggtcccaaatacaaactgcctgcatctgcagcagcatttgaaatgttttttggctattaaaaatgggctcaggccggtgctggtggctcgtgcctgtaattccagcactttgggaggctgaggtgggaggaacattgaggtcaggagtttgagaccagcctgggcaacatggtgaaagcccgtctctacaaaaaatacaaaaaattagccgggcttagtggttcgagcctgtggtcctagctactaggaaggctgaggccggagaatcgcttgaacctgggaggaggaggttgcagtgagctgagattgggccatggcgctccagcctgggcgacagactgagaccttgtctcggaaaaaaaaaaaaaaaaaaaagcgggggtggggggcagtgttcagactacaaaggccttcatcctatcagtcttagataaggctcaagagcagtggcacgacttttgcaatagcgacttttaaccccatgctccctagtagaagccggtggggaggggacgggggtgccaaatgttccatttaggcccggcccgtgaccacaaaggggtggctgggcagcagggagcggggacggggcttcaggtgcccgcgctgcacccggggtacctgtgcgggtgagaggcctccacaacaatctggtagagccgctgggacctcgggcgacggcgacggcgacagcgacagagaggccctgggaatctgaaggttgagcctgcctcctccctggcgcaggctttgcagagggcgcaccagccagcccggctgaacgggcccgggtccccgggtgggcacagagcagtcagtctcctggcgcgatctccttctggcagtcagctgtcagtcgccttctgggagatcgggatgagcgggtctggctctgttgtcgccggggcctttcctttccagggagggggcggggaggccggcctggctcgggcactcgccaggatggagatttctcaggcggctcgaaggtcaggcagcgggccgaggggaggggaaacgcctcccgggacccggcggcttggcaggtggatggcatgggcctgggaccccgccccgtccccgtccccgtcccccgcggctggaagaatcctgcaaagccgcccctggcaggcccggggatggtgggtacaggcttacggcccagtgaacctgagctttggagtttggacgaatagctagtttacctcttacttcaaccaagaaaagttgttaaatgccgaacagagagagactgggacggttaaacccaaacaggttaaaaaggaaagaacaaagctcctctccatcctagtggagaagaccctggtggctgaaggccaactcttgcaaaaacgtttttggtgggggaagaggaaaggctcgatttcattttcaaatcatatggaaaacacattcctcaacaacacagctccacaaccccattctcagcctaaatgtattcctggtcctgccatctgacagtctgggctttctccaaataacccatattaaaaaaaaaaatggccagggccggcacagtggctcaggcctataatctcagtgctttgggaggccgaggagggtggatcgcttgagcccaggagtttgagatgaacctggcaacaaagtgagacttcgtctctactaaaaatttaaaaaaacccaaaaaacaacaaaacaaaacaaaacaaaacaaaactggccaagtgtggtggctcatgcctgtaatcccagcattttgggaggctgaggcaggcagatcacctaaggtcaggagtttgagaccagcctgaccaacatggtgaaaccccgtctctactaaaaatacaaaattagccgggcgtggtggcacatgcctgtaatcccagctactcgggaggctgagacaggagaattgcttgaatccgggaggcggaggttgcagtgagctgaaattgtgccattgcactccagcctgggcaacaagagtgaaactacttctcaaacatatatatgtatttctgggtgtggtggtgcatgcctatagttccggctactcaggaggctgaggcaagaggatcacttgagtccaggaggttgaagctacagtgagctgagtttatgccactgcactccagcctgggtgacagagtgagactgtctcaaaaacaaacaaacaaaaataactctcttcctctacttcctcagtgctgatgtctccctaaccttatctcagcccagatgtcgcccccaggatacaggccagcagcttaactgagctgacccaaaccaatcacatcatttcccaccaacctcctgagcactctgtcctgggaaatgggctgtggtgcagccaactggctgtgcaagaagccctgacacctcgcgagcctcctcttggtccctaactcaagtccagttagtcaccaggtcatagaattgtccctttaatgtccttctatgttggcactgccttaattcattcaggctttccccatttcttgcctagattgttttaatcttcccggaggcctcatctcatccctgtggatctgctgccaaaatgacctgctagaccgtgagtcttgcaggggaggggatgtatcttattcaccctcacctccctgggtcctgccacagtgctgacacatagaggttgttcaactatatgcttttcaggctgggcaccgtggctcacccctgtaatcccagcactttggggggctgaggcaggaggaccacttgaggccaggagtttgacaccagcctgggcaacacagaaagatctcatctctattaaaaaaaaaatagccaggcgtggtggctgtgatcccagttactgaggaggctgaggtgggaacatcgcttgagcctgggagatcaagcttgcagtgagccgtgatagcgacactgcacttcagcctgggtgacagagtgggatgtgggatcctgtctctaaaaacaaaacaacaacaacaaaaactatatgcttttttt

SEQ ID NO: 1564064 - DNA, 4001 bp, Homo sapiens
aaatacaaaaattagccaggtgtggtggcctgtgcctgcagtcccagctactcagggggctgacacgggaggatggcttgaacccaggaagcaaatgttgcagagagctgaaatcgcactgctgcactccaacctgggccacagagagagactctgtctcaagacaaaacaaaaaaaccagaaaaacaaaaaaccaaccaaacaaacaaaaaaaaactatgatgaacaaattatcaaaattttaaataaaggaaggatctagcactgtagttgcatgacagtacctcattctccttaccccaatttcaataaaattttatttataaaaacagaccacagctgggtgtggtggctcactcctataatcccagcaactcaggaggctgagatgggaggattgcttgggtgacagatcccccactcaacaaaaacaacaacaacaacaaaaacaggccatcatcacaggtaataaaagaaaaaatacataacttggactatatcaaaatttaaaacttctgtatatcaaaagatgcaatgaacagagtaaaaagacaactcatagaatggaaggaaatatttgcaaatcacatctgataaggggttaatatccagagtgtataaagaactcctacaacccaataaccaaaaaaaaagaaagaaagaaagaaaaagccactcagattttaaaatgggtaaaggacttaaagagatatttctccaaagaagatatacaagtggccactaagcacatgaaaggatgcacaacatcactaatcattagggaaaagcaaatcgaaactacaatgaagtatcacctcacacccattaggatggctatgtaaaaaaccccagaaaataacaagtgttggtgaggatgtggagaaactggaacccccatgtactgttggtgtgcacctgtatctataaaatggaatattatttagccttaaaaaggaaggaaattctaatatatgctgcgatatggatgaaccttgaagaccttatgctaagtgaaataagtcagtgacaaaaatgcaaatactgtatgattctacttacatgagatacctagagtagtcaaaatcatagagacataaaatagtagaatggtggttgccaagggctggggaaagggggaaaaggggagttgcttaactggtatagagacttagcttggcaagatgagaagaattctagagatctattgcacaacaatgtgaacatacttaacacaactgaactctatacttaaaaagtggtttggacggtaaatttcatatttccgtgtattttaccacatctttataaaagggaggcacggactagtttccaggtttcattcacataaacattgcaataaaacatttaccttgatgcccaggaggtaaatatccccctccacaccagcacaaaggcaggcaaggacccccagtggctttttcctcatgattgggtggggcaagggagagaaaaagatgcctcgaaacgaacttggagatctcgtggctcctggagcaggccacttaccttgtgggcacatcagggtattgagtgtgtcggaaaacactttccagctcctccacctgcaacagcgtgaacttcgtgcgccgagttcgtggctgcatgttctcgggctgcggaccctccatggccgcctgggccggctcctccggcgggggctgcggctgctgccgaggctcctggtttccaccgccgccctcggggatcatgccgccatcgcggttcatgccgttctcgtggttcacaccgccctcagggttcatattacccatgaggcctggagctccttggccaacatggccttctgcgcttgatgctgcccccagctgaggtgtggggcttatttttacctggtatacactcaggcagtagaacacggtgtcgtggacgagcgaacgcgccatggctggagcgctgcgcccctgcacaaactccgtggcgtctgcagctggagtgggggttagagggtggagctagttcctgttctcatgcttggtattggttacagttgcaatgagtgggacttgcttatgcgcacaagcaagagagggaatggagaggagtggggggatgggaagttggggggtgcgggtggggagtgggggtgttgcaggtgggagtggggggttgtgagtgtggggtggggtgcaggtggggatgggggtgtgggtggagggtggggggtgcacagtgagggtgggggttgcgggtgagggtaggggttgtgggttggggtgggggttgccggtgggggtacatggtgggggtgggggtagcgggtggagatgggaggtgtgggtggagggtgcgtggtgggggtaggggttgtgggtgggggtgaggggtgtggtatgggtcgtgggtgggggtggcagttgagggtggagtggggtggccaaaacacaggggcagtgtggagaagaaaagggccaataggaggcatatatgtatgcaacatggggccccagcttgcagctttgctgactacaccctactcgggcctagttattaccctgaggaaagctgatttgggggctcagaggggaggtgagatctcacggtgaccataggacgccttgagtaaaagtttggagaatatctcatggcctgaccctccatatttggcagcatgcacagggcgcgggctattaattaagcagaaatgattgactgggggctgcttgttcagagttccagcaaaggcactgaaagcagagctgccatgctctcttcagtgctgggatcgggatcttggagatgggcatgcagagcattctgggtggtaagatgtgctctgcaagaaatctaacgcaccctttgagaaagtcaacacagaataaacacgaggctgaatctgttagcctgagactgaatatctttggctatgcaagagaaacctgtactcatggcaaaatggagtgctataaggacaagcaaaaaataaataaataaataaaatcggggatggtataggaagagcaccagtaagggcatacctgccaaaaatctccaatcttgggatggagatttgggatttaaggatatgcagcttactggatgtggggccacttctgctccacagagccttgtaactacacagccttcctaccactgaccccaataagcccaattacgaagaaaaaccctgaagagcctggtgcagtggctcctgcactagtcccagctactcaggaggctgagatgggaggatcacttgaacccaggagtttgaggctgtggtgagctagaatcacatggcagcactccagcctgggcaacagacagaggccccttttctttaaaataaataataaaataagaaataaaatgaaaatgaaagaaaggaaagcgctaagagagtctgtcatgaggaagggcatggagatgtcttttgagggtggacaactcatgaatccttaatttttctagagattgtgtgtgtgctcttaagtgatgttatatactttattttgttttttaaaaatatttttaaaaattttatttttaaatgttcttttaaaaactttctgtatctatttatatctattggttatttgaggtttttttggcagcatatataaatatgcagaccctttgagtctgtagcctaccaagagagatagctctcgtcttcatggtgattctgagcatggaaaggcccttgcacttggcagcatgacaaggactaagccactcgctccattaattgactgccatccactgggctaagtgagatccttgcgttctatccctagtgagagaagagagaggaagaagaagaaaaatagaaagataataagaaaatagaaaaagaaatgaataaatgtacattgtggggagcaggaaaggactaccagtaatgggaggcatcagctaggagcacagatccgaagcatgactcactgtgtgtcctaggacactggatgaatctatctggttctcagcttcctcacctataaaatggagataacaacagtgtc

SEQ ID NO: 1564065 - DNA, 4001 bp, Homo sapiens
tccagccacaaagatcccaaagttcagacctcattgcctatacatgaaaaaggccacaaaaacaccaagatggcaatgtctgggtcaaagtgtgtccaagccctgaagcgggttttagaatggctcccctgcccgattgctttttcggtttactgacctgcactgcgagttcagtcacattcatgcttcttgccagcctccttctatggaagaaaccacacgtgttcagcatttggagttgtgggtgtcgtttcattcttgtgtttaatttttttattctaccaactccccacacccagtaggctgttctgtaacacccagctgagcctcacattaggaacatttctctcatgccacaaataaaggagatgccaaaaaaaaaaaaatcagggcggtggctcacgcctgtaatgccagcactttgggaggccgaggcaggaggatcacttgaggtcaggagttcgagaccagcctggccaatatggtgaaaccccgtctctactaaaaattcaataattagccgggcgtggtggctggcgcctgtaatcccagctacttgggacgctgaggtaggataatctcttgaacctgggaggcagaggttgcagtgagccgagatcgcaccattgcactccagcctgggtgtcccagcgagactccttctccaaaaaataaaaaaataacccccccataacaaaaaaaatcgttaatcaatataaatgacattctaacttactatttgaaacttagaaaaattaacaccaaaggaaacccagacgaacgacggacttctcagaattttaaataaggtcagaatgcgaccctgcacttgctgtacagaaccttaatctcctcatctttatttctgcctcgcctgggataggagttatttatcataactgacctcagcccaaagttgcccaacttggttcatttaaattctgcatgatgcctaataggcatagccccactacagaacccactaggtgccaggggtctgcggggaggggacggcagcaacaccaggccccagatgggttttggttcaggaggggagagggtaggagagggactgcgggaaagccaaacgccgcctccctgcaaaccgcgcgccaaccagagcaatgggcttaccgcaggaactcactggggaactgctcgcgttggaaaatgcactccagctcctgcagctgcaatggggtgaaggcgtggacgttgggctgctgcgcgttgccaggctccagccccccgacggcgccctgtgggcgcgaatactgctgcccaggttccttctcgctctggtcgctgtcctcaacgttgccatcgctgccgctggtgccctcgaggtttccttcccataggtggccaggaactccggcgccgccgccatctttttcttctccgccgccatctttttcttctccgccttgggctcctgccgactttaacttttctcctgctgctgtgccttgctcaggctcaggctgtgcatcctcttcctcctctttgacctcttcagtaagcgacagcaccatagcattcatatctggaaaagtagaaaccccaagagaaagatcaaggcattggtcctgagggtgttggaaggaggtggtgaggggctacactctgagagcagtggtagtgcaggggtatcatccagtctactcgcctctcccagagaaccttggtttcctgagttcgcaaaagcatgtgtcccatcaaggtactgaccctgtagttctttctcgtcgtcgactgcagggctgagcaagctggtcatatactggctacactggtccggaggctccataccctgagtggtgtggatggagctgtgcacttctgcagattctgagctggggccaccacgctctcctaggcagtgctagaactgtgagtcgccgcctgcaacgttcttctggtgtctagactcagcaacagtgtatccacttagagacctcctctcttgcttttctgcttcccgctatttgctgtgggttgggcctgctgaggtgcgcatgcgtcaggggcttggccttgcccggatgagggagagcacgcgttggtggtgtggggggggaggggtaagtggtgtagtagggtgtgggggaggggggagtagggcgtgggagggggagtaggatggggtgcgtgcttgcatgcgttgtcctgtagacaggcatgcgtgagtgtggaacttgggggaagctgctgtgctgaattgtgcaagcccattttatggcgataagggagattttgcactagccccatgcttcctaggtctccaggagcaggagcttgggcctggatttgcaaagcttgtgggctgcgcaaatgcactatgtaaaaatgcagcacactccttgagaaagtccactattaattcttagtaatgaatccacatcaaagtgcaagggtggaaacatgcacaatgatgcttagagcatccgagattgcttttcttttctttctttctttctttcttttctttttttttttttttttgagacagtctcgctctgtctctggaatgcagtggcactatctgggctcactacaacctccatcttctgggtacctagattcagtaacagtgtatccacttagagacctcctctcttgcctttcctcttcccactatttgctgtgggttgggcctgctgaggtgcgcatgcctcaggggcttggccttgccttgggcacgggagagcacgtgttggagtgggggcagtaggacggggtggggggagtagggcgggggagggagtagggcgggggggcgtagggtggagggggggagtagggcgggggggccggggagtaggatggggtgggtgtttgcatgtattgtgcaggtactcaggagtgcctcagcctcccgagtacctggaactacaggtgcgcaccagcacacctgggtaattattgtatttttagtagagacagggtttcaccatgtttgctgggctggtctggaactgctggccccaagtgatccacccacctcggcctcccaaagtgccgggattacaggcgtgagccaccgttcccagctgcagccaagatttctaaaattgcagggcatccttcctttgcctttggttgtgactgtggatagcgcagcttctgctatgtctctggctacagacccattacaaatgcgcacttaccttctgtgctgagctggtgctgtggacctgcagtgatttcccttctttcctgctgctgcatagccctcttttcctctactcctgcccttttctacagatatctttctgagctcttgtttaggaataaatacattttatttattgtcaaataatcacagccaggacagattgagtgctctaagattcttcctttaagaagtgttttgtagatacttcaggacttgttaatgtcctgaatatagagagtaggttttaaccatagaacctatcctccatcgtttgagtgactcattctatttttgcttgcacaatgacccttttcatcaaccttattttatataagaaattaaactagtttgtgggcccctacatgtactgtgggttccagtcaccccaacgactgatcctaatggatgagtgcacgcatcatacctcatgttcccagaggatgggtaagaaaacagctggaaaatatttgaccaattcacgttcaaagagatgggaagggatgacgatctaacagcctctttctgattttaactaagatgtctcctcgtcaggctggctcttcctggagctaaactgctggaatctgaaattttgctttgcttcctgttgctagctggctaatctcacttgatcactctccgtttgtgttagttttgtcatctgtaaaatgggaataacaatgataactatctcatggggttttcgaatagatggagatgattaaacatgctgcctcacatttcctgcttctgtcagtttgtatgtgtttatttacaagggtccttgaaaggagagagatgatggctattctctggcagtggg

SEQ ID NO: 1564066 - DNA, 4001 bp, Homo sapiens
ttccagccacaaagatcccaaagttcagacctcattgcctatacatgaaaaaggccacaaaaacaccaagatggcaatgtctgggtcaaagtgtgtccaagccctgaagcgggttttagaatggctcccctgcccgattgctttttcggtttactgacctgcactgcgagttcagtcacattcatgcttcttgccagcctccttctatggaagaaaccacacgtgttcagcatttggagttgtgggtgtcgtttcattcttgtgtttaatttttttattctaccaactccccacacccagtaggctgttctgtaacacccagctgagcctcacattaggaacatttctctcatgccacaaataaaggagatgccaaaaaaaaaaaaatcagggcggtggctcacgcctgtaatgccagcactttgggaggccgaggcaggaggatcacttgaggtcaggagttcgagaccagcctggccaatatggtgaaaccccgtctctactaaaaattcaataattagccgggcgtggtggctggcgcctgtaatcccagctacttgggacgctgaggtaggataatctcttgaacctgggaggcagaggttgcagtgagccgagatcgcaccattgcactccagcctgggtgtcccagcgagactccttctccaaaaaataaaaaaataacccccccataacaaaaaaaatcgttaatcaatataaatgacattctaacttactatttgaaacttagaaaaattaacaccaaaggaaacccagacgaacgacggacttctcagaattttaaataaggtcagaatgcgaccctgcacttgctgtacagaaccttaatctcctcatctttatttctgcctcgcctgggataggagttatttatcataactgacctcagcccaaagttgcccaacttggttcatttaaattctgcatgatgcctaataggcatagccccactacagaacccactaggtgccaggggtctgcggggaggggacggcagcaacaccaggccccagatgggttttggttcaggaggggagagggtaggagagggactgcgggaaagccaaacgccgcctccctgcaaaccgcgcgccaaccagagcaatgggcttaccgcaggaactcactggggaactgctcgcgttggaaaatgcgctccagctcctgcagctgcaatggggtgaaggcgtggacgttgggctgctgcgcgttgccaggctccagccccccgacggcgccctgtgggcgcgaatactgctgcccaggttccttctcgctctggtcgctgtcctcaacgttgccatcgctgccgctggtgccctcgaggtctccttcccataggtggccaggaactccggcgccgccgccatctttttcttctccgccgccatctttttcttctccgccttgggctcctgccgactttaacttttctcctgctgctgtgccttgctcaggctcaggctgtgcatcctcttcctcctctttgacctcttcagtaagcgacagcaccatagcattcatatctggaaaagtagaaaccccaagagaaagatcaaggcattggtcctgagggtgttggaaggaggtggtgaggggctacactctgagagcagtggtagtgcaggggtatcatccagtctactcgcctctcccagagaaccttggtttcctgagttcgcaaaagcatgtgtcccatcaaggtactgaccctgtagttctttctcgtcgtcgactgcagggctgagcaagctggtcatatactggctacactggtccggaggctccataccctgagtggtgtggatggagctgtgcacttctgcagattctgagctggggccaccacgctctcctaggcagtgctagaactgtgagtcgccgcctgcaacgttcttctggtgtctagactcagcaacagtgtatccacttagagacctcctctcttgcttttctgcttcccgctatttgctgtgggttgggcctgctgaggtgcgcatgcgtcaggggcttggccttgcccggatgagggagagcacgcgttggtggtgtggggggggaggggtaagtggtgtagtagggtgtgggggaggggggagtagggcgtgggagggggagtaggatggggtgcgtgcttgcatgcgttgtcctgtagacaggcatgcgtgagtgtggaacttgggggaagctgctgtgctgaattgtgcaagcccattttatggcgataagggagattttgcactagccccatgcttcctaggtctccaggagcaggagcttgggcctggatttgcaaagcttgtgggctgcgcaaatgcactatgtaaaaatgcagcacactccttgagaaagtccactattaattcttagtaatgaatccacatcaaagtgcaagggtggaaacatgcacaatgatgcttagagcatccgagattgcttttcttttctttctttctttctttttttttttttttttttttttttgagacagtctcgctctgtctctggaatgcagtggcactatctgggctcactacaacctccatcttctgggtacctagattcagtaacagtgtatccacttagagacctcctctcttgcctttcctcttcccactatttgctgtgggttgggcctgctgaggtgcgcatgcctcaggggcttggccttgccttgggcacgggagagcacgtgttggagtgggggcagtaggacggggtggggggagtagggcgggggagggagtagggcgggggggcgtagggtggagggggggagtagggcgggggggccggggagtaggatggggtgggtgtttgcatgtattgtgcaggtactcaggagtgcctcagcctcccgagtacctggaactacaggtgcgcaccagcacacctgggtaattattgtatttttagtagagacagggtttcaccatgtttgctgggctggtctggaactgctggccccaagtgatccacccacctcggcctcccaaagtgccgggattacaggcgtgagccaccgttcccagctgcagccaagatttctaaaattgcagggcatccttcctttgcctttggttgtgactgtggatagcgcagcttctgctatgtctctggctacagacccattacaaatgcgcacttaccttctgtgctgagctggtgctgtggacctgcagtgatttcccttctttcctgctgctgcatagccctcttttcctctactcctgcccttttctacagatatctttctgagctcttgtttaggaataaatacattttatttattgtcaaataatcacagccaggacagattgagtgctctaagattcttcctttaagaagtgttttgtagatacttcaggacttgttaatgtcctgaatatagagagtaggttttaaccatagaacctatcctccatcgtttgagtgactcattctatttttgcttgcacaatgacccttttcatcaaccttattttatataagaaattaaactagtttgtgggcccctacatgtactgtgggttccagtcaccccaacgactgatcctaatggatgagtgcacgcatcatacctcatgttcccagaggatgggtaagaaaacagctggaaaatatttgaccaattcacgttcaaagagatgggaagggatgacgatctaacagcctctttctgattttaactaagatgtctcctcgtcaggctggctcttcctggagctaaactgctggaatctgaaattttgctttgcttcctgttgctagctggctaatctcacttgatcactctccgtttgtgttagttttgtcatctgtaaaatgggaataacaatgataactatctcatggggttttcgaatagatggagatgattaaacatgctgcctcacatttcctgcttctgtcagtttgtatgtgtttatttacaagggtccttgaaaggagagagatgatggctattctctggcagtggg

SEQ ID NO: 1564067 - DNA, 4001 bp, Homo sapiens; identical to SEQ ID NO: 1564065

SEQ ID NO: 1564068 - DNA, 4001 bp, Homo sapiens; identical to SEQ ID NO: 1564066

SEQ ID NO: 1564069 - DNA, 4001 bp, Homo sapiens
tgaactcaagcaattctcctgcctcggcctcccaaagtgctggtattacaggcatgagccattgtgcccggcgtcacttaggtttttaatccacttggagttgcattttgtgtatggtgtgagataaggatccaatttaattttccccccaagtgccatctcatcttttttaaatttaaaattttattttatttttggccgggcgcggtggctcacgcctgtaatcccagcactttgggaggccgaggcaggtggatcaggaggtcaggagttcaagaccagcctggccaacatagtgaaaccctgtctttactaaaaatacaaaaaaattagccaggcgtggcagtgggcacctgtaatcctagctacttggaaggctgaggcagagaataaaatttattttatttttaatttgttttagatggggtctctctctgttgcccaggatggagtgtagtggtgcaatcatggctcactgcagcctcaaactcctgggctcaaaggatcttcctgccccagcctcctgagtagctgggactacaggtgtgtgccaccatgcctgcctaatttttaaaatttttttgtagagattgggttttgctatgttacccaggctcaccatctcatcttttaaaagggaacagtatttccccatggattacatgagattgctgtcttttagccattttatcccctcagcctgattgtttctcccagctgaacttcatttatggctcccctactagattccatctaccaagcttcctccctttatttatttttgagacagggtattgctctgtcacctaggctggagtgaagtggtgcggacaccactcactacagcctcaacctcccaggctcaagtgatcctcctgcttcggcatcctgggtagaccagaggtgagagctgccacacccagctaattttttaatttttagtagagatagggtctcactatgttgcccaggctggtcttgaactgctggtctcaagtgatcctcctgccttggcctgcctccctcacgatgggattacagttgtcagccaccatgcccagccacttcctcactttcctggacttgtcctaagtctttaggactctttctagccttcggacataatttaataaatagttaaaggaataattatggcaaccaccagatcctttccatgtttaagtctgagaatggcaccaacttacctactggtttcacctgccattacagtataaggtcactgaaggggaagattcagctgacattttaagcttcttggattgctaaggcccctgccttattaatgatagagagcagagagggaagagaggtaaggtggcattgtggtatagagctgtgggaatgggatgggggagaggcatggaggcagaggtaggtggaggtggagagcgctggcttagggaccctgactcctgggggttcacacaaaatacctttctcagtaaggaatcccgattttgaagctcttaggttggctctgcatgcaactttgttcttgggttacggcggcagtttctgaactctgcttggtacaacaggagggaggcaggggataggggtagtatctcaggccgtagccttccccagcctgtatccctgttgcctgggagtagccccagtcccattcacaacccgtccgccttcgcaacccgtcccgccaccaatcccaccccaccattagcaaagtctgagctcacctaacactgaatcctcccgttggcccctccttcccgtccagctctccgctccccccgggtccttccaattcccgaccctgtccttgtcctagccttgaaagctggccaggctaaagccacagccgagctcccaccttcctcttgccctgaggggcataatcctgctgtgacttctgtctcagcaagcgtgagctcaggtctcccccgcctccttgaacctcaagaactgctctgactccgcccagcaacaactcctccggggatctggtccgcaggagcaagtgtttgttgttgccatgcaacaagaaaggggggcggaggcaccacgccagtcgtcagctcgctcctcgtatacgcaacatcagtccccgcccctggtcccactcctgccggaaggcgaaaatcccgttaggcctggacgtattctcgcgacatttgccggtcgcccggcttgcactgcggcgtttcccgcgcgggctacctcagttctcgggcgtacggcgcggcctgtcctactgccgccggcgccgcggccgtcatggggttcctgaaactgattgagattgagaactttaagtcgtacaagggtcgacagattatcggaccatttcagaggttcaccgccatcattggacccaatggctctggtgagataaacctggccgcggccctgcgcacgtcccggcctggaccccttatccggtgccggagtagtacaacccagcccatgtaacctgaaacgtcgcggacccttacgggttccttgcccgtccagagggggttctgctcgaacccactctccccgcgcgggtgctctaactcgaaccccttccaggtgtcacttgccgcttcctgcgcggcccccgccccggcccagtggtacaggccgagctgccagttaccccgcctacttccccctcccgccaaaggagtcgcgtctggaaccagcttcccgccagctcagtcctccgccgcgcggctccccgccggaccggccggagccggcttcccagccttacttgaccccctccggagaatgtggggacgctggtagctctcccgtggccttcggtcccaaacggtgcacttctgtttcagcccagcgtcctctctcgcctcgcattggtacactccaactcctttctactcttctctggaggcggcacttttgaatttcagacccagcgctccagtctttagaatgcttgaggtgtcgatccccaccccccaccgctatgtcagaggtagttgcctcgaactcgcccttttcctaccaccgaaaccgtcaaaagccgaaattaactaatttaccaaatttgttgaatgcttattgtttatcaggagttattcagttgcaagttgtggaaacagcggagaatagaataaaccaactccatgctcacagggaacttatattccagaggggaaagaagataaggagaaaataagatggttttaggctgtcataagtgctatacaggaaatgagacaggtggatgtgataaagtgacttaggtggtgtctttagaaagggtggtcaggtaaagcctctattttgtgtcttcccaactctaaacgatacaccgtggattcctctcacctcagatgtccatttggaatcctgctgtattcttccaccccagagatgttctagctgaatgatatcctagcctaagaggctgcccttgctgaagtagcacatactgagtacctttcctggagactgagtgtctcaacagtggcactattgacatttccagcgagataatcctttgctgtgggatgtgctctgtgcattgtaggatgtttaacagcatctctggcatctacctgctagataacagtagcacccctgctccccaggcatgacaatcaaaactgtctctagacattgctagatgtcacagagggtgtgtgtgattcccccaaccccccaacttgtttgagaaccactggcctggagggctaatgcttggtgtccacccagtttcctcgggttttagtgtagtggcccctgttggaagagctaggatgtacctcttggcattcagtcccctcagcattagtagatttgtattcccagctgttctgaaaagggctatggcactcccccacttgcccccgttcttcaaggcccacctctacaagccattcctttagtccctttggtgagtgagtcttcctctgtggcataccgtagacacttggtacacgttaatgtttattaagtcctatattgatggtgcatgtttttgtatcttcattggcctgtgagtaccctaa

SEQ ID NO: 1564070 - DNA, 4001 bp, Homo sapiens
tctctgggctccagttttctctcctatgaaacagcgatcatagatagcaattcctcccctctcctgcttcacaagacctttgtgaagattcaaagagctaatggatctatgtcaagtttggagcttcatgccagaagcttacctgacagggtgatggaacttggattcagccttggtgacctcagcagccgttgccccaccagcagcctgtccaaagcaaaagctagcatgtggctcaaagtacatggctagataacttcctcctctgtactagaggtcagaaagctgcaggtaaaatgatcttgaagagaccttagacatctctgggacccagcaacccccaatacccacccctcaacaaggggtctctcttggttctggttgaaaaacaagcagacagagtcctgcgggttgtttgcttccctgcctctgttccagcacctgtttggaggctctccaggggacagtgttctactggagcagcaaagattcagggagatcgggtgggtgggagagcactggagtaaggtgccaggagacgaggcctcaagcaccagcactgccacacactggctgtggggcctgcccagatcccttgcccactctgagctttggtctcctcatctttccaattgccacagaaagcttggatctgctctctgttggaatcaaatgttggcaaaactgtgaggatgctatctcagatctgcacctttggactgaggtcaggggctctctgggaagtgacctggtcactgttaatgcatgtggctgcatgtgaacacacgtcacaagggctcgaactcaccaaatccaccagcttcctcatctgccttggggagtcatttgtggaagacagccagggcctccagagacaagttcctctgggacaaagaggagagatcaatccgtagaggaagagactgaaaggtgggctccctgagataacaagagacctcccaaaagcttggctcaggtgccatctgctccaggaagcctttcctaaggctcctgagcccattccaggacagatgtccctcctctcggcttcagcaatgttattattgcttttatcatgctgttttgtaattgtctatttacttgtctttgggcttcttaagctcaaagatatgctcaatcgtatctgaatcctcaacacctagtacaatgtctggtacacagtagctgtttcagtaaatgtttgttgaagactaaatgtttggagtaatgagtgggggctagatggaaaatatcttgcctcctacttcctgctccaagatgtagaactcagagctctaccatcttcctgggctgaagaagagggccagaaatgttcctgggtccactgcttccccactggacttgcagaggtaggaaaaaagcaaatggaaatcttatggcgtggtcaggaaaaagacaatgtcccagtcaagggcctctttagactttggtcctctttccccaaactccccacccccacagtctagattgtgttaagcccaggtttcatggcagttccccatccccctcaggggactcagccacctggcctatgaggacctggctgcttcaccttcagctttggcaacagctgtccccaagtcccctcttgccacccagcgggattagtgaggtgaaaagtcagatgagatattccagctagagttgaggagggagggctatgaggccattgcttttccccttcacagagaacagggtgccctggacatctcattttccttcctctctcaggaagctctcaagcctaagttcaggttgccaaaggctaagctcaacttacctttcactcccatttacttcttgtccagaggagagaaggcaagatgggcttaacaggccagggagtgccagtggggcttgtgctaggtctggagctagggccaaagccagggctggaacaggggtggcagcagcagcacaggcagcagagtccattcttaggggaccaaagccagtggggtctcctacttcccagaaccttctgcactcttttggcttttcctgggagacccttttataagccctgcctggtcttataaattattcagggaggacaggggtgggatgacttgggagggggataaagatttagggaaggggctcagggagggaaagctgggttacctgggtgtgaaatctctcccagttgaataaacatggtgtcagtgggaggtgagggatttgctttgcctccaagtcagaaagaaaaacacagaaggggcaaatcgcacaccatttgtgtgaattccccagggagtagcaaggcctgagaggggaaggagaggagctcattagcactctgaaaccacagagatgtcagggacagagggctgaatagacaggcctttaactaagccagttcctggcaagaagagacagctgacccctttaaggagagtgagggactcacttgttatttcagctcaacctcagatagatttgccaggtggacctgaatgtagggtgactgccattaagcatatcatctgggttagggaaaaaaggggcattctgggcagagcaggcccagatgcttgttgggtaaaccttaagtcttctttcaatgcccctcagccccttactgatcagttcatttgtcaaagtgccccctccagcctcagcagtaagtggtccagtgaaggagagcaggcaggatttcacagggcctctgggtgagattccaaacctcagagcttagcttccagttcagaagccagggtgctggggagaggcaaagttctgcccgactacagagctgccgaaggaccagccccagccccaggcctcagttccctcatgtaagagatgagggtgctggcccagtggtctcataggaccatgccagcctgaacactctctgacaggggctacataaatgggtactgaacccgggcaagcccagaggcctgagcacagtcctcggccttagccagccttctgggcctttgccagaaagcttctagttacaactactggcagggaccttatgcttcagaggtctcgaaaatattcctcctgacctcagtgtccagccccagcacagatttagcttcttggatgttcatcacagtctggtttgtaatggtcaaaaattagaaacaacttcaatgtccaataataggaaaccagttacattaattagggcaaatccttgcaactgaatgccaagcaggtgctcacaatcatgttctgggaagtataatttttcaacacagaaaatggaaaaaaaaatcagatggtaagatagcatgactaatttaagggctcctcatttctctgttcacctaccccccatcttcaccccacttccaattctagtcccactatgttcttttcagcaaaggaaaattgaaaacaacttttaaaagctggttagataaatcattgggcagttacacaatttcatattaaaattggcatggtagaagaatgagggaaaagttaacatattgaaagagtgaaaacaaaataagtctctaaaatattacttaaaggatgatcccattttggtaagaaaaaagatgtagaatggacagcgtgcagagaaaaaataagactggtgagaagaaagagtgttagggttgtcatttctgggagtaacagtggggtggatttttactttatgtttttctgaattttctaaaaagttccacaatgaactgatattatttgagtaataaaaaggaaaggcacaaaaaataaaaataaaccaacaaagaaatgtttatccatggaggaacgaaagctgggggaaatgacagatattttcaaatatctgaggattagactgcaatgagattacacttgttctgggtgacttcaaagggcagggctgaggcccatggctggaagctacatggagacacattttggctcaatcaaaggaaaactttctaacagctcagtcaccacctaacccaagggcctggcacggtcccggccctcaataaacagaggtttattatatgaggtgaaatgag

SEQ ID NO: 1564071 - DNA, 4001 bp, Homo sapiens
gttttcttcactctgctctagaaaaaaaaagaatccattattcttcctctttaaaaagatacacattttctttgaattagacacaacctaaaaaaaaaaatacagacacaccataacccaacctaattcaatattagtattagggcatttggggagagcaagaaggtcagaggggaccaggagttagataaaagatgtcttctaagactgagagacaatttacgttttattataagcttgcttaaaataagcctttccttatcagaccagtaattattttcagattctgatagtcactttcaaggacttatctggcacattacactagcctaaggtaggaactaaagtattaaaattcatcagaacatcatggactaaaaaaatctttgtaacatttttcagtaagtggagtgtgtcctaaaatcaagttttaaaaagtggattggtctttctagctacctaagctatatttctacagtttagaaaagtcatggggggggaggggttataattgtgccagtcctccagggaagatacaatgtacttaatggggtgataagtagttactctgtctataatcacgaagaatgaaagaaatgattagtagcagtaggtttattatttcttccccctttcaatcagtccaaaacactgcggttaattctgattcaggaaatgcgggctccttacttctggcaaaaaatcattgtggggtcttgcaaatggaagatgacaatctgatacaactgcttcctcttgccccaaaatgaaaaaaaaaatgacctcaataacaagactgctaggcctcagattcccagactaacctgtggaataagtatggtgaaactgtctagggaaggaacgtggctgtctcctccatcttgaaattaatcagcataagggaaaaagggaccgagtattcaggaagcagaagcccaaccggttaatactagttactaagctatggcatgcgtggcaggtaccgtctgcagaagcagagacccccctaggcttttttttttttttttaatgggggagggattgagttgttggtggattaaacacaaattaacttgaaaatttggcccaattccatcccttatccaggagaacacaacaaacacctaacggcttttccctctcttttgcggggggatccttccagtgatacctggcaaaggatatgccagggttattcgagcaagggagtaaaccacatttgcctcagatcctcagggaagatgtcatcgcggccccagggggcgcctaattggtaataccctgcagaagggctcaaaatgaggttttggaaatctaaaggcccaagagttgccagcatctcacttggggcagcctgattttttacttcccttttcccaaacccaagcccgccatggaaaacgcggggaggtcagggaagcctccagagaacagagaagaaaaagcctgagacgttctaagattctgacgcctgaggccaaaactcaaaaactgcctcccccgatttcctaaggctccggagggcctgggctgcagctcgcgcggccaccgagaggaagtactacccacctccttccccttcaaagagcctgtcgactataccactcaactaaaatggcagcggcgactacgccacggagccccccgcagcaacgggcctggggtccggaggcggcgctgagcctctgccacgacgcgtcactcgggccattttgagagaacgcggcagccgcggctccgctgtcttcctctcgctctacatcatttctcacaggattcccaagtcttcacttactaggttttagggtcaggatccgactcggttggttcggccgccgccgccgaggctgctccgcacctccctggccgccgctctcaagcccgcctccaatgagtagctggttgagacccgcctctagcccagcgcctgctcggagacgttgctcaggcagccattatcttccccattgttaccaagcagcgacaggaaacgactgcccacaacaggaagtgatgatgccgcgtcccggcaccgcagccccactcccagcctattagccaatcccagtcgattcctcgaaaaggctccgcgggaggaggagggggacggcagacgacgcggcaaggcgggcggcggtttggaaaaggaaagctgttatgacgcccaccatgtgacaggccccaccctcctccgccattttgaattgtggcgagaaatttgcgttctgagaattgtgggaaccttcgctttcccattttgaaaactgaaggacgtcacggtctgactgcttgaagacattttcagagagagagaaatgtgatattagtctaccctgacatcacatcagttcacacaatccgtgcagaccagttcaaaaagtagcctgcgttttattcaacatgtatttacacagtgccaactgcatgtcaagcaccattgtagctgcttaggaaattaaaatagaccaaaattaagaaagaaaacaggccacgttcggtggctcacgcctgtaatcccagcactttgggaagccgaagcgggcggatcacctgaggtcaggagttcgagaccagcctggccaacatggtgaaacccagtctctactaaaaatacgaaaattagccgggcgtggtggcgggcgcctgtaatctctgctaatcgggaggctgaggcaggagaatagctgaacccaggaggcgaagattgcagtgagccgggatctcgccactgcactctagcctgggtgacagagcaaggctgtgtctcaaaaaaaaaaaaaaaaaaaaaaagaaaacagatcaaaatcccagttctcttgagtctttataggggccagggacaataatttagaaaaaatcaaacataaatacatatcatgttagtgataaatgccaaggagaaaaatcaaggaagggggacagaagagttccttgtagggacaaacggattcgtgatgtttaaaagactgataactttgaggcattaactctaaagtattcgaaaaagggcggtgattgtaaaagggtgggaaaatctgataacgttgggatttgtaaaagggcagttaaagaaggcctttcttaggtagtaatgcctgaaagaattgagggaactcgccacacagcatgccactcccattgtcacagttaaaggaaaaccttacccaagtttttagattcttttccttttcccaatttttctgttttccaatagcatgccagctatgctggctttgttacggtttttccaacaaagctaacttcttcctacttcaactactttacctttgctggaatattttactttcatatctttgctttcatcatccaagcctcgcaattattaacttcctagagaagccttccctgaccaccctacctaaaataacttcttcctgaaggcggaaaaaggtctgaggaaaaaaaaaaaaagaaaaaagtaataacgacttctcccatctccttacctgcttacttttcttgtaaaacacttaatctgaaagtaagttatttatttgtttgtttacttcaccctttctgagcagtaaacctctctgttttgttcactgttgtgtccccagcgaccacatagtaagccctcaaaatactttgggagaattaccccctcaccatgatggatgttatatcagcctggaatataagtatttcactccaagcagttaaaacaatatccctcatacttacctgcccaactccctagaagactcattgatattgtcatttttggcagagggatacatgatttaggcgctgtgtctctactcaggtttttgtcttattttacataatcatgtactagaacgattacctagaacgtgtaaaaggaattcttcagtagcctgcaattgccattaagcctgatattctgattatggcaataacattagccactccttaacgtattcttgaggcttatgtggcttaatctaaaatataaaatcataaaagaagtggaagaaaatacaggttactatttctgt

SEQ ID NO: 1564072 - DNA, 4001 bp, Homo sapiens
gggaggccaaggcaggtggatcacgaggccaggcgatcgagaccatcctggctagtatggtgaaaccccgtctctactaaaaatacaaaaaaaaaaaaaaaaaatagccgggtgtggtggcatgcgcctgtagtctcagctacgcgggaggctgaggcaggggaatcgcttgaaccggggaggcggaggttgcagtgagctgagatcgcgccactgcactctagcctgggcaagagagcgagactccgtctcaaaaacaaataaataaataaataaccaagacagcaaggaacatttcccatatgtgaagcctgtggtgctagctaccagttccccaaacacaacccctctccccaacaccttggctcgggtatattttgtagtacaggctcccaagagaaagaatgcatgaaagtactttgtaaactattaagtgatacagaaatgtgatataataaacaggctcagaggtcttgctttcatcatggctttggttacttcgagcaaattatagctcttttctcaaactactcccacccctataatttatgccaaagtgttctgaaaagaaacacaggcaaaatggttatcctagggctaaaaatcctgattatacctaccttgaagcttttaatccaggaccctacttcaccacccgcctgctctgtcactttctctacaaaggaaggacacgaagtaagacttccaaaagaacaaaacgtttattttttaaatttaagaattatgggaaacctaagtaatgggaattgcatcctcatcggggtcttctggcaagtcggaagcaccaccctctcctgtagctcgatgcttctctagtttagcaatcaattctttcgctggattgaagacgccattggtctgctggtcacagacatagcagcgcggggtggtgcggaaatgctgcagtgcacagctctcgcagaaataatgcctgcacttggtgacaactgggttttggaagctctggcgacagatgaaacacttgaatggtatttcctcatcatcgcttcccacttcatagttttcatcctcatagacaccatagcgaccctcatcaagctcacgttcgatctgccacccatgcttgtaatctgaacggtcatggaggaatttgcagctgtctccgaagccgcagaagccagtctctttgtagtccttacagatgtcgggctggtaatcccagcgcacggtggcacgtagatgctcgggcgctcggatggggcccttcctcaccatcccggaagaggcattgcccatagacgtatccttgggcttcatgtatttctgataattgttgattccccgatagatcttgtcatcctccttgcccctcagctcctcctggatcttctggctgcgctcaaagatggcttgtgcatcgcgctctttctctgtgtccagctcatagacagctgtcgctcccatatcctctggtcccacgggtttcgccgaacgggtggatttataaaccacgccgagactctcgggctcattttcctcttcctcttcgctgctcaagtcgccgtaagccgccttctgtttaccactgtcacgggtcttctgtatcattggattgtgggtcacccgcttcttttccggtcgaaccacagtgcagccttcgtcgctactgctgccgctttctccgggctctgggtcgcaggccgggcgctttctgcgtccagcagcccctttccgcccaggctttttgaaaaggaaggtgcacacctgatccaccgcctttcctggagaaagctgctctgccattttagagtcctgagctccgaaacagccgtggctgcctgggttgcacttggcccctgcacgtcactccacgttgcgcgctccgccgggagtcgaagcaaaagacactgacggaagaggactgcgagagcccgagcgcccgtctctcttgtgccctagcagattccgtcgcttcttccggagccgtacgtggcaccgccccgctcgcgggcggccgcggggcttgctgggaagagaggcgaagccaggtcacctttcaaggacccagaagtagggttttggcctaggtaacggggcagagatgtggttcgagattctccccggactctccgtcatgggcgtgtgcttgttgattccaggactggctactgcgtacatccacaggttcactaacgggggcaaggtaagccggcttcggcccgggggccgactccacgggctgatttccgaaaagggtggtgggcagggagaccgtcagcctgcgaaccctctctccgaggtcggccctctacttgcttccggttgcctagaagccgaggcttgcgaaacgaagcccgatagaaactacatcctgctctagtgaaaaacagcgtttctgggtgtatcagagtgggccttagggcagagtagcgacgcgggggccgggaaggtagattagaaaaggtggctcaagcctgagaatcgctcactgcaacctccgccttctgggttcaagagattctcctggttgggcgcggtggatcacgcctgtaatcccagcactttgggagaccgaggcgagcggatcacctgaggtcgggagttcgataccagcctgaccaacatggagaaaccccgtctctcctaaaaatacaaaattagctgggcgtggtggcgcatgcctgtaatcccagctactcgggaggctgaggcaggagaatcacttgaacccaggaggcggaggttgcgatgagccgagatcgcgccactgcactccagcctgggcaacaagagcgaaactccgtctcaaaaaaaaataaataaagaaagaaattttcctgcttcagcctcccgagtagccgggaccacgcctggctttttttttttttttgtagaggcggggtttcatcatgttggcgaggctggtctcgaacttctgacctcggttgatccacccgccttgatctcccaaagtgctgggattacaggcgtgagccgccgcgaccggccacccttgacttttttattccccactttctcttgcaagcctttaggaatttactgcgagatcttgtttttttacatcaggattcattttcccctcttcctagtccttcacatcatctcaagagtacaggatataaatttatttactttttgattttgttattgttcttcacgtgtgatctacagctgttgtttcttagtgtcccaaaagacaacaactagatatttctttttttttttttttaaaaaaaaaggaaaaaaaattcatgttggttaaaatagtgtaaaaagtcacaggtaccaacttaatcctaaagtttagtggtctgattttatttaggagattctgttctttgtactactaatttgcatttttatttaaacgatgattccatttctctggaatgtcccttttaaaaattgtagtatctatcaattgggtcactcacttttataaactgcaacaataattgtctcttatttgaaggaaaaaagggttgctcattttgggtatcactggagtctgatggaaagagataggcgcatctctggagttgatcgttactatgtgtcaaaggtaagatgccactctgatgccagccttttgccagggttgaggtgggttctggtaatgccttgccaagggtcatacagtgctaatatataactagcattttcttatctactagtgaggttggcatctttttacatatttaatcttttatatttcttttttttttttagtttttcttctgtcatatatttcttattctgtggattgttgcctatatcctttgcctgttccattgtctttttctttttgagctatggttctttatatattctagactttaatttttttgtctattttatatatgacatttttcccagtctgctgtttgtcttttttactttatgatgtttttcatcaggtagttctaaattttgatattcaatgtatcatgttttgttgttctggattctaggtttttatgtctcccgtacaaaggcct

SEQ ID NO: 1564073 - DNA, 4001 bp, Homo sapiens
aatagcaggagagtgaataagtagaatgtgttcatgcaaaaggaaacccagagtattcaggatctctaagtttaaatgtatagcaagttggttccttagaacagatttaattcctaagttttatcagaaaatggcattagtttctttctacaaaaatgaaagtcactcgtaaaaacacaggaacaggcagggaatgcttatgaaatgctcttagctagaaaataatataaaatgtgaatgtctgagctcttgcagtgtccaggatgtgtcacaaaaggtagcacatggagttttgttacatctacaataattttgtactgctgaagttcatcttacttgtttttttgatgcttagcgaaataagcagtttggttttcaaatattagtaccaaacagtgatattgtatgtgtacaacttggaacattccaagcaccatactattcttaacataagtttgattttctccttttcataattctaaaatctgtttaatttaatttgcattaattttcttagaggccaaatttggcaataacaccaattatcaaaattttgtattcatttactgtcagcgcttgccttgattgaaattattcctttttttttttagaccaagtctgataaaaacacacatacctatccacagtgaacaaaatggggttcagaagtttacttcttcattggtttaaaaatctatttacttggaaactgtttttttaaataaataaaaaccagtgattttcagaagtaactcctttaaaaagttaataaattagaagtttctatttacttaagaagccattagtaaatatttctaagggaaatctttattttctttgttaattacagtgttatcctatttctgccatacacttttcaatgggtaatatcacgtttttgcagattcgtttgtatcagtcccgcaaaaagattcaaatcttacaagcatacagtagagtcaagttctcatttctataacattttacacacttataatatgctattatttaagcataatgaaactgttttgcagtttcacaaacttgaaaacatacaatcccttttgcaggagaaaataaatcaaactgagaagtgcaaattaataatgaaattaaattttttaatgtttagaggtaaaggcacagtttattaaaaagcaactcacgatataatgcccactgaggaaacttatattgctaagaaaacatgaaagaaaataggaatcacttcatgaattgctactgtctttggaacaaattaattaaaaatattaaataataataaagtaattacaagttgtgccaggcaagaaaatttaaagtaaaattattttacaaccttgttgccagatcctagaccagttctagatggaaataccattctaagataaacggacattaactctctttgtgaatcaattattacttaccaaaatttgccatctgtatcgtctgattgccagtctctggagcattgtaaatcacaacagcatcagcatttcttctgcccgctgtttgaattttttctgaaaatgtacaattacctctttctatcagcgcaatccagggcttcttagtattactaaactcagtgttgtggtcacaagcttggtagttattgttcttagggatgcctaccactcccatagcattagccactggtgaagctaatccataaacgccacattcacatgtctctattgcagtgtagttgctggtttcattgtaataagtcacagtcacataggcactcattgaaaaagatgctgtaattttaagtaaaaaggtaaaaattacaaggagccaaaaaaaactggacctattctcctggttcattgctcattcatttgagtataaaatttaagatgtttgctgatatttccaactatcagtcaccattgtccactcacgtccctgctgaacagaagtttgaaatttcagttgcacgtaggtaactgatctcacctctagcaacataacctctggatacatcagctctatttcactttagttatctacattcccctttgcttgcccctcctccagctgtacacacaggtaacccttaaccaggactaccttagtaataaataacaccatcaactttattctacatgtcaacttattaggattggatgacttcctgcagtacatttttttttcttcttactgttccaactaatgcactttcataaacatggagtggattggaaagaggaactggactctggggaatcccacgtgacaaggctgaaagttacctctctcagaatatctaaaacactaaactggtttgccaagccctgctgaaatatgctatcaaccagttcagcctggagtaagttaagatccatgagtttaattgctatggcattagtagaatgaattttattgcttttttctcttctaatttctctctctctctctctctctctctctgtgtgtgtgtgtgtgtgtgtgtgtgtgtgtgtgtgtgttttcttagcaggctccccaagggatatcctctgttaccttgtttattcgttggaaaacaaacatatttcagtagctagaattcctttcctttcaagtatagtgccttgcccatggcaggcactcaaatatttgttgattgattgatacctgcaagttgctgcattccattaatttttgtgccccatgtgttatactctaaaaaaggttgttgaaggtttaatttttaacatttacatttttaaatttttagttctcccagatgtatagacaactttatttgtttcattgcttcctttagttcaagctctgtttttattcaggagcacactggacactaagagcattaggacacatacgctacggggtcaactggtctgtgaaaattgctgggatggggagattgcaatgtgtgccaagggctgatgaaggaatagatgaacgaacaagacaaacagagatatcaggagtctgactgggccaagagtcagcaaactagacaaacaggcatcaggcttccagggaagcaaaaagctaccaggtcaaaaggaaggtagggacaatggtagtccaaggtccaagtcaggtaatctggaatcaggaaggtttactagagtcaaggggacaggacaaccgaaaataaaaaaataggagacgttgttgatggaggtggtcaatgaagctgtttcttctccctacttcttgtccgcttttaaacatctgaaatatcagtgttggagtggaccctgcaggtgagaattaacagttcacaccactcagcagagggaaggagttcagggaatcagcagcagaacctgctgaataaatcccagcagatgtataatacaaatatgaaccttgctatcatatcatagctgccaattactcattagcgtaccctcccatagtacctggtactactagcatcatacacctagtaacagcctaataattcatataattgaactgaaaagattaaaggtcttgtgtattagcttatggtcaatttaagagtaaacacaaatagttcattattttgctactagccctatcattttgatgtgtttttaggatcacaataaagcctgtattcaccagagaaaattatcagactaaaaacagaaatgttattattgttattataaatgttgtcaaaaccattagcttagagattgctgatggacagtcttttgtgataaattcaacatcaacattcaacatttaaataattagtaaaatcccagaaatttgatctatccttttctgccaattaaattactccttaaaaaatcttctcatgaaaaactttaaaagcagattaatgagaagttacctaaatccattagaagtcaaattttaaaaaataatatttctttgtttatcttaagatttcttttcattattttgtgtagggattttttcttagttacatgatcatatttatatatttttaaattagtttttcatttaatatctcagtcattatatattttatcttataatctttgtagacaatgctttgttgg

SEQ ID NO: 1564074 - DNA, 4001 bp, Homo sapiens
cattacgccatccagccactcaatacaagtgctctctaggcaggttcagtcataaggttttaagaaaaacagaaaacctccagtagtcaaataagcagcttcttccttccagtgactcccagaaggctaatcctatcagctaacccttactgagagtggatgatgtgctttactgcactaaactctttaaggcattatttcattttatcctgaaggcaaacttgtggataagttttcttattattcattctcatttgactgatgagagaacccagactctaagacttgaaataagttgcccaaggtcacaggactagtaagcaacagagtaggaatttaaaccaagctctgacttgaggcccagctcttaaaaactatgatacactgctattacacgtgtctctttctttttctccatttttttcccctttgtcctttagggtctaggataactatatacataaggtatggatacctaatcacaaatagggaagtttgtggaaggataaccgacggggaaaaatagtaacctcataccatctccaagaatttaagaactacctggactatttttttttccaaagtctaggcctttgctatcctcatgcagaaacctcttctttttcaagaacgttagtcacctgttttgcaactcaataacctaaatcagatttttcagaagcaaacaaaagcactgataccaagtcacttgggacttgagaccactgggcagagaagaacccaagaactaagcaaagtttccaccaaaattgcaatgaggttaacagggcacagtagcacaatctagtatttgatacccaggaaacatggagagaaaaacagggagaggaggggaaaatctgctgccagtctgaggttgttaaaaagcagagtgaggaagagatttccaggtgatctcctcggtcatttaagacccgatgcccaccaccacttaatccaaggctagacacccttgtgaaaaaccaggaaaagggaacgcaaagagctcaaacagtccttgatttgccagcctctgcacccggtttgttttacccttttccaccagagaggcaaatgaaggatttttttttgcccaacacccaggcctggtgaatctcggggaggaccctgccccactccgtggggacagaaagagcacccactttccttcggagcaaggggataggacgaggagggcaatgaggaaaataagagaaactggccatggcagaggtctggaggggtgcaatctagtagctgcactcacccgggtgagacatggggatgacctcattgcgggtcccggggaagttaaagatgacggctccagacgcccctctctcataagccagatggatcttgtctgcgaaggtgcagcccccgccgcgttggatgagggccaaccaagagacttgcacggtgcttccccaaaccgtgggcaccgtgaaattcgtgtgcgggttacaggcgttaagcgccccgggcccgtcgggcggtaccaggaccccagccacaggctccagcggcgagtcctggccgtacacgccctcctcgctcagctcccacaccgtacggttcactcccgtgtgcggaacccgccaggacacgttgaggtacgcggtccacactgcttcagccccccgggaaccgggtgcctgcggactcagggccagcaggaagcaccatgccagcaatctggaaaagccgcagccaccgcggcaggagaccccggccccaggcggcggccccatggcgcgcgcgctccgcagttccctagcgcccctggcacgcgccctcctagcgcttggcaggaccctggtcttgagcaggtgcgcgccaggtggggaaggaatggagtgagactggggagctgcgagctacgtcggagccaggaggcacgtagcgtcagcacacaggttgccgcagatgcagctcctcggagctccagtcttctccgctaccgcggctgccgcgtcgggctctggggctttagcgtgaagctccgcccagccgactgggggtagaggtggctgggagggaggaaaggacactgcgggatccgcctcttaaaagggtaacaggatggatcgatgttagaataggatctgaggctgtgtggctaggtgtgtcgcgtcgttttataaaaaacggacaggcgaggaacgataaagtccgcaaacataaagctttctggcaggattcgagtcggttttgaattgcaagaatacatttttccctcctaacatttgcctaaaggacatttcgggcttacggtgccagaatgtgaagtacagtacttctaaaaagcgcagatccaaagggtctgagttgtagtcaagggaatttgggtagggaaggaatttgagtagaatcaggctatttactgattctctagaggggggaagggcaggaaaagcgcgctgttaccctttcttactgacttcaaatggcacctttctctttccctgctcctaagaagcctcatacatgtgtatttcctcaccgttaccctaggtttcatgtaccgcatcagatgcctcttctaaaactaattttagtcctcacaaaagaatgactgttttcacacacctcagaaccaagcctttcttctgcatttttcacaaacctgacttaccctagcggatgttcctgcgctattcatgaccttaactacataatctttctccatttcccactaactgaaaggagcctgactcgcctaggcgattcactcatggcattattacattacgatttatccttgcttaagtattcaatttttgtctaccctgtcaactattatatttactagatggttaacaaatgagccttgaattaagctgaattaatatacctgctgtctgatagttatgaataacttttgaccttggggaacttccctgtggctcagtttcctcatcatctgtaaaagggggataataattgcacctacctcacagagttttcagatgattaaatgagttaatacatgtaataaagcacttagaacaatgcttagcaatataaaaaacatgttaaaattattaaacaggttcagagacacaattctaaaataatattaaagttttaatttgaggtaatatcagagaaaatgatgttcaagatgttcagtcttagccactttttcagttcaaataaatacagtctactttatgcagctcaacatttgttaaatttctgatcaattactcccctcaatccctggcccagcatttacttaatcaatgttatttacaaagattaagcatggaccaattctgtacttgatactcttatggcttgagagaaacctagaggaaaattaacatcatataccaaacaacacctagaacataaataaatgtgcaattttgtgaaacatatactcttaggtattgaaaaggactttagaggtcaaagtgggtatatgagaccaatagcatggtacccccaaatactgatggtaatctctgagataaaaattacctaggggaaaaatgggtaggaccaaccacctctgagaaatggtacaattccagaaattgtctgattttgctggtgaagagcattcaaaattcaattgatattacctgaatgacagccaactatattgtactttgaagaaacaatgtgttcagaagaaagaaggtattttatagctacaaaaatgaagttcagagagacatttattaatgtttttccattcattattttcttaaatatttgttgtacatctgccataagccatgggctgagcattgtggtgcaaaatcaaataagacatcaactctcctatcaagaagctcataaattagttttgatgagaaggacaagtaaaatggaaagtgcagtatagagtgatatatgtatatagtgtaagcactatgatggagatatgacagggtagtagtggataacagagaagcacctaacccagactgagaagtaaggaaaagcttcccagaggaggttagacctgggctgagtttgagacagtaaac

SEQ ID NO: 1564075 - DNA, 4001 bp, Homo sapiens
aaaaaaaaaggttctctgtaagctcaaaacagtttctacaattgaaagtttattacacactcatttgtggggaaaaagcttagatgttggtgtccaatgttatatttctcaatgcatttacttagccaatgggcaaaagaagaaaaaaaatcacaggacacacacacttatctaaaagaaggattaacatgagaagtcctaactaacctgaatattatgttaataaacattaactgtaaaacaatttattgtgaaacgatgagtcataggcagccaagactactataaataaaaaaggcattttatttagtttagatttagcctgagttcaaaagaaaaaactaaaataaaaatgaaatatgcaactttctctaaggcagacaattcaagctaaaagaacattgttagaaagccaaaggctgaggaaaacaatatcttttaaaaaccgcccatcagataactttaaatggcaggtgcaatcttcttgtgaaatagaaagcatagtactttcttcccctacattataaaatgctactatcgagtatgactaacagagaataaaggtaccatgtgacccaagaagggtgtgtatgagaagtaggggcagaaagacggggctgagaaaagctgcaaaaagctttcaatttcctaactctgactcttagagaccagagcttacctgaatacattctgctggggattggaaatcatgcagaaaggtctgtgattccaaaacgttaatacatttattataaagtaatcttgggtaaagatatgttgccttaagcaaagagttaactgttcataatacccatttgaaaaatctctcattttgtttgggagaaataattgataagtccatcaaagtagtttagtaagcacaaatggagaactatgtagaaagaggaactattatgaaatgtatgaccgagtgtgttttgtgtaagactaatggaggttttcaaaggtttttcgtttctggctatatacaaaaataaaaataagggcgttttcattcatttaaaccagcagtaaaatactgcctggtttatgccgcttattttcaccttacagtcttaatacacattccaagactgatgcgatattcattatttctttcggataactggaagaggagggggagtaaagctgtacattaaacagtccacttggtaattgagaaaattcagcagtgaaatatatcatgaggcaccaaagagatttgccggggagggcagacaaaagagaaaacagccacagaacattaagccccggaagagatgagaatcggtcccatatacgtaactcgacgactggacaaaaccccgcttgacgctgccggtgggtgaaacgaggtgatttgagattcagggcgttctcggctctttccctctctcgaatcgatcatctccaacaggaagtcagagcaaggcagggttcggagtcagagaaagctcccgggggagtctgtctaccacgacaacaaactcctaaggctccttccggagctccacagccctctgggcggcctctctagcgctgtacttcacgtccccgctccccaaaaaagtcgtgcaccccgacttcagctatccgcgttcaagagagtgcggcagcagttgggtcggccccctcagcggtcccgggccgtaagggacctggcggagcggctcagggaggctgagacggcggctacacgactttcattaccttctcgcgctgatcccagctgtactgctttggccgctcctcctcgttctcgggccgcgactccttgtcagccttccgtctcttggagaagaagcagcccatggtcccagcccgcggagctcgttggccagctcactagctcaggcacttcctagagtgtggcgtgaaccctgggaaccccggcctcgcagctctccggacaacgccccgcggaaccgcccaacggtccgcagccttagtttgcccgccaggcccagcaccccttcccctttttcgtcgccctgacgacccagcgcagccaatgaacgctcagcgcctgttgagccaatcaaagcctctcgagcaatcctgcgcggcctatgaagagaggccgacatacccacataccaatccacgcctggctcctgcgacagcccctggcggcggggcgggccggctctggcgcaagcacggacaaccccgcccacagctgtggcacggaccgccctcggccccgcccctcctggaacttggtgggttctctagctggtgggaggccaggctcggtatccgggttttttttgcccctgattcataaatttgcaagttcaaggcgcgggagagatctctagttgaacattagatttatcttatgatgaaagttgtgagggacagaaattcccgctgacacaagaagaccctgaaatttgtatttctaaatcctcttctcccctcatcacccttcctaccgccctctcatcgcctggccagggtcaccccctcaagaattgtaccccataacctcccaatcctcttctgtgctctttctttctttctttctttctttctttctttctttctttctttctttctttctttctttctttttctttcacagggtctcgctatgtcactcaggctgcagtggcacaatcataactcactgcaaccttgcaactttgcaaccttgacttcctgggctcaagcgatcctcctgcctcagcctccttcctgagtagctggaactacaagcaagcaccaccatgcccacctatttttttttttttttacttttgtagaaatggggtcttgctatgtcgcccaggctggtcttgaactcctgggcccaagcgatcatcctgcctcagcctctcaaggtgctgggattacaggcaggacccaccgcaccccaggctgcttctgtgttttcttaagactttcacatatggctctaaaattgcacaagtacttagtaaaatagttaattgtgtattgtttccctatttgaactgtgactttcttgagatcaaaaaggtatatcttttttttttttttttttttttgatggagtttttgctcttgtcgcccaggctggagtgcagcagtgccatctcggctcactgcaacctccgcctcccgggttcaagtgattatcctgcctcagcctccagagtagctgggactgcaggcgcctgccactacgcccggctaatttttgtatttttagtagagacggggtttcaccatgttgggcaggctggtctcgatctcctgacctcaggtgatctgcccgcctcggcctcccaaagtgctgggatgacaggcatgagccaccgcgcctggcctaaaaggtatgtcataaagggcatgcagggccgggcgcggtggctcacggctgtcatcccagcactttgggaggccgaggcggtaggatcatgaggtcaggagatcgagaccatcctgctcaacacagtgaaaccccgtctggtgaaaccccgtctctactaaaaatacaaaaattagccgggcgtagtggcgtgtgcctgtagtcccagctactcgggaggctgaggcaggagaattgcttgaacccaggaggtggaggttgcagtgagccaagatggcgccgctgcactccagcctgggcgacagagggagactctgtctaaaaaaaaaaaaaaaaaaaaaaaccagagccggggggggcgggcacggtggctcacgcctgtaatcccagcactttgggaagccaaggcgggcggatcacaaggtcaggagttcgagaccagcctggccaatatggtgaaacctcatctctactaaaaatacaaaaattaaccgggcatggtggcgggcgcctgtagtcccacctactcgggaggctgaggcaggagaatagcttgaacccagaaggcggaggttgcagtgagccgagatggcgccactccactccagcctgggcgacagagcaagactccgtctcaaaaaaaaaaaaaaaaaaaggcagtggggaggaaagctgaggggaggga

SEQ ID NO: 1564076 - DNA, 4001 bp, Homo sapiens
cctaaaaattacctttttatacataaaacagagcatttagtaaaataaataatacaccagcacatcaaacttacagaaactctggcatccatttaccatacaactacaataaattgtaatttcatccaaataccacatcatatatgaaataatcattgaacttcaccacattttaaaaaatttcaaagataacctggcaaaaatggtttatttaaacacagtataatcttattttaagaaaacataaattcatagtaataagagcaaatcacacataaatgtttgaactgagcattagaattcacaaattagtatcttcagctcatttgaattaatcaaatactaaatactatattgagcaagagataacagtatcattataataagctaaatccaaacacggaaaataagtctaacataaaaacaagcaagactttttttttttttttttttttttttgtcttttcgctggctccctgactgcaactagtttttcttttggaaaaagaagctccaacacaattaaataataaatttctacattttctgtagtttttcttccccgaaaatcatgtttccattagcttgctagtaaatcctacagagttgtcaatttatccatcaccgtctctctctgagcttcaaatacagaaaatccgaaaagttcaaagcagttagaaaagcagcgagttgacaaagaatgccacttgagatttttttttttagtcctacttcctaaaaagtcaacaggtcaaaattactcacagctggatgcaagggtcttcgaaaaatgaaaggatgttttccctgcctcaatcagcagacttaaaatgctcccgatccacagtgggatagatgtggccctcaacggtcagataatcaatcgcttccttgatggccttgacgctaaggtcgcagagctgagcccggagctcatggatgctcttcccttcctgatgaggacactcatgaatcaaacgcagcacttcgtcctggatgaaattgcggtgactctcatcgttatccccagcatcattcacttctgatggagacacaggcacactttctacagtggtatcacgacgggctttatccagcatcatgtgtgcattgaccgtttccagaatatgcacggtgaactcgttcatgtcctctaggacatgaattttcaatacctcaaggctctttgttcccgtgggacatttgaggataccaaacactttgacatatactccgactgacaatggagtcacctgcttgactttctctctaccaaaccactgtcgggcctcgattggtttcgcggtcatatcatcaattttgtaacaaatgtgatttgaagccttctctgcccctctgattacccccacgatggagacctgggaaactataattcccctaaccttgaacacagggtcaaacacagtagagctgagaagctggttcacattacacggtacaacgtcctgaattcggaccttaggtctttgggtcttaatagcaggagttgcatctctctcacacagttggtcactgcctccactcgctccatcagcagcagaaatgctgccatagctcccaaacccactcttactcatcttcaagacagctcaggctgaggagaaggtgggctttggctcgtctggggctccacggacggctttgagttctccacagaaggcttcgagctctccacagaaggcttcgagctgtccgaaaggctacgattgaatgctgggaggctgaggacgtgacaagcgtcacgctacctgtggaccaatcaactaccagaatgcatctgcttccagccagtcagggtcggccaccttctcacctgatcgcataatccttccctgtgtgtcagtggttgctacattctaaaagtcccacacgaggggagccctgttgcttagctggtcaaagcgcctatctattaaaagtcccacgtgtaatttcaagcaagcctttcccaacatctctataaaaatgcatttttactagcccccctctttatttcttaatgctgcaacttctacaattacttttaaaagactcatttattcattcattcaaacaacaatgcaacagaaattttaggagcacaaagtgcttggcaaaacggtagagtgctgtacgttacgtgcaggggggaaaaatgcaccaccgtagttactgttctcaagaactcacgtcccctgttcattcaaaccattaaaactaggagcatcaggccgggcgcagtggctcacgcctgtaatcccagaactttgggaggctgaggcaggttgattacttgaggtcaggagttcgagactagcctgccaacgtggtgaaatcccgtctctactaaaaatactaaaattagccaggcgtggtggtgcaggcttgtaatcccagctactcgggaggctgaggcaggagaatcgcttgaacccaggaggcagaggttgcagtgaaccgagacagcaccactgcactccagcctcggtgacaagaacaaaactccgtctcaaaaaaaaaaacaaaaaacaaaaaacaaaaaacctaggagcattttggaagaaatggcaagacaatcgtctttcaacgattatcatactctaagataagtcacatcttaacactggcttttaaaaaattttttgttgttttaaaattgtaattttctgggcattttgccaagtgcactataaataagtaattaatatatttcaatttatacataaatccaaactgaatgactgagctctaaattattttcaaggctctgtggacaggacagaaaagtacaagacttagacctattatatattaggaaaaacatggataaaatcacagtaagttttttatatactcttatggagtaaattctgaacttaagattctagtagttacataaatagatcccggatttttgtttttttgttttttttttttttttttttttttggagacagggtctcgctctgtctcccaggttggagtgcagtggcgggatatgggctcactgcaacctccacctcccgggctgaggtgatcctcccacctcagcctcgtgaatacctgggaccacaggcgcacatcaccacacctggctgacttttttgtatttttggtagagacggggtttcaccatgttggccaggctggtctcgaactcctggactcaagcgatccacttgcctcagccccctgaagtgcagggattataggtgtgagcccccacgcccggccaagaatgttttgatattttattgaaattttatttttctttataaaacattttattttgggtgttattgatttaaaggcttaataaaggaaccacagttactggaatccaccattggcaagtaacctaataacaatcctttgtagttagttaatagcctaaattagtagagttttgagaagtttattaatgctctcacttcttttactggttaaaataattcactttttgctatctcaaaattacagaaatatgtgaagagtatatctaaaacttatagaagaacataaagttatatatacctttcaagttttaaaagaataaaatcggccgggcgcggtggctcacacctgtaatcccagcactttagaagaccaaggcaggtggatcacgagatcaagagttcgagaccagcctggccaatatggtgaaaccccttccctactaaaaatacaaacatcagccaggcatgatggtgcgtgcctgtagtcccagctactcaggaggctgaggtagaagaattgcttgaacctgggaggcagaggttgcagtgagccaagatcgtgccactgcactccagcctgggcaacagagcaagactctgtctcacaaaaaaaaaaaagaataaaatcatggagcaaatatacttaatttgctttataaataaatatataataattatctgatcccacaaatagatttccatgtaaatgtggatatttaacttctggctctatgttaacatttgtattcttaaaattgtacatta

SEQ ID NO: 1564077 - DNA, 4001 bp, Homo sapiens
ttataaaatgaaaagatcctctcaacacagctactcaggaagtttctaattctcatcttactcatgcactatagttagttatagagatgtctttttctctttccagaaacagtacatgggaaaggacggtttatctttccccccaaaacatcatcacaaaatgccacggtcctaggagattgggagaggagtacatggggatgttgagattttaacattcttacatcaagtcattacctgatctgagtagtattcacaaactgttgtggcacagcgtcattttgaagaaagactaaaaacccctaccatttcccaataaccatttaaacacacacatacaccaaatagtaggccaggtccagcttttggggaaatcccaaggtgggtgatcacacataaactaattcgtaccagaaaggaaaacatagcgaatataagtattaataataaatattaatacgcaagagactagccactgtggacaactttttgagaaccactgtgaggcatctcagttccaactaataattgagttgggagactaggatctagaacagactctgagtttccccagaatgaattactttaacattttaactgttttgtcttggctcccctggcttccctgataccctcatcccaagccaaggtttggtggctctgctctggccctgtaatatctactgtcaatttatatggtcattttgtttactttcctgtatgtctcactaaattgtgaactgcaggccaggaatgtcagttccggccaggagcatggaagaaaacatacatatttcagtgaaggtatgattctgctcaaacccagtgttttttcaaaatggtcgtgacctattagtgggccagaaaatcaattcagtggatcacgatcagcattttaaaagaatgcattatcaaaaaggtgtgtgtggaatctaagtggatagaacaaggactgcttcaccagacatctatttctgttacacggtatatatggagtatcgggtcacaatgtcaaaagtatttctaactatggagctcaggaaaaaaaaggctaaaaaacactcgctaaagggtccctcttctccctctttgtccaatttatttcctgtatccccttttaccccacagccctgatcactcactctttactgcattcaatacataaccgggagctcaggacctccaaagtgcacaagtctggagtccgcactttggggagtttacagaaagtgtccctccctggccgggcgcggtggctcacgactgtaatcccagcaatttgggaggccgaggtgggctgatcacctgaggtcgggagttcgagatcagcctgaccaacatggaggaaccccgtctctactaaaaatataaaattagccgggcgtggtggcgcatgcctgtaatcgcagctactcggaggctaaggcaggagaatcgcctgaacccgggatgcggaggttgcggtgagccgagattgcgccattgcactccagcctgggcaacaagagtgaaactccgtctcataaaaaaaaaaaaaaagtgtccctgccttcaagaagctcatcaagagcttatttaaaaagcatacgaaagacaggcaccctctttcccgttctcccccatcctgttcttcccgtccggtcctctgccctcagtcattcgcgggagcgcaaccagcgatcccgccccagtccggctgccaagcctggggcctgtccccctacagggccgatccggaggcggggcccggccgcccgcggaccctccctcccggccttccgccaccggcgcgggcgcaactcaccgggcatcagctcttccggctccctcatgccacgggcagtacgggcagcctgcgccggggccaggaggctgtagaggacggtttggtcggggctaaagcagctactccgcaccgacgcgggccgcgaaagcccccaagttccgcatggcgaaactccggagatcaactacaaccgcgctcccggaagtcaacaaacagccgctacgggcaacgggggcggagcttgggaatgcaaggcgggacaggcgccgttggggaggggaacggaggccgggtggctggtaaggggcaggctcaggcacagcggaggggcagtagagaccacgcgccctctggcggcctggagcagagaggcggccacgccgcgcagtgatgctgtggagtccgcgcccttgtgccgttggaggtccaggcgccgcagggaccctgcccatgagtggcaaacgtcacaaatcccatactccgtgacataagcaagcatcgacacacaattatgacactactagtaatagtgaccagctggaacattaaaggaggtaagcactctgctaaagatatccccagcatctaaaccaacatctggcctatactgaatgctcattacgtatttattggacaaatgagtactattacaaccctgtaaagtggttaatgttacctctgtttaagcatgtgggcagctagtccagctagtccagcctgtagtcaacaaaagtaaaagctgaggtgtatatggtccactactcacagaacatacacaaaggggtagcccaacatcattgctctagaatttgctcagcgatgttatatgatgcagggtttcccatgcatcaacatttggctatcatgaaataaagaagcaaaaagccatcttccagaatgagcagatttacgtacgtttggtagttgtggacatgggccctagaatcagacacaattggattcagggatccctgaattactcttgtgtgttaccaacactttctcaggaagtttgcattaacatgaagaggggacattaaactattagttacacaaataatcatttacttacaaagcaaagtggaggttactaaggaagtggttaacaagaagcgttgacctggtgtaggaggttaagaaaggcttatctgaagaaagaacattaaatctaagaactggagaaagataagccaggagggggagagagctcttggcagagagtaaattgtgtataaaggtttgtaaggagcttgactctttccaggaacaccaagaggcgaggctggttcctagcgaggtggcaaggtcttgggcctattaaggatctgagattttatcctaaagacaatgtgaaaccactgagaagttttaggcagtagaacaacaggacaggatcagttatgtgtgtccctgaaatcattctgcctggtctagatgctttgtagagaataaactggagcagtgagaagggttcagaggctattgcagaatttcagacatgtggtcaggatggcttggagtacagttcattggtgccagagaggagcaggcagatttgaaaatattttaggtcttagaatcaacaggaaatggtttctgactattgactcctagacagtgctggactaccaaatagttcttagagcaacagcaaagatagggccctaaattattttgaaaaggatttgatattcatttttagagtatcataattgttactacgggcaaatgagaatttttaaagatttactttttaatatgcagtcatttgtttttatttcaaaatacagtaaggcacattttggtgctaagcatcccagaagatattgatgcagccctactccaaggtttccaacataagcaaatagcaggaggggggcaccatttactgagatggggaacactgaggaaagagctggcgacattggagttaggtaaatggggcaagaagagcataatgagttcatccttgagcacactaagacatcaaattggaggtgctgagcaggtaattggtgagcagaagccccagaaggaggcacgtatttgaggaatgactgggtctatatagtgaaagcaggcttgagatacttgcaacactggaaagtgactgtagaattgaggcagtagaatagggtcgggaggcaggaaagctaaggccaattcatgctgacttcctagaactaaatcaaaaggaaaccccaactttccatac

SEQ ID NO: 1564078 - DNA, 4001 bp, Homo sapiens
cagctacctgctggcaagatggttgtcattcagctaaaagcaagaagagctactcccatcaccagtgtttcccctaacctgtggggaagagcttgctaagacttactcatgctttgtttgtatctgcaggaaggggtcctgagtgaccactgaaagtcacttgccagcctggcttttctagtagccatagtggctgagtcactggggccacctctatgctctgataaaataatgcaagcctaataatgtagagactccaactgccttaaaaggcccagaccaagctcacctgtcagccccagcacaggacaacatcttgttgatgcggatgacgtggaaggggtggagccgcacccggatatggaagccatctttgccacaactttttaccatgtacttattggcacaaattcgggcagcctccagggctaggtagggagaagaaaagcagcaaagtgagagaagataatagagaaacattcaccacgactatctccagctcaggggaactgtgttggctgagttttgtaaggctcatgtttcatcaactcccaattccagtgcagtgtatgtgggtggggttgagggagcacggaggaaggactggggggtgacgaacaaagaatcctgccttaccttcagaggacagctgctcatattcatctgacaccatgtggccacaaagcggaaactcatccacttttgcctttttccgccccaggtcaaaaatgcgaatcttggcatctaaaaggattgggtaagtgtgcagggggtgtcacagacggacgcggagtccgcagagccaaccagtgcaggggctcttccactacttaccagggacacctcggcagaagcgagactttgggtacggcttgttcttacaataccggtaactgcaggggagtgaaaaaacacaggttaggtgaggttcacagaaagcccaacaggcactttgcccctcaaggaacaacccaaacgagggacgggaaaagggtggggaatgcacgtccacttctaaaccgtttccattcggggaaataaactacaaagcaacagttggctgctgcaacacagacaacacccaagactagaaacaacagacaccatcttccgttactttgtcttacgcttcctataaacactttgcaacaaactttcctagttaaaaattctctcttcaagacactgcgtactacaaaatcgccgcattatcattgcacagctcaggtcacccaatttaagactttcgggcacgtggcactaaatccacctccaagccgagtggaaatgcgtctggcgccccctgtaggacacaggaggcggccgcacccgtttttcccggactgcccttcacgtccgacaacgcacgcggcacgtcgcccggaaataagacagagaacgcacacaaaggccccaagagcgtatctagcgcccgaaaatgcggtgagcttgcaggacacaggcagagatacgagggaaccgtcgcttccacaccgacacgggaacgaaggaacagacagtaatattgcagactaaaaaatagccgggaggtgtaaaacatagggtcagttcccaagacagggccgccgcacgggggaggctccaccccacaattgttttcagcggccataggcacttctttccccgcccgtttcccagcagtgaaagtacacggattcaagactcaccaacgggcggggcggcggcccatggcgacaccaggatcttcagtggctgcaacgaaaaagagagagtcggaacggaagacgagaacagacctaaaaggtgtgagaaccagcaacggcaccgcaagagacgacaactgcgcttactcaccacaccgaagggaaagaggcgctcctccgcctgcgcatggcttatataggcggtctgtctgcgcgcgtaagaaccatagagtcctgtcgaagacgggtggacgctctgtcagacgtcatgaccatagacgcagccgctcttggcgcttgcgcccgggcgtagcccagcacatgcgcagatcagagaggtgaccgggtaccagggccgcgggcggccagctgacgaatggggcttcgccacatggtcgcgagaagcccgcttccggctggccatcttgggcgtagaactcttgccctaggctttgccgttaactgtgacagacgtatatttctgagagtggaaaaaaggaaagtaccctaggtgggcctcccggcgaccgcgagagtgtccctgagcttgcacgggtctcggacacgcgctccgtgcctccttctaggctagaggccccggcggtgaagcgccatacggggatctgggcccgcgttcctttgtcaacccgggaggccggagggggagacccattcccctaccggagaggctggaccaggccttgctgggagccatgccccgtatccccgtttcctggagacccagggttcgcacattgccgcggggaagaggtcgaggagaaatctccacggagactcatggcctgggaaaccccggggcatctctagccccgctccgcccaccctgacccgcaccgtcccgaccagctgcgtctcgggcgccgcctcccatgagccgctctcgcctgggcaccgccccacctcgcccttcccactccactgtgctcaagagtccctccgggtgcgtctgggggtcgtggggaagcagggccgcccccacccgcccacggggcagcatccggggagaggtgcgcagagcaggcgggcgtcctgggggaagtggcatctggaggtatctgtccaccattctgcaggtggggcgcggtggggtaacaaagtcttcccgtcctttgacaggaaggacgggaggaaatcctgctcgagcgcacctgttttccaggatgatatgtcgcttttataaatggctgcaggtccctttgagaaaagcttgggacgatttctggggtgcacttgcagcagtggtgcaaggtccttcccaggggaacctagcctccctttccatcatgggactctggatgccggcggtgacttaggtctggaaactgggttcgaggctgtaacaccactggggcagtacaagtcaggaattgcggcggagtgccgtggctcacgcctgtgatctcagcactttgaggggcggaggtgggcggatcacttgagcccaggaatttgagacctggacaacatggcgaaaaaccgcctctacaaaaattaaaaactaaaaattggctgggcgcagtggctcacgcctgtaattccagcactttgggaggccgaggcgggcggatcatgaggtcagcagatcgagaccagcctggccaacatggtgaaaccccgtctctactaaaaatacaaaaattagctgggcatgctggctggtgcctgtaatcccagctgcttcggaggctgaggcaggagaatcgcttgaacccgggaggcggaggttgcagtgagccgagaccacgccattgcactccagcctgggtgacagagcgagactccgtctcagaaaaaaaaaaaaaaaaaaaaaaatatatatatatatatatatttaaaaattagccaggcgtggcggcacactctaatcccagctgaggtgggaggatcgcttgagctcaggacgcagagattgcagtgagctgagatcacaccactgtactccagcctgggcgacagagcaagactgtctcaaaaaaattcgtgtatggccgggcgctgtggctcacgcctgtaatccgagcgctttgggaggccgaggcgggcggattacctgaggtcaggagttcaaggccaacctggccaacatggtgaaaccctgtctactaaaaatacaaaaatgagccgggtgtggtggcacacacctgtaatactagctacttgggaggctgaggcaggagaattgcttgagcccggaagacagaggttgcagtgagccgagatcatgccactgcactccagcctagtctacagagagaaactatctcagaaaaaaaaaaaaaaatctgcctacagggc

SEQ ID NO: 1564079 - DNA, 4001 bp, Homo sapiens
cacccgcctcggctttccaaagtgctaggcacaagccaccgtgcctggccgcgtataggtacattttctttatccattcatcccgatggacactaaggttgcttctaaatcttagctattataaacagtgctacaacaaacataggagtgcagatatctctttgatataccgattttcttctgggtatatacccagcagtgggattgttggatcatatggtagctcaacttttaaatactcaatttcctaataagcttgcccctttagccagagttctgctgctgctagtttgcagttcttaataggccaaaacctagttagaacctctgtcttctaaacaagttatccgaatgtgaaaaggtataaaaaaagcattctttttgccaccctgagatcaaaccacttactgcatccaaatgagcactaaagtcattccttaatactttctggagctaaactgcacaagaagcaaagtgccaaaagaaatgctgtgttggagagaatgctccgttccaatcatcgtgctaattactttaagagttagccaaatcacctaaggtttgagagtaaacagaaactcgctcagcctgagaatacagaattcaggaggctagcagaaaggcctaaatggctattctataagagttttaagacttcacgagaacaggtagttgactgcagatttctgtgatgagaaacaacagaacaattcttagtgcaaccaacaagcgaggattcagacatattgacagataaggaacaaggcaaatgaaaggatttaccagtgtactcacacttcagttcttaggaaagcagggcacattcctcaattttttgcctcttcagaagggaaaggataaaaaatcgtaaacactgaaatagtgcagtattgtggactagtcagacatgagttgcattcccagctccatcacctactagatatatcagtgcagtgaaaacttcgctaaactaacgctatacctatatcatgaagtgtgtggactagagacaagtgcatatccttacggcaattaactgggaaacgtcaaatagtaactaccactcacctttttccggaaaatcggcttagtttgcccaccatagccactctgcttcctgtcataacgccgctttcctgggaaaacgaattggtatttgttataaaatactgaagatcagcaagtaagtcttacaggttttatcttaatttcgcagcagaaatattaacgctcaagccaggcgtggagggagagagacccggactcgtatgttattctacaacacaaatgtcacattaacaccaaattatgcggaatccatcttaccctgggcgtacagagaatccttgcccttcttgtactgtgtcactttatggggttggtgcttgccacacttcttacagaaagtccggcgggttttagggacgttaacctagtaaagaaacagttcagaacgtgcaatgttatttgaccacaatggcacaacgccctaccttacccagctaaagctgaggcactccaggaggactcctcattacttgctacctctgactacagggtgggccagccccatgtgcttcaagcagagcttcctccctccgtcgagccccaaagagggaagagacctcattaactccacccccggctaactctacctctttgaacccatcacttcaattcctggccccgtagcccggtccctttagggttgatcccggcaagattgggttgctctgatatatcgagtccacacaggagcctggacccatcccggcatagcacgggcgacgaagggggggaaagattaagctggatgttactcggcccccaccagcaagtcctaccatgcttgcgtgagcgctatcggcgcggaaagaaagaaaccgcgaggcaaacggaagtatataggaggttcccgatcgcacttcctcatgggagtcggtaggagcaatcatagagtgtaaggctcagcgcagcgccctcgggcggctgagaggactcagttcggagccgcgggcgggagcttaaggaaggactccgcctaaagggtggtccactcaccccgacttcctcccgccccgcagctttcaacgtttcgtcactttatctcttttggtggactctgctacgtagtggcgttcagtgaagggagcagtgtttttcccagatcctctggcctccccgtccccgagggaagccaggactagggtcgaatgaaggggtcctccacctccacgttccattcctgttccacctcaaggtcactgggaacacctttcgcagcaaactgctaattcaatgaagacctggagggagccaattgttccagttcatctatcacatggccagttggtccattcaacaaatggttattggatgcccattatgtggcaggcactgttccgggggagaggtacagtaatctaataggcttataaatgtgcaattatgaactaagtactttgaagaaaaggaacaatgattggcattaaagcagcacccttctgttgagggagtaagtcagcagctctaggttctgaaaagtgacaatgaaattgtttggctcctgtaatagcaatcatcaagcctagaagtagaaagtacctagcggctcttcccttccttgcaaacctggcagaaggcatatactaggtctcaagagagtccagcatagaaagacttcagggtgctaaacattttaaatagattgtgtcatacaattctcacaataattctaggagacaggtggtactattattctcattttacagattaagaaattgaggctgtaggatgttaaacgatttgcccaatgtcaacggtatttagtgaatctaggatacaaacccaagtagactgactctagagcccgcgttcctttaacattataaaatattgctgttgtggcctggtaattataatagctaaaaaaattatggcgcacttactatatgccaggcattctcctaaccaccttacatactaccccttttaatcctgacagcaaccccaggaggtatataccagtattagtatttaacaggtgaggaaactgaggcacaagagatgttaagtttacttacctgaagtcacacaggttgttatttttttgtggagctggaatttgatcctaggtagtctaacactatagccttgcacttaaccactacatcatacaaaggaagcaggggcatctgcagtgtagaggatggtgaggagacagaattgggctgagacacaggaggaggtggcagtggaataggggctgaagaaccgtgagagtctggggtatcttgcttgcacaaccctccaggaacacgcgtgggacctgagctgacactctgatcacccccttttttgttgggtggtctctgggaatgagataataaatatattaccactacctgctacatttcctgaaaatttctttgccaaacttccagcattttctttttctttccagattcttaagcaatctcactggcctttaggggtttatgttagtaacatggaaatatgaagaccgtgaacatggcccctcttcatttaatcaaccttagttctttctatcatatctggtgttatgtggctttgtgggggttttgcttgtttttgtttacttaaaaatatttaattgacaaaaattgtttatattcaaggtgtacaacatgatgatttgatatgtgtatacactgtgtaatgattaccacagtcaaattgattaacacatctatcatccatcaccatccatagttaccatgggggtggtgaggacacttaaaatctgctctcttatcaaatttcaataatacagtattattaactatggtcactatattgcacattagatccccagagcttatacatcctataagtgaaagtttgtacaccaatgctgacaccgaggtgggaggatcgcttgagctgttctctgttttggacatgctcctgctcattaatttcccctaagacgaggcactcagaactgaatgcaggactct

SEQ ID NO: 1564080 - DNA, 4001 bp, Homo sapiens; identical to SEQ ID NO: 1564079

SEQ ID NO: 1564081 - DNA, 4001 bp, Homo sapiens
ctcagactgaagatgaccaggaaattaataagtattggagaattatctgcccataagcccagatgtgggctggatgcagtgcagaaacaaaggaagtacgtttttaaaaacgaatttgagaatgctgtcaaagggtggattggattgcatgcaattttaatcatgtatttatactcaaaaagtaaccctggccagacacagtggctcttacatttagcaaaatacaagcagtatgatggaggtcttacctgattttatttccagttttcatccgaatccactggggaatgggacgattttgcttttgtttcttggccaggaatcgcttaatcctgaaagtcttgtgagaagactgggaagaaaatgcaatcaatttagacaatattagagcctgcccgaatgattcaaagtcaagaactccttcaaaccaacatttgagtgcttaacacataccccagccccaaaatcttctcaatgctaagccatcaagccaagcaagtctctgaccctcacaacttctctgggggcagataccacagtttccatcgttcagataaaataagtggaatccggttaagaaacatgcacaaaatcagagcatcaatgtgcagaaccaggattcaaacccaggtcctttctgctccacagccagaggctacctttcaatttaccctgtggtcccccaaggactcagacgaccacactgggaatggctagggaatctggcttcctgggaagaacacagctttgagtcaaacagaaccacctacctaccatttgcaagtcaacgaatctcagtgctctactttgtaaaacaggggtacgtacttttcaagtgttattgggagggtaattaagacttagggaaagtccctgacattcagaagatctaacctactcaccatttcggtattaatcctaactctatctctactgctaaatttcactggctaaaaaaataaacttttaaatttaaaaataaatgaaatgtcacttttccaaggatgactgtctcaatttctagttgcatcttttggctttcatctaaggccaaccccaatactcccccaaatctacagaataatcttgcaaaattggcacggatgcaggtttaatgcctggccaacctggacgaacatacccttgcataataatgggagccaatacaaagaaggcaaagattacaccccgtcccccatccacagtagcagttgtaaattttgtcaagtaataaattacttgacaagtaataaaataccagtacttatcgcctccatatctagaaatcaacattttacatttcccagtaaagagtgactggttcgctgctgccatttactaagaaggccagaatgacacacaggttcgcaaaacaccccttgttctaggcgcttccacggggtgacgctcaagtctctgaataaacgtcctctaaacaaaagtcctgggatctaaaaatgcggttcgcttctccacgccaagctaaacccttttcgaaaaccagtagcccacaataccctcctgattaccctccacgttgcgcatgccacgggcagcccacagtcaggccacgatttcgggggtggctgccacctcccaccccccgcctccagaacgagttcgctacaagcgaagggaaaccggaatccctgcccgactcggcagcggccgggcaaagaaagagcccccttgaatccgcggccgcagcgcagcccgtccctctccaggttgctcgctggctcactagcttccctccaggccacgaaagacaacagtggccgaactggatattttcttgaaaaagcctttaaaaggctcccgcccctcaacgctccgcgcggcccaggcatttcctggcagcggcctcgggttttgggaagccaccccggggccgatgggggccgatggacttaccatggcgagcagcggagtcaagaacacaccacgatggcggagaaaggaagaggagggaagctggcggaagaacgagcttagaaggcgcttccgatgggcggagtttaggaggtgacgctatgcaccgaccgcctcttctagtgccttctctgtctagcggtgcgctcccgtggcgccgtgggaaagcgcgctggtttctgccaaatgcagttagctttgcttcgcttccctaagtgcgttcccccaggggcccggcagtgtgctaggggcaccctgcttcgtaagtgaggcagacagcccgtgataaatgccaaagtagaagcccctccgaaaaattaaggagccgattgggcgggactaaccctaagggagggcaggggaagcgaccgtcacctccgggcgccggggactcggaacgccgggtcggagctcggcaggcggagagtaagtgccattttcccagagggttacgagtcatttcggcctggctgggaggtgtgggaagggacagtcgtgtcggaggaagccggagaagttggagggggttggaccacgtggacgcttatgtaagcctaggggttttcgactaggcggaaggttgccaatcaaagttttcaactcagaaagttagggacagaacctcttccttggctgctagaagtccagcctgacattgtagcccgcctttggcaagatgtacaataattaataacatgcgtttgggatgctagtgttccccattttcatccttttccccatttaaaagcaaaaacctttcctttttgatgagtaaataaaataaacataaaaataagctgggcgtggtggctcacgcttgtaatcccagcactttgggaggcctaggcgggcggattacttgaaacgaggagttcgagaccagcctggccaacatggtgaaaccccgtccctactaaaaatacaaaaaaactaaccaggcgtggtggcgggcgcctgtaatctcagctactgcgggggctgagacaagagaatctcttgaaccctgaaggcggaggttgcagcgagccgagattgcgccactgcactccagcctgggcaacaagagcaaaactccatctcaaaaaagaaaaagtaaataaataaacgcaaaaacctccatgtatatttgcagtcacctcaagcatttttacaccaacggattacagcaagggtttttaacctggagtccacaagagtccatgtatagaattcagaggatcccatgaacttgaatgggaaaatacaactttattttcaccaaatttaatgaaatgtaatgctttctttatttaggaatgtaggcaacagaccacagtggcattagcagtactcgtgacttggtcactaatagaaaccatagatggcttcatgttacattacagttgatgcagatgtctccatatattatttacacactccctttaaattacattagttataagttcacaaatagaactatgttaagaagcccatgtattactatagcacatatttcctttttttttttttcaagactgagtctccctttattgcccaggctagagtgcaatggcacaatcttggctcactgcaacctccgcctcccgggttcaagtgattctcatgcctcagcctcccgagtagctgggactacaggcacgcactaccacacccagctaatttttgtatttttagtagagacggagtttcgccatgttggctaagccggtctcgaactcctgacctcaagtaatccgcccgcctcggcctcccaaagtgctgggattactggagtgcgctaccgtgcccggcctaaagtcacattctgaggtcctggggattagggcttcaacacatgaattttgggggaacataatttagctcatgacaccaccagtcaccttctaaggccgaattcaaatgctgtctcttccccttagctggaaatcatcaccccttcaacactgttgtaatagtttatttgtacctttcttatggctcctagcactatctgttctgttgcaatgcaaaaggatgaaagtaacagtggctgctgcttatggggcttgatagttactatgtagctgcat

SEQ ID NO: 1564082 - DNA, 4001 bp, Homo sapiens
atcacggccagatcttcaatatttcaaaaccccatgactgcatgtaaaatttaaaagtgaatcgaaatttagttttgaaaagcgtttcatgattatttgcatgttttttatttaagtaaaaaacagagggaaggtcaggctttgtttctgagacttgacagattacaaaggttagaaaaatgatcaagacagtatttggataccatagggctgccatcaatatgcgtctccagagtatttaaaacttcttacccatgaatccagcagggtaggttatatcagttcggaccttgccatcgattttaatgaaccgctgcatgcaaatcttctttacttcatctcctgtcagggcatacttaagtctgttcctcaggaaaatgatgagggggagacactctctcaacttgtggggaccggtggatggacgaggagcctgtaacgttaaaaatgataatcactgttgggattcactaaagcactcaaacctacctcctagtccaccagatccactaactgaacaccaagaccgtccatattacacccaacttggacttttacacaggaggtgtaaaaagcatccaaaactatttcataccttaaagttttatagcatcttccctgtcagaggaccaggatcattaagaacatgaatcctgagtccatgtaaatgtactatgtggtatgtggaataaatgaggcacaaaaatattaaatcgattggaagtggaggacagctagatagtatagctccttcaagggcagaggaagccaagaatagatattcctcccctagcctggtccccaaatgagtcctgggagacacttaaaaacagtggccacggaaatatttatataagatacttacaaacacaccggtcaatttatccagcatccaatgctttggagctgccacccgcttcagatgcttcttgggaccacgagcctgaaagttttagattgcaatgctgttaatcaggtttcagaacagcttataaaacctagtgtgaaactaaactcttagtttagtttcatcttcagcaaaatgtggacaatattaaagtatagtgttccgataaaacagaaacaaacacagttatttaacaaacaccgtgagatccataagctgcaacaagccttcttattgtaacagagaatattcttggttactatgtttcagaacgtttactgattactatctttcagaaccttgctaaagtgtttccatgttactgtttgaaactgtatctgcttagaggttagggtctttcaagaacaccatactagtgaaacgcacagcaacagaaatgagccaggagtctacctgtgtttctaaagttttcacaatttattaccgtctgtttttgacacgtatggaacaagattctgacatccgcacaaacacatgtgctgctccttcgtacactaaagccaaaagctgacaccaattttactttaaaaagagtaaggaagcctttttaatgctgtgtccagatgcttaccggccacgtatggtaaagtcaggccgtgccaaaaaggcaatgacaaagaaaacctttctccgccgggcacccccagcgcccaccaacctcgggctcgcagtctgagctcctggcccagccgcggctccggcccgggaggaaaagcagcttctcccgggatcaggacgtatggccgggtcagaaaccgaggccttcccaacagcagcaccagatctgcgcctccccaaccctaggccagcgttcgcccttcgccctggagcccgtcccggcctaccacggaggccgtgatcccttcgcctctgcccggccatccccagtaggaatcccgaaacctcgggcagccccggccgggggaggatggaggcggatacgtcctaagagctcgctaactaaacggcttaccatggctgcgttaggcaaggaaagaggacctccgtcttccggtgcgcgtagaaattggggctggagactgcgcgcgccggattttcagctgctccgcccagctcagccctttgctggcgcgccgggactctttcttgccatctgctggtgggaggtcagaagtcccgagttgaggaaccgccgcggaaagagggtgtctcctaagggcgatttcctccctcccctttttccgcccttcctcctcccatatttgctgagcgcctcttgtgtgccttattctgtgctaggtgctgggaatacaaagatgagctacacaacatccctggcctcaaggagagttcaaagtgagcttacttccagtctcacgtacagatgattctacgcctgtaatcccagcactttgggaggccgaggcgggcggatcatgaggtcaggagatcgagaccatcctggctaacacagtgaaaccccgtctatactaaaaaaaaatacaaaaaaattagccgggcatagtggcgggcgcctgtagtcccagctactcgggaagctgaggcaggagaatggcgtgaaccccggaggtggagcttgcagtgagccgagatcgcgccactgcactccagcctgggcgacagagcgagactccgtctcaaaaacaaaacaaaacaaaacaaaacaaagaacttgtatataatcaatagaatacattttaataaatatttaatgttatttcttaaacgtattttgtctgtcccttttttgtgttcccttgagccagccaggcagcccatactgagttgggaagagccaacaacgtttttaaccccctcttgcttctctgcttgaactctgacatcctcccccttgcttcctgtacaacgcatttggcacttatagagactcagggaggagagaggatattagaaatcgtctggttatatctaactaaaatgtagatctgatcctgcttcgaaactgcccttggccctctgtttcctgccgtaagggagcaggtctgaactttatctggctccattgctctctctccccaatcccaaacttcaaagctcaagccccaccaagctagtttgttccgagggagtcagctctttttgtttgtttgtttgggagacagggtctcactctgtcacccaggctgtagtgcatggctcactgcagcctcgacagacagcccgggctcaagcgatcctctcacttcagcccccacgagtagctgggacaacaggcgcacgccactgcacccaactaattttttgtagttttatttttttgtagagacggggtttcgccatgttacctaggctggtctcaaactcctggactcaagcgatccgcccgcctcgacctcccaaagtgctgggattacaggcctgagccactgcgcctggctagagtcagctctttcaagactgcttgtggactcgattccttagcttggaactgccacaaacagccaaacccccttcctgggtaccacctaatcccacacctcagccttggaaatgcacagttcaagtccctctggttctgtgggctcgtggtcccctcagtcagggtaaatccctcattcttgccccagaggcttgtgttcaaacttggtgagggcacacagcacattaggtagcaaggacaaatttagttacctggcctccaccaaactgagcacctccaggatggagcctgccctaattcatctgggcaggccccttgccactgaacagagagctcggcactgtgtccagcacttgataaatacttgttgaatgaataaacggagtcagcatcccacttattgtgccaagtcctactgtactatccctgagagcatccagcctgtgcctgaattcttcccaccatgagatcaagctcctaactcatgaggttccatttcacaagtctctatctgtaccatccactttacccctcagcagtctgcagaggagcaagagagggaaacattgttggctcttctcaagcagacagtattaaccaagcagacagtattaactaagagggcaggaactcctccttgtctaaaactgggatacaatccacaataaagcatgttataagtgattattg

SEQ ID NO: 1564083 - DNA, 4001 bp, Homo sapiens
acagttggtgctaaataaatatgttttgtccttccttatccaaatgcattccagatagaaaaaggataaggtggaattctaaacgatattgttttcctatcacactgatacatgccaagcagaaatgtggactgatcttgagttgcaattgttaatgtttgtatgtaaaagtcaggctcaaagcaaatttaatttctttccacaagttcagtactttgcgaacattttattaaccttttagctatattatttaatgcaaaaaattttctggggaaaaatatgacgagctcttgcatactgtttttcacactacccatctaaaggattattaaacatcataaatttggctttttaataaaatatttatagtattagtctggttaacaattttaaataaagttcttgtgattctgccagtcttaaaaacatgatttcctttctttctttccttttctttcaacatatatcaatgtcttttccattgaagagcagcatttagttcaggttttacaagtatgatccaagtcgcaaaatactaagcaccaatcataagcactattacaactctgcgtgcgttaaggagaacaagcaaaattgttatacagcagcggaggtgactgggggaaaaagtgaaaagcgatttgaactgatcccccgccctctccattataccggagaatgcaagtgtcccgcatctcaagattaaactgagcctcggttttactgacgtaaccagtaaccctatctacttctcacactgcggaggccggcagggcagcggctgccgccaagcacaccactcatcagagcctgccccgttccacccccgcgtttcagtcatgctttccagaaatggggtcactcactcagtaactattacacacacgcagcctatcatcctgtaatcccctaaagtccgctgcggggagagaaggcagcaaaaagtcaagaaggaagaatcacagacgcgccaccatcaggaattgattttccactccggagaggagcggtgataccttggaacgggtcttgtctggattattttcgcagaccccgagttgttctgggataggggcggttcaggaaagctcggtgtagtgatgcgcccggggaaattctgttttgccctgtttgggtatattgtttgggttttgggcactaggatgggtgactcagggacggtcaccagatcccgggcgaggaaaaccagaaagccttttacggcggccgctgatctccttgaatatcaccctctcacctccatggacaggaaactcaagttaaactcacagggacgggggtctagctctgcgacctcagaaacggagggggtaggggaccttaggcttccgctttcttctttgcagcagcagaaaccgctgcggcagacgagggggaggcaaaaccctgcaccccctacccgaaacccccacaggtcgccgccgcccgtgccccgcgcgccggtctccccgcagcagcccctccctcggctggactcgagagtccctgctccccggtgaacccgatccctacccctccctcatctcccaaagtcgccaaggtccgggaaagcccccgacccggctgggccaaacttcccaactccccgccggcccccgctccgcctcccgcttcccccacgcaaagttgattaaaattggcttcttgcaaagccccagcgcccactccaaaccccacgcgccaccacactggcagccccccgagcgagggaaggaggtgagggtgaggatggaaggaacagacagaccggccaatagacccaccccaacaacccaaaccaaaaccctgagcccgggggaaagacgcgagcgggatcagaacgggccgagtggccagctccggggagcgaagcgagccggcgggggcgcgaggaggagatgcgccggccccggccgccctgctgcactcacctcagcgctgtcggacgggctctccacagccatcttctgccacgggtccgccagctgcgccagcggcatcttcccccccggcccgccgccttcaccgcctcctccctccccgcccgccccacggccggccccgctccgtcgccgcccgagccccacggcagcggcggcggcggcggcggcggcggcagcggcagcggcagcggcagcagcagcagcagcggcggcggccccagagagggctcgacgccgacgccgaccgcccgaaagccgcgcgcctggccagagacgcccgcgcgctgagcgagagcctcgcgcctccgctgggcaccgggtctcgcccctttcttcctctcctccttccgccgccgggactacggctccgccccccccgccggttcccgcgcccgctcccagcagaacagcgaccgccgcgcgctcccccacttccgctcacaacatggcgcctaagcgatacctgtctctcaaagcgaggctcggccgccgccaccaccgccgcgcgcacccaggggctgggctagtggaagacacgcccccggccgctgcgctccgctcctccctcttcccacccccctccttctgcgccccaacctcagcttctgggcctcgcctactttcaggaagggcgagcccaacagatctgggggcgtcggcgggaggcgggggaaagaaatgggaaaggcaggaggggcgaaggctgggagcctttcaccgccaagggtccaaggaggtcggaggctccttgggaatgagggagaacagtggtccccgcccagctggggagggaggtgggcaaagtaccgggggcgcagtcccgagccaaggacccggggaggggtgcggagtgtcttttcggcttgtctcctccgggggtgcgtgcgtgcggacgcgcctagtctctgggcgcatcccgtaatggcccaagaccctccctcttcagggtcacatgctgggaaatcacctgccccccatctcccccgacggaggcaagggaggcttcgtgcctaggagcctcctgggggctcggctcccggtttgattcaagtcttttcaagttgacgctcttttgttaaattgtggctatttgggattaattcctcttgtattagtcgcttcccccgcaccgcccccagcccaaattctcctccccaagtgcgcagagctctcggccttcagctgcgaccctggaaccgctgccccccgccccacgtctgctacctaaatcttcaagaggggaaaacagggaggttccttaaggctgtccctctcggtagaggttggagaattatttaaaaatatcttgtaggcaggagcgcggggttcctgctcctctgttgactttaaataagagattagatttaaaaatcaggctggccgtgggcggaggaggaggaggagggggacagagggaggggaggggttctgactcctcctcctgcccaagatggggaagccctggattaaggaaacccaatgccccgacggcgacggagccccacaggacggcgagagctttggggggaaggcctgggcgtccggggtgcgtcccaagaggactcgaccctgtgttcactgcgccaggagccgctgcgcgctaagtgcgcccgggcagaaatgtgtaaaagtcgcagggctgagtggaaagctactgcagcccctggctagtcgcccagcgaggggaagagaaaaagcaaagggagatctccgagccggcctgtcccttcaaaccctcaggccgtggcccaggcatcccggtcttcccacgcccagcgaccacggcgcgtccgctgctgcgctcccagcgcacgcctattaacagcttcctttcatcctcccgggacccagacacctggagaaccctcgcctgcctccctaagcaggtgtgaggatgagattagagccccaaacccagccggccaggtctgcgcgggcggtgcgaggtttctcgctgggcctgcgagaggcaggtgttgggctctttctgctgccttcgccagcgcgccccttggcacaggctcgaggccggggaacctcgtggccatttagggaggc

SEQ ID NO: 1564084 - DNA, 4001 bp, Homo sapiens
ctgttcaaatgtagcatttagttttcacctataatattttttattaagtaacttgcagggttaaatctaaccaatcataactgttttagagaaagaaggcagaaatactatcttcaccacattaccttcacctttcgttttacttcatagggattaacaatttccactcgagtatttttccaaattgctgaggtagagagacccattgttaaatctctacaatacctaaaacatactgcaaacaataaaaaaaccatatgtggtaattacaatttaaaacatactacattcaaagttaacagaaataataaaatagtaggcatgcaaaaggattcccacctcccatcccatccttatatcaaagcatttaactgtttttataaactaaatgcctataagttcagtaagttacatacatgaatataacaaagttcctctccccttcaatagacttgctagacaattgtgcaaacagttagcattcccacatttcaacaagaaaggaacgcctattcatttatcttgttcttacgagatgtaaaatattaaaacgtatattggaattgcttggtttactagtaaaatatttcctgtaagtatagagggttcagatttagggtacttctgaatttatttccactatattccttaccacatgttattctagcatgtaatcttaaccccagtttagttgataaataacaaaaaaatttaaagaaaaaaaaacaaggtaatcatacaacagccaaatgtgtattttttttaaatggagcaagtacttgaagacaaagttgcaccctttagatgtcgaggattgagagtcttacctcaaaatatcctactgtgaatcaatttcaccaactatttttaggaggtgtatggtggcctctactggagtagtacgcagtcgattaagttatcagaaaaggatccaactttctatcacaaaagacacgtttttgtgtttaaatgctgcccgcttttataacaacaataaaaacaaagcacctgtgtacatctaagttctcactgcacagctgaccaaagcccaaccagaacagtttcagagtaagaagagtgggaagagaggtgaaccaaagtattttggttgaacctcgctaagtcttaccaaagattcgacttatttataagggctggggtttactttgcgtcttcttttacagaccaacggggcagggacagcggttgtggaaaggagaaggggtggagcaagagtgcagtagaatcaaggggacctgagaggaagcagtagaacatcacctgaaacctggcgactggagataggtcgccagtgtatctcgacatgggtcattacaaggaaccataacaagccacagagaaacgagaaagctgttaccagggaacactcgtgcctatgtgcaaatgtccccagagttacttagtcaccttggtgtgtttgttgcactgggttcgtaaagcgtccggggttcaacagcgagctggagtccgcagctgtcccccaaaatgttcccagccagcaaactaggcgcggcggagaaaaagggacgcgcggagtcaggcacagcaccccgccagtcccccagttccccttcgggtcggaaagtgaagaaacttagtcacaacaactctggcgtggcccgccaggcaggcgctccgcccaaggccgagcccgggcccaggctgcactcactccgcaagcccgagcccgccgtctcatccccgcccgctccccagcgaaagggcagtggaggcagcatcaagggggcttgcccgggagcccgcttcccggccctacgcctctcctctctccgtccccagccaaggtcttgaggggaaggaggcgggggttggctccagcccgtcttggccaccacactaacctcgccgctgctcgcgccgccgccgctgaacacttccatttctcggtcccagggctcgtcctgaggagcgaatggtagcatctccccttcaggagcactcaaacaggagctgccgcctaccgctggcgcggccgcgcatcctgtctattgaactggcccgccgccgccgccgccgccgccgccgccgccgcgacccccagccccgccttcagcgagcgctgccctcgccgccgggtctctcagaggctgggagctgggggtcgccgccgccgccgcccggtgattcccatagagaagacaactctgtgctgcctctccaagagctgccgctcggctcgcgctcaccactgccaccacaacgacagccgctcggtggtgactcccccaacaccccacttcctcgggtcccctccccgctccctgctctgtcaatatggcggcagcggcggcgttacctgtgcggcgcctggacccccccacggcggcggcacagcggcgtcacccaaacgtcaatggagattccccagcttggggtgaagggggcgggatagaggggcggggtggatgcgggggaccgcgtggtgggtggtgggatagaggggaggggggcgtgctgggctggggaggcgactgaacagtagtaaaagcccctgctagcgcctcggtaaacctgcccactccacggagcatgcgcagcgctcttcacacatgctcagcaggccctctcaagtccacggagcagcattgctggcgggcggcaggattctcaaaaaggatgctggaactgggggaccctccagagcacttgaggaatcagggtaagggtaggactccaagagtatctctttgcagggctcacgaagagcaggtgtcttatatgccaaaccacgcccatttcgatacttagtgacaaatactagggcagggattttagtacatcatacattatcctcctagaaggtaaaggcaggataacccccatttaaaaaaataaatatacctgtcctctctagcccccaccttacttgtccctctcaggatgctcctgctggttgccttcacactattgataacacacaatgtttctcttcacacatgcacacacacaggcaaacatatgccacttaatgaactccacttgtggcaacaaaggcatgattccgaagctagcccatcctccagccccctctgagaatgttgggtctgtagtgacaataatcatagtttttagtaccttcttcaaagcgagctttactacttcgctactctaagccacacattgtactgggagctggcgatataacagagataaagtataatcttatacgggggataatcaagatgcttctcatcaaaacacttcagagctgaaagtttaaaagttattccacatttgacacttcaaagacttaaaagagcaactgtaacagcggctaaaccaactcaggaccttggagaggtttctaacgttcataaaaggcacaccaccccctttacccttctacacctagggctgttgacctatgccctccatttatttcatcatctggtctcaagagctaatgaagcaaagctggccacagagattgcactgaattacaaacaaggataactgataatgtcctctcacttactctgctgaaaatctcgaggagaaagtgagcttaacgaacagggttctctaaaagtcaaagcttcgaaagtagtgggtgcatggggctataaatcgtgaaaatgtgtgagagtgtgtgtgtctgtgtgtgcacgcacacacccataaactcatatttggctgaactgacagtattaactagggccaactttttttctttttcttttttttttttttttttttgagacagagtctcattctgttgcccaggctggagtgcagtggcgcgatcttggctcactgcaacctctgcctcccgggttcaagcgattcttctgactcagcctcccgagtagctgggattacaagcgtgcgccaccacgcccggctaatttttgtatttttagtagagacagggtttcaccatgttggtcaggccggtctcgaactcctgaccttgtgatccgcccacctcagcctctcaaagtgctgggattacaggcctg
